United States Patent Application Publication US 2003/0077808 A1 - sequence listing, part 4

SEQ ID NO: 7532 - DNA, 434 bp, Homo sapiens
gcgaaaatcattaaaattctgaagcccagagtcctgattctgctcagctgggcaaataggtatcatctcctcatttaacagtgctggcatctctccctcctcccgtgcttatgccgtgtgcctccacccagactcccaccaagcctgcacattttgctaaaaatcacccagagtattgtgagtccttggagctgctatagttgtttcctcaagggacatgaggaaggagagaaggaaaacagaagagcagagctatagggagatttcaaacttttcactccacctttaccagtatattggcatcttgatttggtctatgcattggaatttctagcatatgttggtatgttgctgctaaataaatgtttgaaaaccaaaatcacagacttaagcaacaattaaagaaaacatcaagtagtattttacctagcgag

SEQ ID NO: 7533 - DNA, 89 bp, Homo sapiens
aggaggtggaggttgcagtgagcggagatcgtgccactgcactccagcctgggtgacagagtgagactctgtctcaaaaaagaaaaaaa

SEQ ID NO: 7534 - DNA, 2215 bp, Homo sapiens
gaggtcacagccaacattcagaggcctcccagggccccctctccctggataaaccacttcagctgccccccatttttctcgagggagaaaaaggggaatcctctgtccagaatgagcaggaaggagagccaagcctacagtcacccagcttagagctccagtcccctgcgtggccacgccatgcaggagtggctcaggagcccctgaaagtgtccagcagctacctcagtgacacccagagcagcgagagtcatgtttccagcgtgcagcacccgaggccagaggagggcagccatgccagcctgagcagcgggtacgcaggggacaaggagggcagcgacatcagcttggtgggcagccaccggagagtgcggctgaacagaaggctcaacacccaggcggccagtaaccaaaccagccagctgggctccatagaccctcccagctctctaaagagccggctgactggccccgcccacagcaccaagcagactggagggaaagagtgaggccagcctgcccggcagcggcagcggcagcagcatcctgtccagcgccagcttcatcagcttgggcagcagtgccctcacctacaaggtgagcagcgggctgctgacttccacagccagccttccctccacccaggccagcagccgtcagagcgtccggctggatggcagtgcccaaaacaggcagagcagccacaccagcgtgcaggaggacaagacgggcggcaacgtgaaaaccagtgagcaggtcaccacgggggagcagcctgcccaggtgtgcatgcctttgtgagaatcctctccagcagccagagtctcccagaaaacaacacacaggcccagcaaacacaggctgcacccagagtggatattcccaaaacaagtaggaaaggtgttttcaaaagcacacactgactgtgtcaaccatcagtgggtaatcccatttgtagcaacaagcatcagtgggcaggccacatgtagcaggaaggatctatgctgagcaccgcctatcctgagaacacagtcagtgaggagactgtctatactgagaaccactgttgctaggaagagctgtagtatcaagattcaccaatgctgagtccacctgtgtcaaaacagcgaagagtaatgacatcgactgtgaacttcagtgacaagccatctataacaagatccatcaatggcaaaaccatctgtagtcagcagcatcctggtgggaccccctgtaccaaaactcatcagtggcgacagatgttctcgatggcaaacgctgacgatattaagaactgtcacgagttagaaccttccatgatgaaaccatcctaaatgatgaatgccatctgcaaccaacaccagccacgatgagctcagaagaaacaagctgcaaccatggttgggactgtccatatcaagaaccatctgcagtgagcgccatgcgtggagagccacatccacatgaaacttcatcctggccaagcagcaccacactctgtccatcattgtcactgcccgcagaagcactagcaagacagccacggtgcacacggagcaccttcacgactctcagctcccccaaggagtccagactaagtgactgtcaccagagaaggatcatcaggagcagccagggatgcccccggcacacagggactaggtctagtgagaacattagagggcggtgtaaatggatccccatgcctgggcacctgtaatcccaactacttgggaggcaccatcccagagagctccaagcgtccttttttttttttttttcctttgagtgctgtctctggacatcttcagcccagaatcttctcaggagcaaaggcttcctgatgcctcattcatgtcaagaaaggaggccaggagccatcctgtgttcagatggttgagacagtgactacgatggcaggacaatgccgtgagaagcacttcatggtgacagagcccaacccagccgggaacagctgcgatggggaagctctggagcattttgtgagcaccgtctcggtggatgggaaagccgaagtctctgcccgtctcttactggaggcactaaaccccctccctgggttgacctcacagacattgaagtgagtctgcccacaaaggaaaagaggccagagactgtcgtgaagacatccactaggtaccagaaggaaagctgagggggcagcaaagacaataaaaggtgtctagagaggtca

SEQ ID NO: 7535 - DNA, 1730 bp, Homo sapiens
tagctatttaaattcattgtaaactgagaaaactgtaaacagggatgacgctgcttatgacatagtcacatacacagtgtcacatagttaaggggatcagccacattgagtgtggatctctcctcctctcggagcaacgttcctattgacattcggagaggcacgctgcccccagatgctcattttcaaacacaggacgtgagcagtttcacaaatatccaccagatggtaccttcctaccagaaattaggtttcaggttgtgaaaatccaaattgtttttccattccacggacaagctatagaattagatgcctatcctggctacggtcagaggaaagaaaatgggtgagaaccaattccagggaacgacccacggagtttttattctcaagaataccaaacagaacttgcagggtcctttgtgtggtggagggaggcagctgctgtggatgagtcatggaaaggccatgtgcaagggaaagaccttgaggttatctccggagaggggttggttgtaaacatcctcaatggcacctttgttttatcccactagttgccaaatacctgtgattctgcacagcgctcctggaatgctcagaaattatgactggttactctgtcaaagaaagtctttgttgtagaaacttcctcatttgttcaggcctttgggttctaagccctgagccatagtctcccccggttgtttgcctgtgtgggctagggagggtgactgatgttcaccgtggggtgaccaccttgtcctggtttggcagctgccttcctgcctttagcagtgacagtaaagcaaacccaggcggttggtcatctcggtgcactgagctgtacacaccagggacagtgctggatcctcacgcaggttcaatgagctgggcgatttgaggtggtagatgccgtcttcacatgattaatcattttgttcttggcattttcctagtaggtctccctgcttccttttgccagaaaaggtaaagttctggagaaagaggttttttcttggcttttgagttcaggccttacagaggtaaaaccgagtagatgtgggagaacatgtggtaaacagatacaactttcccgggatggggagagaaaaatagtgaaactccatctccactaaaaatacaaaaactagcccggcgtggtggcacgcgcctgtaatcccaactacttgggaggctgcggcaggtgaatcacttgaagccgggaggtgaaggccgcagtaacgctgttccctgcattggatgaagtgctccccaccaaactctctcaccggagagggtgggatctgcgggctccctgggtggcttgatttcgacaccctgtgggctgccttccactctggtactttcctctgcctgctgatgcttgaaattccttgaaccggccacacacacctgctttctggaatcagaacactggaaaggcttcctgggacgggagaagagtgatttacattcctgccgaggtgtaaagctgcggatggcaggttctctcctgagaaccggcttcaactaggaggaggaggttggaagcaggaccccgagctgacctgttgaccaggagaggagtaagcagaagggaggcaggagcgggcggaggagagaaggccggggagccgggatgggggtcaccgcccccggggagccgggatgggggtcaccgcccccggggagcccggatgggggtcaccgcccccgcccccgtgatgccg

SEQ ID NO: 7536 - DNA, 1153 bp, Homo sapiens
tgtgtggtggaggaaggcagctgctgtggatgagtcatggaaaggccatgtgcaagggaaagaccttgaggttatctccggagaggggttggttgtaaacatcctcaatggcacctttgttttatcccactagttgccaaatacctgtgattctgcacagcgctcctggaatgctcagaaattatgactggttactctgtcaaagaaagtctttgttgtagaaacttcctcatttgttcaggcctttgggttctaagccctgagccatagtctcccccggttgtttgcctgtgtgggctagggagggtgactgatgttcaccgtggggtgaccaccttgtcctggtttggcagctgccttcctgcctttagcagtgacagtaaagcaaacccaggcggttggtcatctcggtgcactgagctgtacacaccagggacagtgctggatcctcacgcaggttcaatgagctgggcgatttgaggtggtagatgccgtcttcacatgattaatcattttgttcttggcattttcctagtaggtctccctgcttccttttgccagaaaaggtaaagttctggagaaagaggttttttcttggcttttgagttcaggccttacagaggtaaaaccgagtagatgtgggagaacatgtggtaaacagatacaactttcccgggatggggagagaaaaatagtgaaactccatctccactaaaaatacaaaaactagcccggcgtggtggcacgcgcctgtaatcccaactacttgggaggctgcggcaggtgaatcacttgaagccgggaggtgaaggccgcagtaacgctgttccctgcattggatgaagtgctccccaccaaactctctcaccggagagggtgggatctgcgggctccctgggtggcttgatttcgacaccctgtgggctgccttccactctggtactttcctctgcctgctgatgcttgaaattccttgaaccggccacacacacctgctttctggaatcagaacactggaaaggcttcctgggacgggagaagagtgatttacattcctgccgaggtgtaaagctgcggatggcaggttctctcctgagaaccggcttcaactaggaggaggaggttggaagcaagaccccgagctgacctgttg

SEQ ID NO: 7537 - DNA, 1730 bp, Homo sapiens; identical to SEQ ID NO: 7535

SEQ ID NO: 7538 - DNA, 85 bp, Homo sapiens
tgaggcgccgtgtgccgccccctggtggccggagcccgttactgtcgcggctgagggggcgtcccggtgtatccgcagcgcgccc

SEQ ID NO: 7539 - DNA, 85 bp, Homo sapiens
tgaggcgccgtgtgccgccccctggtggccggaggccgttactgtcgcggctgagggggcgtcccggtgtatccgcagcgcgccc

SEQ ID NO: 7540 - DNA, 424 bp, Homo sapiens
ggaaaacctccccaagaatgatggatacaaacaagtccagacagtgaagactgcaaaaaatacttaactcttcaatgcccagaaactgaagagcatttactagcatcaacaccatccgtgaaaacacgacctcaccaaatgaactaaataaggcaccagggaccaatcctggagatacagagatatgtgaactttcagtcagaggattgaaaatagttgttttgaggaaattcatagaaattcaagataacatagagaaggaattcatcagataaatttaacagatattgaaatcatgaaaaagaatcagaaattctggagctgaaaaattcaattgccatactgaagaatgcatcagagtcttttaacaatagaatcaatcaaccagaagaattagttagcttaaagataggctgtttgaaaa

SEQ ID NO: 7541 - DNA, 424 bp, Homo sapiens; identical to SEQ ID NO: 7540

SEQ ID NO: 7542 - DNA, 435 bp, Homo sapiens
ctctggcagcctgcttttattatcttatctggccccacccacatcctgttgattggtagagccgagtggtctgttttgacagggtgctgattggtgcgtttacaatccctgagctagacacaaaggttctccacctccccaccagattagctagatacagagtgtccacacaaaggctctccaaggccccaccagagtaactagatacagagtgtcgattggtgcactcacaaaccctgagctagacacagggtgctgattggtgtgtttacaaaccttgagctagatacagagtgccgattggtgtatttacagtccctgagctagacataaaagttctccacgtccccaccagactcaggagcccagctggcttcacccagtggatcccacaccggggatgcaggtggagctacctgccagtcctgcgccgtg

SEQ ID NO: 7543 - DNA, 6734 bp, Homo sapiens
tccggtatccactggaagtttatttctttagggttctatcccaaccagtcgcttaaaaaccaagtaacacagacctgaggggtgggggctggggactgcacctccctcctactcatggtggacagcagtggggactagggaggggcaggagaggtggctgaagcaaggcagcagtaatggggccacgacgccacagagccagctccgtcctctcccagaccctggtgggagtccctgtggcttggggtggggagtgggggacccaccccaggccctccctctcccttcctcagacagcctcctttcgggctcaacccatttcttccggcaggagactgaggcacacagagaggaggaagtgggagaggaggacgagggaggggcagggtggcagcacaaatgaaggcagaggtgagaggcgtgggcaaggccactccacccccacacccaccccagagaggggcgaggaagccacaccatcacgcagcatgtcggggggacaaggcggggtttaaggctgaggggcccggggcaggcgggcctcgggcctcagtcaaagccgtgccagtcgctgtgctctgagtcgtattccagctcggcgcccacacacttgacaccatccagcagcatgggcgtgccgtggtgccggtctgcaaggcagggtgcaagtcagtgccatgctggccccggccccacccatgcggcccactaaggggacccctccccttccctcagggatcagctggaggtagggacctgccaaggaggttgagaacccctgagccgggcaaggatcccttgttcagccttggttccctgaggaggacagaaaccctcgcagtcgagcttgtgcatccctcctccaaccaggagcctcacgctctcacccatgacgcgggcctgcaccgtcacgcgcacacaggtgccagtgccaccttcgcaggctagcagtatctcctctttgaggacgccctctttgtgcgccgagtactcacacttgacactataacctgcccggggacaggggcaattggtcagcacctcccccagcctccccgatcctgcccctggcactcacgggcccctacccaccaccatggggggactgcatgctaagcccccccaagaaaggggcagggatggcccttctggagcccagagacccattccccctagcaggggtgcacaggtctcaaaaacccattcttcagtgagctggacatgcctccagcctgtgggccaccccaatgtggctccaagagtgaatgaagtagggtccaattcaggcttccaaaagaaggtctggctgttttctcccaaaaggaaggcagggagaggcggtgatgaggagtgaggggggcagggcagggtaggctttgagcagatccgatggcaagaggtaaaggcctgaggggtgtcaatccattgaagggcaaggtcatgaagaggctggtgacggggacatgaaactgaagctggagctccacgaaactgacaccctagcctctgccaggctgggagtggggcatggggcagggccttgaagtgagcctgataggaacagcagcctgaaacccaaggtctgggactggtgggtgctaggagttatccacacggtgtgtgtagctccagcaggtttttctagagggttagggaggcaggagggaaggctggaggcttcaaaccagttcctcagcagctcccatcttggttactgccccacggaggtaaccatcacaccatgggcaggtacagggaagtatgagctcatggacttctgttcaggacagggagcaaggcctggagtgtgggacctgccatgctgccacagtgcaagctcacaaagaggtgccacatccccgacttgctgagctgcccatccaccctagttggaagtaagggagcaccccatgttctcactcccacacccatccaggccctgctggaggaggggacgcaccttcagggacgggcaccacgctgaggagcttgaggtgcaggctggggacaggtgcctcgcggacatccttgctcagcctgtgcactgggggcagagtgaaggtaatctcatacctgtgcaggatcttcaggaagccaacctacagcaggagaggtgagggagggaggcaccttcacttcctgcttcccacaggcccacccagttgtgccacctatgatcccatgcgccccagcacctgcttccccagagagcccagaaagcccaactccctccatcactccagctgatcgacccccagccctttcacagaccccttgagggtcccagccctacagcttggccagcaagatcctcagcatctgtctcacgggccccaaagtcctcagtggctcatttcatagacaggaaaatggaaaccacaaaatgactggccaaaggctatgtagtgtggccagggtcaagtcctccctagacttcttggccattcctgctatgcatggcacccagcaaggcaccacccactgcctacaagggaaagttcaaagtcccatgggtcattcacctgtccccatcactgccagtatcccagggtcagggatgctggtcctccattcgctcataggatgacaccaggccacagatagcgtgggatgagggatgggatcaaattagagatatgacagtagaccagctgtgtcagcccagagctggcccacagacctggcaccagccactgaactggggctcctggctgccctgctggcactggactggggatgcctgcctgcccactcaaaggctgtgtccaatggcccatactcacgacccaagcaatttctgttgttcattcacagtgcttggtgacaaccaccctctgggacaaatgccattcttggaaactccagtagtatgaagggtcacaagccagggtggttgctgagcaggggggctggtgggggtgccacgccagcaggcaaagggtgcctgctgtactcccagcttgcatgggcacacagagtcctgctcacagttactggggctgggcagcccatccctgggggccaactgggactggctgcagagagttttagccattcaatgggaccaggttgatattgctacatgacaaacttcaatccatgtgcccccctcatgctctgctggtagggggcacatccctcaagaaggctttctggctgtacctgctaactgtgaccctgtgacccaggggtactacttatagaattttccaggggaaatagagatgtgcagaaaaatactcttcgctgccctatttataacaatgaaaacaaaaacagccgtaacacccaggaacagggagccagctaagtcaatgatgacacatatcatggaccagtaggcagttgtaaaatctcgtggaaaattatttactgacacaggtaggagacagttcacaacagaagcaagcaaaaaccagtgtggacacggtgaggccagcttttgtttttggaaacaaagctttttaaaataagctggatccatcaccatagtgttttcagaaaaacaaataaataaataaataacattttaaaaagctggaataagccaggtgtggtggctcacgcctgtaatcccagcactttgggaggccgacacggacggatcacgaggtcaggagatcgagaccatcctggccaacagagtgaaccccgtctctactaaaaatataaaaaattagctgagagtggtggcacgcgcctgtaatcccagctactctggaggctgaggcaggagaattgcttgaacctgggagctggaggttgcagtgagctgagatggcgccactgtactccagcctggtgacagcaagactccgtctcaaaaagaaaaaaaaaagctgaaataacacacatcagaatattaaccatggttattttgggatagtatgactgtgggtacttttaaatttcttcatattttctctgtcttccaaattttctcatgtctattaagacatgagtggattttgcaatgaggggagagagctatttttaagtgttggtttgttccatttactctcttggggaagctgtcagctgtaggacaaagagtgggaacttcagagttggacagaaatggatacaaacctgggccccccaggttcttttttgtttgtttgtttgagacagagtctttctgttgcccaggctggagtgcagtggcacaatctcagctcactgcaacctcagcctcctgggttcaagcaattcttctgcctcagcctcccaagtagctgggactacaggcgtgcgccaccacgctcagctaacttttgtatttttagtagagacgggtttcgacccattggccaggctaaacctgggccccttttgagcagcgcagcagaccccccactcagggccatctcaatgggccagacctcccccgacccaagggcactcctgttcaactctggacccctgatttattgaccaacctgaaggcctcagtctccattttccccaatccagctccaccaagcagaaaacagggggtgataatactacttcaaagagcctaactgagccagagatttggcaaagaagggttaaaaaaaaagttgcaccttgttattgccatagttagcttcacacctgtatcacatacatacattcttccattctcacaccaactctaggggatgtgattgtctccacttgagagaaaagaaactcaggtgaccttcccaaggtcacagagccagaatggctggcctagacctgaactcaggccactggcaccacagccacgacactgccttccattgctattgtctgggtgaagcagatgacagcagtggctctgctcatcttgatctggatgacattctaaatgctctcatctcattgaaatctcactgcctcccatctgacagatggggcaaccaaggcacagggaaaggcacagacatgcctataagcccggctgagaggaacggggataggcacccagaagccaggcagagccggggaggggaagaagctgctgatggggtaggtgtgcatgtaccttgaccagaaagctgctgtcactctcctgggtgaccatgaccaccgagtcatgcagcttctcatcaaagtggacgtggctgtgggatccttctgcatcgtggcctgcgcaaagcggatactccggactctgggcttgttgcctaggaagagtgggagagggctctgagggctttccctgtccccaggaaactcctcccccttgtcccctcgtcacccccaagactgcccttgacatcatccagctcccactggctgggctcttttcagggctagatggacactaggatcatgaggcttgaggcctccccgccggccccgacctgcccctcccacaaaaatccatcccctgagagtgagcgtggggggactcagggactggctaatatgacccttgcttggagggggtggggctggtgccagagccaggaagggacagtcttccagactcccaccaagccagggcagcgtgggactcagcccagtcctctggataccctgcccagtgctctccttcacagtgcaaagctccccatccctgggcctacccctaagctgtgtcagtgcatgaggcccctgcctgcccatcctcatgacccaaacctgaaagggcagggacaggaacaggctctgggggatctgcctggggtggcagaaacagggggatcaaaaaacacactcaggccacctgggcgaggctgcagctgccactaaacctcactggcccctggcagcaagaagagagaatccaaggaagcttccagacccacctcaagacccccttccttcctctgtctagcccaccatcaaggccctcagctgtctctgagctgggtcgggttctccaaggccagaaagggcagacggatgagacaggcagggtaggcgggagccgagctgaaggcctggactggatgaatgctcaggctgtagaggccgagagcacggccctagtcctctctgacccctggcccctaggccctcccaccaagagccctgcccagggtcctcttggcgggaggacctgatccagctttgagccggcctcttggatactcggaggcccaggggaccagcctggcacatccacaatccctggtgagccccacagaaccctcaaatctcaccagatcaccctggcctaaaaccctcccttatcccttctggactctgaaagaaacccaaactcccttccacagcctgctgtggccctcccacatcaccagtctcagtgctcaccataagcccctcggctcccccaacccccacagtggaacggcagggacacaagagcacacacctccacagaccagcctaaggagtcagcagggctctgcaggggtcctgctagggcttgcgtgagccccagaacctggcacaaacactgacatagtcccaatcacattcgcacaccagcacacacgcactcacacatgcacacacacacacaggtggtgcgggccctacctgcagcaatggccctcctaccagggcccaccggaagagcttgtgcaagtcctaccacgccaggaaggcacttacccttgttggctgcagccatggacgccctccctgccacgcagctcctgccagacaccgccactcacgctcagcagcctcccatgctccagggacaccagcgggagcctgaaggatagggagtggggagggcaggggtcagggccacccatggacccatggctcagggacaccagaggagctcc

SEQ ID NO: 7544 - DNA, 6756 bp, Homo sapiens
tccggtatccactggaagtttatttctttagggttctatcccaaccagtcgcttaaaaaccaagtaacacagacctgaggggtgggggctggggactgcacctccctcctactcatggtggacagcagtggggactagggaggggcaggagaggtggctgaagcaaggcagcagtaatggggccacgacgccacagagccagctccgtcctctcccagaccctggtgggagtccctgtggcttggggtggggagtgggggacccaccccaggccctccctctcccttcctcagacagcctcctttcgggctcaacccatttcttccggcaggagactgaggcacacagagaggaggaagtgggagaggaggacgagggaggggcagggtggcagcacaaatgaaggcagaggtgagaggcgtgggcaaggccactccacccccacacccaccccagagaggggcgaggaagccacaccatcacgcagcatgtcggggggacaaggcggggtttaaggctgaggggcccggggcaggcggggcctcgggcctcagtcaaagccgtgccagtcgctgtgctctgagtcgtattccagctcggcgcccacacacttgacaccatccagcagcatgggcgtgccgtggtgccggtctgcaaggcagggtgcaagtcagtgccatgctggcccccggccccacccatgcggcccactaaggggacccctccccttccctcagggatcagctggaggtagggacctgccaaggaggttgagaacccctgagccgggcaaggatcccttgttcagccttggttccctgaggaggacagaaaccctcgcagtcgagcttgtgcatccctcctccaaccaggagcctcacgctctcacccatgacgcgggcctgcaccgtcacgcgcacacaggtgccagtgccaccttcgcaggctagcagtatctcctctttgaggacgccctctttgtgcgccgagtactcacacttgacactataacctgcccggggacaggggcaattggtcagcacctcccccagcctccccgatcctgcccctggcactcacgggcccctacccaccaccatggggggactgcatgctaagcccccccaagaaaggggcagggatggcccttctggagcccagagacccattccccctagcaggggtgcacaggtctcaaaaacccattcttcagtgagctggacatgcctccagcctgtgggccaccccaatgtggctccaagagtgaatgaagtagggtccaattcaggcttccaaaagaaggtctggctgttttctcccaaaaggaaggcagggagaggcggtgatgaggagtgaggggggcagggcagggtaggctttgagcagatccgatggcaagaggtaaaggcctgaggggtgtcaatccattgaagggcaaggtcatgaagaggctggtgacggggacatgaaactgaagctggagctccacgaaactgacaccctagcctctgccaggctgggagtggggcatggggcagggcctgaagtgagcctgataggaacagcagcctgaaacccaaggtctgggactggtgggtgctaggagttatccacacggtgtgtgtagctccagcaggtttttctagagggttagggaggcaggagggaaggctggaggcttcaaaccagttcctcagcagctcccatcttggttactgccccacggaggtaaccatcacaccatgggcaggtacagggaagtatgagctcatggacttctgttcaggacagggagcaaggcctggagtgtgggacctgccatgctgccacagtgcaagctcacaaagaggtgccacatccccgacttgctgagctgcccatccaccctagttggaagtaagggagcaccccatgttctcactcccacacccatccaggccctgctggaggaggggacgcaccttcagggacgggcaccacgctgaggagcttgaggtgcaggctggggacaggtgcctcgcggacatccttgctcagcctgtgcactgggggcagagtgaaggtaatctcatacctgtgcaggatcttcaggaagccaacctacagcaggagaggtgagggagggaggcaccttcacttcctgcttcccgcaggcccacccagttgtgccacctatgatcccatgcgccccagcacctgcttccccagagagcccagaaagcccaactccctccatcactccagctgatcgacccccagcccagtggccccagccctttcacagaccccttgagggtcccagccctacagcttggccagcaagatcctcagcatctgtctcacgggccccaaagtcctcagtggctcatttcatagacaggaaaatggaaaccacaaaatgactggccaaaggctatgtagtgtggccagggtcaagtcctccctagacttcttggccattcctgctatgcatggcacccagcaaggcaccacccactgcctacaagggaaagttcaaagtcccatgggtcattcacctgtccccatcactgccagtatcccagggtcagggatgctggtcctccattcgctcataggatgacaccaggccacagatagcgtgggatgagggatgggatcaaattagagatatgacagtagaccagctgtgtcagcccagagctggcccacaggcctggcaccagccactgaactggggctcctggctgccctgctggcactggactggggatgcctgcctgcccactcaaaggctgtgtccaatggcccatactcacgacccaagcaatttctgttgttcattcacagtgcttggtgacaaccaccctctgggacaaatgccattcttggaaactccagtagtatgaagggtcacaagccagggtggttgctgagcaggggggctggtgggggtgccacgccagcaggcaaagggtgcctgctgtactcccagcttgcatgggcacacagagtcctgctcacagttactggggctgggcagccccatccctgggggccaactgggactggctgcagagagttttagccattcaatgggaccaggttgatattgctacatgacaaacttcaatccatgtgcccccctcatgctctgctggtagggggcacatccctcaagaaggctttctggctgtacctgctaactgtgaccctgtgacccaggggtactacttatagaattttccaggggaaatagagatgtgcagaaaaatactcttcgctgccctatttataacaatgaaaacaaaaacagccgtaacacccaggaacagggagccagctaagtcaatgatgacacgtatcatggaccagtaggcagttgtaaaatctcgtggaaaattatttactgacacaggtaggagacagttcacaacagaagcaagcaaaaaccagtgtggacacggtgaggccagcttttgtttttggaaacaaagctttttaaaataagctggatccatcaccatagtgttttcagaaaaataaataaataaataaataacattttaaaaagctggaataagccaggtgtggtggctcacgcctgtaatcccagcactttgggaggccgacacggacggatcacgaggtcaggagatcgagaccatcctggccaacagagtgaaaccccgtctctactaaaaatataaaaaattagctgagagtggtggcacgcgcctgtaatcccagctactctggaggctgaggcaggagaattgcttgaacctgggagctggaggttgcagtgagctgagatggcgccactgtactccagcctggagacagcaagactccgtctcaaaaagaaaaaaaaaagctgaaataacacacatcagaatattaaccatggttattttgggatagtatgactgtgggtacttttaaatttcttcatattttctctgtcttccaaattttctcatgtctattaagacatgagtggattttgcaatgaggggagagagctatttttaagtgttggtttgttccatttactctcttggggaagctgtcagctgtaggacaaagagtgggaacttcagagttggacagaaatggatacaaacctgggccccccaggttcttttttgtttgtttgtttgagacagagtctttctgttgcccaggctggagtgcagtggcacaatctcagctcactgcaacctcagcctcctgggttcaagcaattcttctgcctcagcctcccaagtagctgggactacaggcgtgcgccaccacgctcagctaacttttgtatttttagtagagacgggtttcgacccattggccaggctaaacctgggccccttttgagcagcgcagcagaccccccactcagggccatctcaatgggccagacctcccccgacccaagggcactcctgttcaactctggacccctgatttattgaccaacctgaaggcctcagtctccattttccccaatccagctccaccaagcagaaaacagggggtgataatactacttcaaagagcctaactgagccagagatttggcaaagaagggttaaaaaaaaagttgcaccttgttattgccatagttagcttcacacctgtatcacatacatacattcttccattctcacaccaactctaggggatgtgattgtctccacttgagagaaaagaaactcaggtgaccttcccaaggtcacagagccagaatggctggcctagacctgaactcaggccactggcaccacagccacgacactgccttccattgctattgtctgggtgaagcagatgacagcagtggctctgctcatcttgatctggatgacattctaaatgctctcatctcattgaaatctcactgcctcccatctgacagatggggcaaccaaggcacagggaaaggcacagacatgcctataagcccggctgagaggaacggggataggcacccagaagccaggcagagccggggaggggaagaagctgctgatggggtaggtgtgcatgtaccttgaccagaaagctgctgtcactctcctgggtgaccatgaccaccgagtcatgcagcttctcatcaaagtggacgtggctgtgggatccttctgcatcgtggcctgccgcaaagcggatactccggactctgggcttgttgcctaggaagagtgggagagggctctgagggctttccctgtccccaggaaactcctcccccttgtcccctcgtcacccccaagactgcccttgacatcatccagctcccactggctgggctcttttcagggctagatggacactaggatcatgaggcttgaggcctccccgccggccccgacctgcccctcccacaaaaatccatcccctgagagtgagcgtggggggactcagggactggctaatatgacccttgcttggagggggtggggctggtgccagagccaggaagggacagtcttccagactcccaccaagccagggcagcgtgggactcagcccagtcctctggataccctgcccagtgctctccttcacagtgcaaagctccccatccctggggcctacccctaagctgtgtcagtgcatgaggcccctgcctgcccatcctcatgacccaaacctgaaagggcagggacaggaacaggctctgggggatctgcctggggtggcagaaacaggggggatcaaaaaacacactcaggccacctgggcgaggctgcagctgccagtaaacctcactggcccctggcagcaagaagagagaatccaaggaagcttccagacccacctcaagacccccttccttcctctgtctagcccaccatcaaggccctcagctgtctctgagctgggtcgggttctccaaggccagaaagggcagacggatgagacaggcagggtaggcgggagccgagctgaaggcctggactggatgaatgctcaggctgtagaggccgagagcacggccctagtcctctctgacccctggcccctaggccctcccaccaagagccctgcccagggtcctcttggcgggaggacctgatccagctttgagccggcctcttggatactcggaggcccaggggaccagcctggcacatccacaatccctggtgagccccacagaaccctcaaatctcaccagatcaccctggcctaaaaccctcccttatcccttctggactctgaaagaaacccaaactcccttccacagcctgctgtggccctcccacatcaccagtctcagtgctcaccataagcccctcggctcccccaacccccacagtggaacggcagggacacaagagcacacacctccacagaccagcctaaggagtcagcagggctctgcaggggtcctgctagggcttgcgtgagccccagaacctggcacaaacactgacatagtcccaatcacattcgcacaccagcacacacgcactcacacatgcacacacacacacacaggtggtgcgggccctacctgcagcaatggccctcctaccagggcccaccggaagagcttgtgcaagtcctaccacgccaggaaggcacttacccttgttggctgcagccatggacgccctccctgccacgcagctcctgccagacaccgccactcacgctcagcagcctcccatgctccagggacaccagcgggagcctgaaggatagggagtggggagggcaggggtcagggccactcatggacccatggctcagggacaccagaggagctcc

SEQ ID NO: 7545 - DNA, 1019 bp, Homo sapiens
ccgaaattaaggtcaccgccgtcgacgtcagcaccaatcgctccgtgcgcgcgtccatcgactttctttccaactgagggcgcgcgcgcgtgccaggcccgtctgcccggccccgccctctttcggttcaggggcctgcggagcgggttggggcgggggaaacgatagttctgcagtctgcgcctttccacgccctccagccccgggggagataaggtcatgggagagtgggtggggacacacccagagactggctttgggattgggcactggtccgctgactgccaggctgaagggacccgccaaggactgaacgggtaagagaagaggtttgcaagacagagcgcgcagcccggcaaggggcatgtgaccccgaaggaagaacgcaacagaagagtcctggtctgaacttggccgagtaggggtgggggtgggatggcaggaggagccgcaggaggaaggaggttgtgcagggtctggacctgcagggctgaagttcactcatcgaccgactcagccccaaccgggagccaggcagaaaaaccctgtgccgtaggaaagtgactggaagtggactccagagggacaggtgtggtggcacagtcctggtgtggtgctgaccacccaaatatgactgtgaattgtggaaagggcagtagatctctaatgtggaggtgggaacattattgtggtggaggcaattatgagggtagcatttctttcgagacaaaacacccgtctgggaaggccccaaggtcagcttatgaaggaccccacttgcaccccaccccagccatggaagagcagctggagggtggatggggaggccagagggagcaatgaggggtggtcccagctctgctattgactcggtatgcctttaggacattctcttaccgctcatgggcctcagtttcctaaagtgtgaaatgtcaggcacttccctctaactggcatgcaacagccccacctgcctgagagccctgaggtgacaataaaacatttatgctcaaggggaa

SEQ ID NO: 7546 - DNA, 2175 bp, Homo sapiens
cccctacatgaacaaacagatgcagaataattcccccccatcagtgcctagatacctccacacatccatacactgtgatgagacctagaatcatctagaacacctgcgggatgaagtgcagtggtgattaagagctagagggttgatatgtagtcttgccaaggcaaaaaacttctggtgcctcagtttccccatttataaaatggggtgatagtattgggttctcaaaacgttatcacagggataaaatgagctgaagtacctagagtgagcacaatgtcttgcacacaatgtctaggtgtttaatacgtgtaaaatgcatatccttatctctcgtcctccacgtcgtggtgggagagaagtggggagcgtgagtgttggggaggcgaagccctcgaggactcccgtgagctctcaaagaaagtgctcaaatggctactttctagtcgccaggtaggtacaggctagggaggggaggcgccggtggccgcctagtggtggcctcagtggctctctctcccccgccccttctcctctgcccccttcacccgcgtccccccgtcctgtcccgcagaggccctgctggcacggccggaggtgcagggtgtgaagctgctgttcctagtgggcggcttcgccgagtcagcggtgctgcagcacgcggtgcaggcggcgctgggcgcccgcggtctgcgtgtcgtggtcccgcacgacgtgggcctcaccatcctcaaaggcgcggtgctgttcggccaggcgccgggcgtggtgcgggtccgccgctcgccgctcacctatggcgtgggcgtgctcaaccgctttgtgcctgggcgccacccgcccgaaaagctgctggttcgcgacggccgccgctggtgcaccgacgtcttcgagcgcttcgtggccgccgagcagtcggtggccctgggcgaggaggtgcggcgcagctactgcccggcgcgtcccggccagcggcgcgtactcatcaacctgtactgctgcgcggcagaggatgcgcgcttcatcaccgaccccggcgtgcgcaaatgcggcgcgctcagcctcgagcttgagcccgccgactgcggccaggacaccgccggcgcgcctcccggccgccgcgagatccgcgccgccatgcagtttggcgacaccgaaattaaggtcaccgccgtcgacgtcagcaccaatcgctccgtgcgcgcgtccatcgactttctttccaactgagggcgcgccggcgcggtgccagcgccgtctgcccggccccgccctctttcggttcaggggcctgcggagcgggttggggcgggggaaacgatagttctgcagtctgcgcctttccacgccctccagccccgggggagataaggtcatgggagagtgggtggggacacacccagagactggctttgggattgggcactggtccgctgactgccaggctgaagggacccgccaaggactgaacgggtaagagaagaggtttgcaagacagagcgcgcagcccggcaaggggcatgtgaccccgaaggaagaacgcaacagaagagtcctggtctgaacttggccgagtaggggtgggggtgggatggcaggaggagccgcaggaggaaggaggttgtgcagggtctggacctgcagggctgaagttcactcatcgaccgactcagccccaaccgggagccaggcagaaaaaccctgtgccgtaggaaagtgactggaagtggactccagagggacaggtgtggtggcacagtcctggtgtggtgctgaccacccaaatatgactgtgaattgtggaaagggcagtagatctctaatgtggaggtgggaacattattgtggtggaggcaattatgagggtagcatttctttcgagacaaaacacccgtctgggaaggccccaaggtcagcttatgaaggaccccacttgcaccccaccccagccatggaagagcagctggagggtggatggggaggccagagggagcaatgaggggtggtcccagctctgctattgactcggtatgcctttaggacattctcttaccgctcatgggcctcagtttcctaaagtgtgaaatgtcaggcacttccctctaactggcatgcaacagccccacctgcctgagagccctgaggtgacaataaaacatttatgctcaaggggaa

SEQ ID NO: 7547 - DNA, 535 bp, Homo sapiens
gcgcagtcggcctgcaccgcggggatacacaaacacaccgggttgcgggagggggcatcggactgactttgggaggttccgaatcccattgtaaagctggggaatgccctccagaactcagatggccaaatgggattcatggaccaccctagatgcggtgcatgggggtcctgcttcccagttcctctcatttaatctcatctaaatcagcttttagtcccttctttctggaccaactgatctactagtctgagtgtaagaaaacctggtccctctaggcccccccaggacaacaggatctgagcttcatgagagtgatgggactttcagtcctgtcctccctaattctttcaggattgatggatgatggccataggtgaggaaaaggcttacaagccttatgataccttccttctccaagcttcagaaataaatcttgagtttccccctctataggaatgtttctgaaggcatggactgctttacctgggaagtgcccctgatcatggtcatgatgaagtctctgtggcctgga

SEQ ID NO: 7548 - DNA, 535 bp, Homo sapiens; identical to SEQ ID NO: 7547

SEQ ID NO: 7549 - DNA, 533 bp, Homo sapiens
gtcaggatctcttgtactagaaatgggtcagaggtggggggatagaagttgattggatgaacaggggctgtctaagctcccagtggtcaggggatggccaatgcaggagaaaggtcagggtcaggactgcttggaagtacccgatatagccaaggaattagtccaggagatgtgagcctgggcaaatcagttttacttttcagtttaacctttcatgtccctggctctgagctaggcaccgaagtgggaagaggcaatgcaggagcggtggtaggaggctgcccctacaagatgtgtgcaagatgggaggtgacccaggcctgagtggggctgagggtagactactctgttagggattctggaattgatccttaattgaatccccaagaagtcctccactgctggcaaggtcaccaagtttgcagcaaaagccagcaagaaatgaagcccaccctcctctctgcagtgtcctcagctcctccttcccccccaataactaaacattcaatgaatgtatgtatttcctaaataaa

SEQ ID NO: 7550 - DNA, 533 bp, Homo sapiens; identical to SEQ ID NO: 7549

SEQ ID NO: 7551 - DNA, 3987 bp, Homo sapiens
gtgagacaggccttatatttacagctcccttcccttcctgcaatccagtgttgaggcagaagagggtgcctgtgtcacacatcaatttttctcctgacttttgctcgggtgaaaggcctctgtacaatgcccgatactctcatgcttccatggcagctcctggctcctatctgggacacctcactacccagccccctcatggaatagtccatctcctagcctggccttcatccagttcaccctgcccagccaccctgcctctcaggggtctgtgttgggaaccttggcagttgaacagagtgctctgttcaacagtctgaggcctctgaaacagaattcacacacaaaccttcagccaagttctgcctgctgtgtatctttttagcaggaagcagctcaggacagggaagacaaagtagcctccaggtgccaattactttaaagccactctgggtcaaatggagattcatgagtcacggccttggcccgaacgcccattactatgtgagcctttatttccttcagataaaggataactttttacggttttaaaaggagggcttaattaaaaggccaagaagagggttaaatggctctcttgagacactagcagcctggtccagtcaccctttgtcagcctgacagtgcctcatctgaccgccagggggcatccttattggtgcttcccggctgcagggcactgcggcccctccctcacatgatcactaaaaaccttcaaagacccagtctagccaaaagctcaagtgggacaatggcacagtattaaggtcaaggacaaaaacttacttactttaggaatgaaccctattctatcatcatatacaacagcaccactgagagctggtgaaacagtttaaatcccatcctctgcttgtggcaaatgatgcataaatgcctgctgctcacagtaaaagggcttcttcctcttttactgggtgatccccctgaaggcccagcctatcccaactccacagtcaggaaggcctacgtccttggtccacagacggagctgggccaggtttaaaagactcagtctaggcttgcctttgcaaaccaaaaacgaggacaggtctgaagtgggaagaaagctccgaaatagaaaacggttaggtcctattctatccccagcaaatctaagcaagaaatctctttatacaccacatggcccccccactcccataaaacagccttggtaataaagaagttatcacaccaagacataccttttagatttttattagtagttctctctgaagaatcaaaatagttagttagcaaattattttagattcaagactgtatatcctttgtatttagatctttaatgatgtacaacataatacaaaacaaaccagagagactgatttctatgactaggtgttattcattgtgtcatcctaaagcagtgggctggaggggaagctgttcaaggagaacagaggtggagttagtgctggccaactaaatcatggcctgtctgcttacccattcaatgtgctgggaaggggccaatgatttcttaaactgtttcctagagcaggggctctaaaaccctgggtagcagaggactgtggtccaaaccaagccaaaagaaacaggctggggtagggaagcatggtgactgcctggcagaaaaggcaaactctgggccccatagggaaaagtgcattctttgcacctcagagatattgcagaaccagtgttaacactatgagactttgttaggaggggaaaaaataaaaccctggaagaatctttcacttgaactcaacttgactggagttcagtccaccagtctcaggggaagggggaagcacctagctccacagcagcactgagtctggccctcccgccccatctccccagcccctctcagcaactaggccaggcttcagctgaggacataaacaccccagaaagactagggtagtctctccggagggctgaagtgggaaggacacttctcaaaatgcaaatgcgtttaatacggaaggagccaggacagttctgggggcactcacatgcccgaatcttccccacctccccagctcagggcctaggctcacagagactggcgagcagtctccacacctgaccttctaacccccaaaagaaaatccggaagctgccccttctctttccccacaggtgggctctgcagggcctcccagggatggtggttctgcggcagggcctaggcagggcctggtctcagctggctcctgcccgagccatgaggtcttccaaagcattgtcctggtcattgttgtgtaatagcaaaacttccttaatgtctttcagctcaaagcccatctccttaaatttgctcattaactgaagaaactccatcatctaagggagagaagagaacacagattaaagaaaagggtggggtcacagcacagctgagtgaaggagtgtgtgtgtgggacggggactgggggagagcagaatgtctacatccttcccccagagccccgtgagtctccataaggtcccctagcaagcagaggtgggctgtggtggaagccaaggcaaacgggtttggtgacggccatcaaccttcaggagtcagcccagtcccagctcactgttgctgagctctgtctgggtcccaccacccacatccatcttcccaccaaggaaggatactgaacccagaaatggctgctcttcaaagagcagtctaggcaaaaagtccagcaatctccctccctaatcatctaagaagtttggcttttagcccaggccaatattcccttcccttcactgggattctgaagttttcaacccaatgcttcaaccaccaagccaaacgcaggcctcggcctgtctgaatacttgggagattctgcccttcaaatacttgtacctgtagtcactggcaaagcaaaaaggttgtgtgtgggccaagggagaaaaccaggatggatacttggtccctccttttccagagggttcccaagaaacatgaagattcccaccttttcttctgaacactggtgcatttccagagcctcttccactaaaagagggtcgaagcccttctcacaaagctgtccatgtgcaaagagatagtcgagaatctaagaaaagaaacaaggggtttagcacctactgctgctctttgctgtgctttccaagagacctcaacaaactagtgtgtgaagtccgttctccgccccacccaggccgtcagatactggataggatttgattttgtgccttgactgtgtccaacacaacaggaccccagtgactctttaatgaacacaggcacagccttctaaacaggagcaggcattttccaaaggagttgcagccacagctgacacgcccaccagaatggtcaactccacagcctgggcaggcggctactctaagaaaacagcccaagtcagaaaatgtcaccaaggtctaacactccagtaccctaattcaacactctgggcatagatgacaggatgaaaattcctggaaagagacatttgaccataccccaagcctagctctgccccttttggagaggcagagaaaggagggggtagttggagaacagctccaattctcccaaagctgtctctcagcctgggtcccggaatagcttccaaaagaagtactgctcccaaggctgctggctttccccaaaacatgccccgtgtcctcacaaacccacaggaaaggaggttggtgctacaagtctgaggggctctaggacaggggaggacactactccagctccacaggtctgagcctgccctcctggctgaccaaccgctcacctgctcaatattctctcctttcttcttcatggctctgaggacacactcgtacgagtagcccatgttgaccaccgtctccacacactgccgctcgctgggggacagcatctgcagttcagaataggcctggggacagctgggcatgttgggcacttgtgacactgagaaattaggaggggtgacc

SEQ ID NO: 7552 - DNA, 3987 bp, Homo sapiens; identical to SEQ ID NO: 7551

SEQ ID NO: 7553 - DNA, 538 bp, Homo sapiens
cagtctagccacttggcaggtctaagattgtgtctccctctttagagacgggctttaacctgggctaaagaaaccaacagccacagagcaatgccagctctcacatgacattccccagccaggaaggagtcaggactattcttcaactgcctgcccttctcataatgcctcctaaatgcctggtgggatgcaggcatacacccagaatactgcacattacaaatgttaataaaatcatatctagccaggtgcggtggctcacgcctgtaatcccagcactttgggaggccgaggcaggtggatcatgaggtcaggagtttgagaccagcctggccaacatagtgaaaccccatctctactaaaaatacaaaaatcagccgggtgtggtggcacatgcctgtagtcccagctactcgggaggctgaggtgggaaaatcgcttgaacccgggaggtggaggttgcagtgagtggagaccatgccattgcactccagcctgggtgacagagtgagactgtctgaaaaaaaaaaaaatcgta

SEQ ID NO: 7554 - DNA, 1181 bp, Homo sapiens
atccgagcacaccaggaacagctggatgaaatggctgagctcggcttcaaggaggagacgctgatgagccagctggcttctaatgtaagtagccctggctggacactcacaggctgttgggaattagcctgcagctaatttgatggtcatccttgtttgctgtggctgtgtgtggggaaagggtctcctggcacacactaaccataactgaggcctcacacctcctcttgccacgcctttgagacatcttgagtataggtacaggtgggagatggtgcaacactcgccttttccaggctaaaatgtttccagcctctatcctcagctgctctgccttcctagcggtttgtcggggcccctccctgtgactaacagtgaccagtctgctgcctaccacacgtaggtatttctaccaaatacccttctgccttacaaaatactcctctgcttggaaagtgtctcgaatgcagagcagcaggccccaccctgtgccatagcaactatcctacatgttctcccgctggaagagtggcctgggttctgaaactttcctgccagaggagggactgaaaaagcagatctggcagagcgccagcaagagcaaaagctgtattcgtcccttgtttccttctcaggattttgaagattttgtgacccagctggatgaaatcatggttctgaaatccaagtgtatccagagtctgaggagccagctgcagctctatctcacctgccacgggcccaccgcagcccctgagggaacagtgccgtcttagagccagaccctgtgccgagatggtgggggccctgcaggagtctgtgctgggctctcaggctggaggagcctctgccaggtcctccctgcacacaccagaacccacacgctggtcctgcctatgctagcgtcaccccagccccacgtggcttcagataggtcccagcttctccctcagggacaggcccctgtccctcagttccatgcacaggagtgcctccaagggtgggccaggccgaagaacctaatgcctttcccttgtgcctagagaatatgattaactaaccccttgcctgtgggaatatatttgggtctaataaccctgaagtttctaagtttggggatcagaggatggggtggtcagtggtagcctagaggtcagaggtcacaagacagagaagacaac

SEQ ID NO: 7555 - DNA, 538 bp, Homo sapiens; identical to SEQ ID NO: 7553

SEQ ID NO: 7556 - DNA, 1181 bp, Homo sapiens; identical to SEQ ID NO: 7554

SEQ ID NO: 7557 - DNA, 2150 bp, Homo sapiens
aaatactgttttgttgtgaattgaacagtgaggggctgggacagtgactgggggcatcaccatagtcaatgcttagagcctcaaaaggttgtaatctggctctggggaggagtgaggctgagctgagtctcccacggtctttagaatgtgtcctggcaggaggactgagaacaggctggtcaggactggagtcagctaatggacagacagggaccagagactgttgctgggggaaatgcggctttatgcaagtatctcgggctgggcaggggaatcacccagactgcttacccctcactcctcatgctcagcatgtcaagggcccaagtcttccttttctgtcactctctctgtcattcctgaatagatatcaccctatagatgtctgatgtgaaattgcattggcagtaataggacatgggtctgtcctgggtgcaggatgaaggcaggaaggctgatagaacagatttttatgatcatacatcccactggggtgaatgcaacatcatcccatgttatattggggactaattcagtccagccatttccaggacctttgctgggaggttgaagcctcagggctcagtgccagctggctggggtgagattgggagcagtccattagccatgagttgccgatctgcatctgcacctgctccagctgggctttggcagccgtgattcctgaactgatgcatggctctgcttgcatggaccaagcttgcaacatctttccacaataaaaccgtgatgggagttaatagtgtgaatcgctgttcaattgaacagggtccataaaatgtttatgaggcataaccaagggggctgaatgggtggccagcgcttggcttttggccaggggtaacacctggggtgtccctagccagggcgatatcttaagaatttctgatgttgtgcactcagatcgacttcttttagaactgttccaaggtgtttaggaggtagacttattcacttgggaagtctttctttgttttttgtttttttagagacagaatcttgctctgtcactcagattggagcacagtggtgcaatcatagctcactgcagcctcaaactcctgggctgacatgatcctcccacctcagccttcagattagctgggactacaggtgtggctgattaaaaattttctttttttgtagagacagggtttcactatattgctcagcctggtcttaaacttctgggctcaagtgatctttccatctcggcctcccaaagcactgggattacagatgtgagccaccagcacacccggccatcatttgggaattcttgctggtggttattaaatctgctaatgtccttagtttcttctactaacattcagagcattctagtttctgggagagtaagtagaaaccaccggatatacaattgcattagtcaggattactgttactagttgctgcaactaaatagccttaaatcaccactggtttacacaacacaggcttattccttgctcatgctgcatctccagtgagagccaacaggagtgtctctctgctccatatagtcactcagggccccaggctagaggagacattacagaagacatgttgtctttgagatctctatggaaggaagagaggaatggatgaggcatgctggccttaactgccttgacctggaggtaacacatgtcatttttgtcacagtctctgagagaggagaaagaaaccggacaggcaggcagttagagtgggtcctcagttgaattctttcaaacaaaagaacagcctgaaaaatcaagctgcaggcacaaataagggaacttgcacaggggggcttgcctgagacatgcgcacagctccacagataaaaaagcctacacaggtgacttgcctagacatgcccacaatggaaaagtacatctcctgacaaatgtgcagtaaggggaacaaagcaatatagagaactcaagctaaggggctgcatgtgcattaggagaatggggtggggagctaccagaagtttgtgcctttatgcaaatgagatacccagccctcatcagtttcttataaaagcctttgcattcaactgtaaaaacagcaacccatttgggctccctctctgctgcagagagctttctttcacttattaaactttcactcctacctca

SEQ ID NO: 7558 - DNA, 369 bp, Homo sapiens
gggattgttgtgaggattcaatgggacagtgtatgcaaaccacctaatacaaggcacatagtaggagcttattatggtgatggggtggcattggccacagggccttgggctcagcctgtccctctgtccctctgatctggatgggtgggtatccagggaagtacccctacttgataggcctcaagccctccctccttgtgtccagatcctttcagcacctgcctccacgtcctgcccctctgccctctctccctggcatgatcctggccttccagtcacatcccaaaatcactttgcctggtttcctttgggaagcaaagcctgtctggggccctccatagacagagaagctgtgaaggagataaatgc

SEQ ID NO: 7559 - DNA, 587 bp, Homo sapiens
gtttgagtccaggagagagaatcatgaatttttattgggtatgtctagaatatttctctgagaaggtatatcagttatctatttctgtataacaaactcacaaactataattgcttacaactacagtgatttattgtttcttatgattatgattccatgaaccggcaatctgggcagttctgctggtctcagccatgaggccatagtcatctgatggctcaactgaggctggagggtctacagtggcctcactcatttgtttggccttggtgcttactcttaaactcttaactggggtctcagttcttctccatgtcaccttgtatctgccaataggttagattgggcttcttcacagcctcttggtcttagggttccaagcaggacaggataaaaactgcaagacctcttagggcctaggctccagaactcatacaatgtcaagtgtgccacgtcacgttcttcaaggcaaattacaaggcaaagtctggattgaagaggatggagaaaccaactccacctcctggtgtaggagtggcaacatcatgttgacattgggagacacgattcattggagggcattacca

SEQ ID NO: 7560 - DNA, 587 bp, Homo sapiens
gtttgagtccaggagagagaatcatgaatttttattgggtatgtctagaatatttctctgagaaggtatatcagttatctatttctgtataacaaacccacaaactataattgcttacaactacagtgatttattgtttcttatgattatgattccatgaaccggcaatctgggcagttctgctggtctcagccatgaggccatagtcatctgatggctcaactgaggctggagggtctacagtggcctcactcatttgtttggccttggtgcttactcttaaactcttaactggggtctcagttcttctccatgtcaccttgtatctgccaataggttagattgggcttcttcacagcctcttggtcttagggttccaagcaggacaggataaaaactgcaagacctcttagggcctaggctccagaactcatacaatgtcaagtgtgccacgtcacgttcttcaaggcaaattacaaggcaaagtctggattgaagaggatggagaaaccaactccacctcctggtgtaggagtggcaacatcatgttgacattgggagacacgattcattggagggcattacca

SEQ ID NO: 7561 - DNA, 276 bp, Homo sapiens
ctctaatcccagcactttgggaggctgaggtaggcagatcacaaggtcaggaaatcaagaccatcctggctaacacggtgaaaccccgtctctactaaaaatacaaaaaaattagctgggtgtggtggcgggcacctgtagtcccagctactcgggaggctgaggcaggagaatggcatgaacccaggaggcagagcttgcagtgagccaagatcacgccactgcactccagcctgggtgacagagtgagactctgtctcaaacaaacaaacaaaa

SEQ ID NO: 7562 - DNA, 427 bp, Homo sapiens
agtagaaggtatgattgacacaacctgctgacttgaaatagagcagagggtaactcatccaaaatggatacaccttaatatcatggattgaatacattcatttaactttttctcttctgaaaccccacaaaaattatagtaaaagatttttattttaaaagcatgatctaaaagttggaggcctctattacagtgatctaccatgggaaataaacatccttaaaaatcttgaaaagatagtccagtacaaagggcagtcagtgcctcactctcaagatgtgcagatgtgtgaaagactcatggagaatagtcttccaacacaggagacaatagccacaaaactcaagaatctgaaaaacaaatggatgagtggtaactgacaatagccctgaaacaatctaaccatcacttgtcagtggacaaagct

SEQ ID NO: 7563 - DNA, 427 bp, Homo sapiens
agtagaaggtatgattgacacaacctgctgacttgaaatagagcagagggtaactcatccaaaatggatacaccttaatatcatggattgaatacattcatttaactttttctcttctgaaaccccacaaaaattatagtaaaagatttttattttaaaagcatgatctaaaagttggaggcctctattacagtgatctaccatgggaaataaacatccttaaaaatcttgaaaagatagtccagtacaaagggcagtcagtgcctcactctcaagatgtgcagatgtgtgaaagactcatggagaatagtcttccaacacaggagacaatagccacaaaactcaagaatctgaaaaacaaatggatgagtggtaactgacaatagccctgaaacaatctaaccatcacttgtcagtggacaaggct

SEQ ID NO: 7564 - DNA, 273 bp, Homo sapiens
taatcccagcactttgggaggctgaggtaggcagatcacaaggtcaggaaatcaagaccatcctggctaacacggtgaaaccccgtctctactaaaaatacaaaaaaattagctgggtgtggtggcgggcacctgtagtcccagctactcgggaggctgaggcaggagaatggcatgaacccaggaggcagagcttgcagtgagccaagatcacgccactgcactccagcctgggtgacagagtgagactctgtctcaaacaaacaaacaaaa

SEQ ID NO: 7565 - DNA, 466 bp, Homo sapiens
ccaagtgaaggatcctgctgagtactcaggggctggtgttgctgtcagggatgttagcctagagcctcagcttcctgtaaaatgaggatgatgatgtccaacagcttatgggaccttggtaggatccaatgagatggttcatgtttagggcttggcatggggtctggcatacagtaagatcaatacatcttgttcttttttctcttctcagcagaagtcccagcatttttcatctttcaatctcacctccttttcctgataatagagaggcaacaagaactcagggcatgcaatggggctcaacttctactctctgccacaatttcatcatgattcccccaaagagcagagccccaggagccagcagggggcagggtgggcatttctggactggattcattcataataagatcaaaatttccaatccgtatgtctcgggtgccatctgctgatagatccgaccaga

SEQ ID NO: 7566 - DNA, 474 bp, Homo sapiens
gggcacccaagtgaaggatcctgctgagtactcaggggctggtgttgctgtcagggatgttagccaagagcctcagcttcctgtaaaatgaggatgatgatgtccaacagcttatgggaccttggtaggatccaatgagatggttcatgtttagggcttggcatggggtctggcacacagtaagatcaatacatcttgttcttttttctcttctcagcagaagtcccagcacttttcatctttcaatctcacctccttttcctgataatagagaggcaacaagaactcagggcatgcaatggggctcaacttctactctctgccacaattttatcatgattcccccaaagagcagagccccaggagccagcagggggcagggtgggcatttctggactggattcattcataataagatcaaaatttccaatccgtatgtctcgggtgccatctgctgatagatccgaccagatg

SEQ ID NO: 7567 - DNA, 474 bp, Homo sapiens
gggcacccaagtgaaggatcctgctgtgtactcaggggctggtgttgctgtcagggatgttagcctagagcctcagcttcctgtaaaatgaggatgatgatatccaacagcttatgggaccttggtaggatccaatgagatggttcatgtttagggcttggcatggggtctggcatacagtaagatcaatacatcttgttcttttttctcttctcagcagaagtcccagcatttttcatctttcaatctcacctccttttcctgataatagagaggcaacaagaactcagggcatgcaatggggctcaacttctactctctgccacaatttcatcatgattcccccaaagagcagagccccaggagccagcagggggcagggtgggcatttctggactggattcattcataataagatcaaaatttccaatccgtatgtctcgggtgccatctgctgatagatcggaccagatg

SEQ ID NO: 7568 - DNA, 474 bp, Homo sapiens
gggcatccaagtgaaggatcctgctgagtactcaggggctggtgttgctgtcagggatgttagccaagagcctcagcttcctgtaaaatgaggatgatgatgtccaacagcttatgggacctaggtaggatccaatgagatggttcatgtttagggcttggcatggggtctggcatacagtaagatcaatacatcttgttcttttttctcttctcagcagaagtcccagcatttttcatctttcaatctcacctccttttcctgataatagagaggcaacaagaactcagggcatgcaatggggctcaacttctactctctgccacaatttcatcacgattcccccaaagagcagagccccaggagccagcagggggcagggtgggcatttctggactggattcattcataataagatcaaaatttccaatccgtatgtctcgggtgccatctgctgatagatccgaccagatg

SEQ ID NO: 7569 - DNA, 474 bp, Homo sapiens; identical to SEQ ID NO: 7567

SEQ ID NO: 7570 - DNA, 7099 bp, Homo sapiens
cagaaatggagatgccattgaatttgcccagttgatggtgaaagctgcctctgctggtaagtgatgctgataaagatattaagcactttggggttttttgtttgtttgtttgggttttttgttgttgttgttgctgttgttgttgttttgttgtttttgagacagggatttttgtatttttgtaagtcggggtttcaccatgttgcccaggctggtctcgaactcctgaactcaaatgatcctcttgcctcagcctcccgaagtgctggggttacaggtatgagccaccatgcccagcccactttggggttttaaggcttgtggaattaaagcaggacttctactcagccaagatttgctggcctttgtggccaggcagttggtattcgcacacatattcagcaggcatttcctgggcctacctacaattgtcaagtaccatgttacagggtaggaacacaaagattattcagtcccttcctatcctgaaggagcttgcaatctagtgggagcttacagccagacacccaggtgactaattatacctgatagtcttttgtccatttaaacactgacctcagatatctactgagcgtctcttccttgggtcagggagcccttagttattctttctttggtgtggctttttagtttttcttctctctggacttgcctttgcttttctcaggtttagtccccatcttacatgagaggggagtagaggtactgtcaagacttatagcactgatctaatggatgtaccacagaactctttcaaactgtgactacaaataatttttttatctcatatatgtgtgtgtgtgtgtgtatatatatatatatatatatatatatatatatatatatatttttttttttttttttttttttttttttgagacagtgtcttgctttgtcacccaggctggagtgcaatcatgcaatcttggctcactgcaacctccacctcccgggttcaagtgattctcctccctcagcctcccaagtagctgggattacaagtgtccaccaccaagcccagctaatttttgtatttttagtagagacggggtttcaccatgttggtcaggctggtctcgaactcctgacctcaggagatccacctgcctcagcctcccaaagtgctgggatcacaggcgtgagccagcacgcctggccggtccttgcgatctttaacccatggcttccatggcctctttgtacagccagcagagaaggaaataaagatctcccctgggaaatttttatgggccaggcctggaaactgtctacattacatctggtcacatgccataggcaaaactcagtgtggtaggctgataatggatccccagatatatccccatcccaatcctcagaatctgtgactgttacgttatttgtaaaaagggtgtttgtagacgtaattaatttaaggatcttgagatgacaagattaccctagattatttaggtggcctctaaatgccatcacaagtgttcttataagagagatgcagaggggagacaagacaaaagtgttttcttcggtaccacacttcctcacattggtctttaatggatatatcttaccaacttggtagaatcctcacttagaagttttttctgaatatctgttatgattaggtgctatgctaggcctggaataagcacaggcaaatgagatacaatctctgcccttaagacacgtgccattcaggacaagggtcatatttcttttctttctttcttttttttttttttttttgagacaaggtcttactctgtcacccaggctggaggctccagtgcagtggcacagataaggctcactgcagcctcaaatttccaggctcaagcaatcctcctgcctcagcttcctgagtagctaggaccacaggcatgcaccaccatgcctggctaatttttaaaaaattttttgtagagatagggtcttgccatgttgcccaggctggtcttgaactcctggggtcaagcaatcctcccatcttggcctcctaaaatgttgggattacaggtgtgagccacttcacccagcccatgtttcttttttatcttgtgtctcaagagcattgttggaaacacatgtaaggtggtgattaaatactctgttaattgtttagttgatatctgctatatatctgacttaattaaaagagttcctattttgccaaatttgtctttccagctgcccgaggatttccacttagaaccttaaatgactggttcagctctatgggaatttatgtaattactggggaagggaatatgtgcactccacagatgccttgttcaggtaaggtatggcagagaggttcttcctggaaggtggaaaattatgccagaggctcaaagatctatcccttgcaggcttgctccctgcaggagcagcagcagagctttaggggcttggaaaatggtcacatctgtgactttgtttccagactgaaacccagtggcaaagtcagcaagtgactgggctttggtttcaggcttacttttaatgatatatacaaacctggaacatacttggcaatcctgttagtgggaagggtcacttcctgtttatagcctgagcagaaaatatatgctcttgcccacttccttgtttccatttcacatagcatagtcatcatacctgtgccacacccttcaaccttactgaggactcgagccctgggtcctttaacagtttgtgttgttaaagtccactgctactgaatggggtttctggaaagtaattctcaaacatggtccactgcctactggtgggccaccaagggtctcctaatgctgccaacacacacaaaaatatgggacttttcttgagttctccttggaacttgatatgcatgtccatgggcctttagttttgtatgtaacttaaaggctacttatttgtaaccttaataggtaccttggtttttaaaggttattacagtctaatattcagaatctaaagtaattgttgctagggtttaacattttttcagttggtgaaattcacataacatataattaacattttaatgtgtacaattcagtggtatttagtgtaaaatttagcagtatttgacgtattcacaatattatacatccaccagctgtctctagtttcaaaaagtggtgttttttttttttggagacagagtctcactttgtcacccaggctgtagtgcagtggcactatcatggccccctgcagcctcgaccccctgggctcaagcgatcctcttacctcagtaccccccaaccagagtaggctaggaccacaggcgcaatccaccatgcccggctaatttttatgtgtttttgtagagacagaaatctccctatgttgtccaggctggttctgaactcctggcctccagccatctgcccgccttgccctcccgaggtgctgggattataggcatgagccatctctggcagccttttttgtttttgtttttgtttttttgagagggagtcttgctctgtcgcccaggctggagtgcagtggcgcgatgcaagctccacctcccgggttcacgccattctcctgcctcagcctcctgagtagctgggactaccggcgcccgccaccacgcccggctaattttttttttgtatttttagtagagacgggatttcactgtgttagccaggatggtctcgatctcctgaccttgtgatccgcccgcctcagcctcccaaagtgctgggattacaggcttgagccaccacacccagcccctgccagcctttttttttaaaaaaattttgtagatacagggtctcactgtgttgcttaggctggtctcacactcctgggctcaagcaagtctattgccttggcttcccaaagtgctgggattacaggtgtaagccacagcatctggtctggtttcaaaactttttatcacctaatagccactaagaagttattccccattgtcccctctctgatcccctggtatcctctaatctgctttctgtctttattgattcacctattgtgaatatatcacataaaagaaatcatacaatatgtgaccttttgtgtttggcttatctcactcaagataacgtttttgaggttcctccaagttgtagcatgtagcaatacttcatttcttttcctggctgaataatactccattgtacatatataccacaatttgtgtattcattcctccattgatggacatttgtcttgtttccaccttttggctattacgaatactagctgctatgagcatttgtatataattttctacgtagacatatgttttcatttctcctggatatgcatcttggagtggaatttctgggtcatatgtaaattctctaactttttgaggaaccaccaactattttccagtgctgcactattttacattcctgtgtaaatgtaagtgttcctatttctacacatcctcagcaacacttatcttcctttttttaaaaaaaaaaatctatattaaagccattctagtgggtatgaagtggtatctcattgtggttttaatttgcatttccttaatgactaatgatgttgaacatcttttaatgtgctttttatataccttaattggagaactgtccaagtcttttgcctattttttttattatttaaatcggattgcttgtctttttgttgttgagttgtaagcattctttatatagtctggatatgaaatccttgtcagatatattatttgtaaatatttttaggttttctttcacattcttgataatgactttttttttttttttttgagacaaagtctccctctgtcacccaggctggagtgcagtggcgccatcttggctcactgcaatctctgcctcccgggtttaagtgattcttgtgcctcagcctcctgaatagctgggactgcgggtgtgtgccaccctgcacagctaatctttgtatttttagtagagatgtagtttcaccatgttgttcagactcatctagaactcctgagctcaaatgatctgcctgcctcggccagtgggttacaggtgtgaacaactgtgcccaggcaaaaatggcttttaatgcacaaaggtttttaatttttatcagatttctcttttttcctcttgttgctcatgcttttgatgtaaaatgtgagaattcgttgccaaatccaatgtcatgaagatttatccctgttttcttctaagcattttatagttttagctcttatatcaagcttgtccaacccatggcccaggatggctttgaatgcagcccaacacaaattcataaactttcttcaaatgttatgagatttttaaaaatagctcatcagctatcgttagtgttagtatattttatatgtggcccaagacaattcttcaccaatgtggcccagggaagccaaaagattggccacctctgttttatattaaggccattgattcactacaagttaatttttatctgtagagtgaagtgagggaagaacctcattcttttacgtgcagatatccagttgtcccagaatcattttttgaagagactgtttttttcccattgaatggtcttggcattctgtcaaaaatcaactgttcatagatgcttgggtttatttctggactcttaattcattccattggtctctaagtctgtccttgtgccagtaaaacactgtcttgattacagtagttttgtaataaattttggattaaagcaaaataactttacagctgtccattcactttatccagttaaatcactttggggaatgtaacccaaggtaataagtaaaactcatgtttattgtaaggttaattggaaagtcagaaacaacaaaaagagtcatctatccatatgatgaaatattatccagctttgaatttatgaagtaaattaacaatatgaagacatttcttataatattaagtaaaagagccagatttaaaaaatcatatggctggccgggcgcagtggctcacgcctgtaatcccagcactttgggaggccgaggcgggtggatcatgaggtcaggagatcgagaccatcctggctaacatggtgaaaccctgtctctactaaaaatacaaaaaaattagctgggcatggtggcgggtgcttgtagtcccagctactcgggaggctgaggtgggagaatggcatgaacccaggaggcagagcttgcagtgagccaagatcgcgccactgcactccagcctgggcaacagagcgagaccccctctcaaaataataataataataataataataataataataataataataatatggctgatatgatcatgattatataaagaatattcacagagattctacaaagaaatacaccaaaatagtaagtgttcaatggtagaattatagatggcttttttccattcctcttttctctattttccaaacgcatattcctcattaagcatgtattactttttttcataatcaaactttattaagtaaaacacatatctgtgcaagagtataagtaacgcaccgatctattgatagggttgttttcatgttgatttgaatccctgcacaacaggaagtgatatgccttcaattggtgatagctagaggaaatagctttagcattattctgcctgacttctcttcttgcgtcagtttgcttcagcattattttttaagttcttccttctcacatattccttgacttaaaggtaactgaatttttttccttccattataattcccagttattgtctatggagccccacctgcaggatatggagccccacctcccggatacggagccccacctgcaggatatggagcccaacccgtaggaaatgaaggcccgcctgtgggatacagagcctcacctgtgcgatatggagccccacctcttggatacggagccccacctgcaggatatggagccccacctctaggatatggagccccacctcttggatatggaaccccacctctcggatatggagccccacctctcggatatggagccccacctgcaggaaatgaaggcccgcctgcgggatacagagcctcacctgctggatcaggagccaggcctcaggaatctacagcagcccaggctcctgaaaacgag

SEQ ID NO: 7571 - DNA, 291 bp, Homo sapiens
cttgcgtaggtgattttcataacttcatgctccatcagtgatcccatgttgtcttttatgatgccatttgatctgatgacgaacctcactgttgaacaaccagtatttgctgcaaacttcattaagggaactattcaggcagctccatatggtaagtgttccctcagaagtgtgtatttttttttccctcaaaatcttctaaaaggtttaagattcaaacttggctcatgttgaaattcaaacaaaagctgccctactttgtcaggtagtgcttcccttggtgtttgtggc

SEQ ID NO: 7572 - DNA, 5769 bp, Homo sapiens
ttctcaggtccattcttaaccttctaagatgtaaaccttgaagactcaccaagcaaagaggtaccctaaaattgaagtcaggataaggaggacgactcaggtatgtgatcacaggcttctcgcaggtagttgttccaccctttggaagggcaatcttatgggggaaggtgaaactttacttctgtgcctagattttagaagcagaatcaactcttaaatagctggctaaaggaagaataccattgtggggctaattccccagtaatttggttgacattgggttgcatttttaaacataactttttccacactcgcattcaaggttcctgtcttcccatcctcattcaagaaacatttattatgctccgtttgctaggcactaagatgcgtgctaaaaacgtcatgttgaacacttagttgtttgagaaagctaaattttcaatagtaagagtgttataaattacggtggatccacaaaatggagtattatacacctgttgaaaactatgtctagaggtagagaaagccttctttgaggagaccaaaaccaacaaataaaagcatgataaattgactatatcaaaatttaaaacttctctatgacagaagttaaaagataggcaacagaataggaaaaagtgattttcaacatatatattaatttatagtcagaatacgtgaataactacaaatcaattctccccaaaatgacagaaatatgaattgccgaataaccaaggcaatagcatggccagaaaacgtttgaaaagatgttcagcttgactagtgttagggaaatgcaacctgagatgagaaaacatttttatctccaaagatttacaaatattaaaactcttgatatggcactttcacattttaaaatatgcctgcgagaaaacttgcatgtgtgcacaaagatgcatgtgggaagatttcattatattcattgtttctaacagcacaaaattagaaataacctatatgtccattaataggaaatatatgaataggctatggtatgcccatactacgtatgcagaaatttctaagacttgttgataaggagaaaagcaagttgtagggagcatatactatagtgattttcagcctcatcagactgaatgccccattttataacaaatatttatattttataacaaacgtttatatttgtatatttataacaaatattttgtaatgtctccttcacttcaatgaagtttgtagataattgcatatgattccacaccatttcaaccaaaattaataggccataaatgtgatagaggaaataaaaggagtttgtagtaaaattttaagtgttttaatatataaatgctcagattctaccacactagaagacatactgaagtaatcaagggttcactcccatatacatagtcagcataggtataaagattagaagtgctaactgatatgaatatgttgctttggtgacttgaataccattgctattggcaatattgttctccaaaatggtgaacaacctttgaaaattttccaaataaaacaaagtttagtcttcccttgatttacacagtggttgaattcctgaaaatttctgtatatattaaagtcatataaaacagagttaggctgtaggctcaaatgattataaacatgcttcacctacatcactggctggagagccatttgaaagtcaggagacataggacaattaaggtactgccctgtacgtttcaggatgtcttgcatcttcgactcctcacccattaagtgccaataatggcctccaattgggataaccaaaaatgctcccacttatttcctaattgctccctggggggcagtaccatccctgctgaggaccactattctagactgtttcaaggctttcagccccttcagagctcaccattctcccactctggcaaggcaggcaaagttcttaatttcattggcctttccttatcttattgtaggctcatcaagccacctaaaagggaggccttaaaaatacattagtagccaggtgtggtggcacatgcctgtaatcccagcactttgcactttgataggataaggtgggagaatcacttgaggccagttcaagaccagcttgggcaatatagcgagaccctgtgtctaggaaaaaaaaaaaaaaaaaaaaaaagccaggtgttgtggtgtgcacttgacccagaagacatttaaatcaatatattttctatgcatttttttttttgagacagagtcttgctttatcacccaggctggagtgcagtggcacaatcttggctcactgcaacctccacctcccaggttcaggcaattctcgtgcctcaacctcctgagtagctgggattacaggcaggtaaaaccatgcccagctaattttttttatttttatagagatggggtctggccatgttggccatgctggtcttgaactcctggcctcaagcaatcctcctgtctcagcctcctgaagtgctgggattacaggcatgagccactgcgcctggccttctatgcatatttcttatatgtagttgaaatcatgctatataatgtttcaccagatattttacattttcataggttttgaagaaatgcttgtaaatattgttagtgaccacataatattctgtgacacagttacaccataacgtattttctcagtccctcttttaaggtatttgaattgtttccaggtttttgttattacaacttcatgattaacttctttgtatatggagctttttaaaagttttaaatgctttccttaacacagcttagagtcattgattgatctgcattgtgaaaattaggaaaccagatgctcccatgttctcaaggacagcctttcttaaggaagtcaggtagatattaatgggttttatgtgaaatggagtaactgggttaaatataattgaaaaagacaagaaaactggtttctttactacttcttagagccttgactatactaatggacataatctccaagaaggagagattttcaaaatttacagttttttcaaaattatttgattttagaatattcagtaaacattttgttcagtggaagaaactgagaaacactttctggaattatgggatattagaattagaatggacttcaggtatctggagtatgctagaccttaaagctctttccaaaaatgaagacaagtcaaaagaccattcttccttccattccaaataaaagagctttatatccaatttacagaaagcagggtgggacatcttgaagataaaatatatagaaagtagctgctgcttcctctcagaaattactgggatagagttatgggtctaggaagctggaatgtcaaaacacagggacagccactttgcccaggcaactggcatgaagggaagaagtgaaaagggaaagtgtggctgtaaacctctctaaagtttccaaacagggaatccaggcaatattggatcttaaacatgggtcataggatctggcgcttttatccctaaaatttttggaggaaaataacgagatattttaagtttcttcttttcttacttccaaactacagtacgtgggcaacagtgatgagaggaagagaggagagactcaaccaactagagcagggataaggtttcccttgttcagcttttcagtgtctgctggaatgtgatggtaagttgagaacagggtgaatgggtgaggccttttttatatcagaaagttttccgagtaactgatctctggcaaatatttggggattagaattctaaaagaatacaaactagacttctcttctgctcttcatgttagttatacttgtaccaggtagatttgaggtggggtccagttacctgaaaagcgtagcaggttcgagtttcttaaaggtggaattccaccatgttctcctgtgcaaagggtacctgtttacctggtccaccaaactgccccagtacaaccaaaggctgtgactgtgtaaggatagaaccaagtggagccacagtttggacccacgtggtgctgcgtggcacacctactgttagttagctcccactgtctggtacagttgtttcccccaaaggctcagtccaatttgttctataagaagagctttgtgtcctgtatattcaaaggaccctggtttttgctttgctgaggacaaatccagtcagaattcagctgagccttctgcatgctgagagcactcatgtgctgagttcctcagctcctcactgacgttttgagtactttctttctgactcactcactgtgctggtggattccgctcttcctgtctcttccccagctgcaatacagaaactatactctgttgtctactctttcatttcctattagaaatataaagggatagaaataagaagaccttttagtcctggactatctggtattggcccctaaaatgagcctccaaatactccttttcatgggtaagtggatgctccccagcctgctggagcagaaccttcctggctcagctaccctgagatatcaggacaaaaacatatagttggtgtgattttcctctttttgtttttttttttttcaagatagaatctggctctgtcccccaggctggagtgcagtggcgcgatctcggctcactgcaacctttgccccacaggtttaagcgattctcctgcttcagcctcctgaatagcttggatgacaggtgcctgccaccatgctcggctaatttttgtgtttttagtggagacagggtttcaccatgttggccaggctggtttcgaactcctgacctcaagtgatccacccgcctcggcctcccaaagtgctgggattacaggcatcggcctgtgcctggccgatttttcaatccatagattaatatgttcaagaaatattgcatgtctttgttttctgtaaatttatttctgttaccaagatccccaccaccatctgctttgttggtgggcttctcacaaatcctaagattatgcaaaggtatccagattttatttggcaccaagatgctgagaagtttcttctggtcatcagactgcttctgaaacagccactatccagtcctggcagtcccgtcaagtctaaaagcttgttgccttgggaccccagaatcttaggtagggcttagaaccagggtgtcagagatccaactctgtgtaccatattgctccttagaactggggagtaggaccccaaaggcctccttatccttgagagtctgacaattccttaaacttccagattctgccctctcagctgtgctgttggtctgcatcacctctatctcttaagcatctatcctaatccaaatctcaggatttgggtttacccaaaaggtaatagaaagcctttgccttcatgttgacttggctttccttgcctagcacttggttgcttgcttgaaaatcatgtatgtatatatataaaatgtagaagcccaattcaaattaataatgtaaaaatttattctgttacacagattacctcattgtcaggtaggaagtgaaacgtatgatattcttcctggcctttgccttgagagtcttctggagcctgaagagggtggggcagacaaccatggactgctagagaataaactttctttgaagcttcctaaatggattagaaagaaggggttctgtcaaagggaaagggtctatacagatgtgaccagcagtttgattagtttagatgtatgatttagtagccaatataagaaacttgtaatttttagtaattagaatttattataaataataaaacagggtattaattattaa

SEQ ID NO: 7573 - DNA, 1161 bp, Homo sapiens
gtatctaggctcacctcactgcggttggtggaggtgatggaggttgcagcttggccagcatggtagaaaggtggcagggtaggtgagctatccagggatgcgctaccctgggtaggagcactatcaaggtcacattgccggtggggtatcgggggcatgggttggcggagttggtgggggctatactgcctggtggtgggggtggttgtgtgtactaagggggctgaccgccagctagggggagggttaggggtgctatcagctcctgcactgtcatggcaggggggcaggttgggggcactatctgggctgtcactacccccagcaagggctggttgggggcactatccctggctgcactgctgggggcagtggggcagtttgggggcactatcaggtttacatgccctgtggcatgccggtgggggggcactattgggggttgcactgcactgctgcttctggcaacgggctacgggggtggctgcgatagctgtggcctccaaggaaggggccgtcctcctcttcccagactctagattctagagggcaacctctgtttgctcatgctggagcgtggcaggtgcacaatgtttccttgggaatcctcagcagggtaaggcccccacacccgccatggttcccgggcctgccccttctcactgtgttgcagagacaatctgggacccctgggcacggagtattgggcaccacgggggaacagggtcctgtgggtggaggcatcagaaacaggaactggcacttggttggagagagctagctgggtctgagtttctgcttctcctgctcaccaaggagtgcagccagcgtgggcccagcagttcctggccagctggacctcgccaggggccggtttcagcaaaggcagtcacacccaccccaggtcccagttgtgcctttgatgaaaccagcccctgccacccagtggccagcatgacaaggtgagcctctaacactaccactccctgcatcctgttctaggcacgtctggcttttaccacccagttgcttcgagccaggagatggaggagtcatctgttgcacgctggaggctggagcctgcagatggcatggttctgtggctcacctcgctgcagttggtggcagagacagagactgcagcttgaccagagtggtgga

SEQ ID NO: 7574 - DNA, 1162 bp, Homo sapiens
atctaggctcgcctcactgcggttggtggaggtgacggaggttgcagcttggccagcatggtagaaaggtggcagggtaggtgagctatccagggatgcactaccctggataggagcactatcaaggtcacattgccggtaagggtatcaggggcatgggttggcagagttggtgggggctatactgcctggtggtgagggtggttgtgtgtgctacagggggctgaccgccagctggggggagggttaggggtgctatcagctcctgcactgtcatgacagggggggcaggttgggggcactatctgggctgtcactacccccagcaagggctggttgggggcactatccctggctgcactgctggaggcagtggggcagtttgggggcactatcaggtttacatgccctgtggcatgccagtgggggggcactattggggtttgcactgcactgctgcttctggcaatgggctacggaggtggcagcgatagctgtggcctccaaggaaggggccgtcctcctcttcccagactctagattctagagggcaacctctgtttgctcgtgctggagcgtggcaggtgcacaatgtttccttgggaatcctgagcacggtaaggcccccacacccgccatggttcccgggcctgcaccctctcactgtgttgcagagacaatctgggactcctgggcacggagtagcgggcatcacgggggaacagggccctgtgggtggaggcatcagaaacaggaactggcacttggttggagagagctggctgggtctgagtttctgcttctcctgctcaccaaggagtgcagccagggtgggcccagcagttcctggccagctggacctagccagaggccagtttcagcaaaggcagtcacacccaccccaggtcccagttgtgcctttgccgaaaccagcccctgccacccagtgaccagcatgacaaggtgagcctctaacactaccactccttccatcctgttctaggcacatctggcttttaccacccagatgcttcgagccaggagctggaggagtcatctgttgcacgctggaggctggagcctgcagatggcatggttctgtggctcccctcgctgcagttggtggcagagacagagactgcagcttgaccggagtggtgga

SEQ ID NO: 7575 - DNA, 1161 bp, Homo sapiens; identical to SEQ ID NO: 7573

SEQ ID NO: 7576 - DNA, 658 bp, Homo sapiens
cgcactggtatttcacagaaagctgggtgtggccctgctgactgaggactgcgggcctgtcagtccagcctgtgagcttgctggcagtctcttccagctccctaaagatcactccacctcttcgttttactctgtgttgggattgaaagatactcgttcttagaggaagtaataagcctatttgctttttttcccccaagctatgaggaagctggttgtgctctatttttttcttttattgttatccttaccggttcaacttatttaatgaaacaaagactgaaaaaactaggacttaggacatcagtccaggcttgcctgttctctggagagttgccggtgcctttataaagtttggtagagccactggctgtcttggtgaaatgccctgacctgtgaccttgcctgttcgtgatagctgacattgagattaatttgtgttcagtgtgtaagcactgccttcgttgtgtgctatttaaggtttccaattttgtaaattactcattctaaacacatatctcattttcatcatttccataaatgaaaactgtagctatgtcatttaaaagatctgtgcttttaactatgttcttgttttgtaaatgttatagatcacatggagacttcaccttctgtgaatttagtgttcttcattttt

SEQ ID NO: 7577 - DNA, 346 bp, Homo sapiens
gagcggctcttttccacgtcgtaggaaacccgtggctgcagatggaagacactgcgtgagaagggggctgaagctgtgctgagagctgcagatgacgcttctgccactgccactgccactgtgacagtggattcagtaagagtgactctccctggtgcagtgtcggctctcttctcaggctttgatccttaccctgtgagggagtttcagtcctcatttttcaaatggggaatgggagaagttgagcagcctgccagaggcttatggtacctgcacttggaactggactccaagcaggtctgttagacccaaagcctgtgctcctagccacaggggctcaccaaac

SEQ ID NO: 7578 - DNA, 420 bp, Homo sapiens
aagtggatagtagatggcttaactttagttgaacttgagtgaatgtatagtgagttggtgaaatgattgccttaacggaaatgctggtgctgatggatctttgtagacagagagtgagggcgtagtatattctgttgccgttagtttataaggtaccattgatgagaccaagttcaggtcgtcttcctgatttcttcgaatttgagagcctgagtattggtgaggcttggctgccagtattcatttgggatatttgccaaggaggattagataactttctgcatttgcatcgcatattacctctacctggaattgatatggcctgaacactgtttttgaatattttttgcttcatttgagtccttacgagcttgcagtccactccaggtggaccatatcttttaccatcatggccttttt

SEQ ID NO: 7579 - DNA, 649 bp, Homo sapiens
taaacctttaccagcacacctccaaatccagcattcctgtctggatctttatgttctacccagcaaccgagaatagatgtgctgcattttgataagaaacaaaaattttagttagtaaaaatcaaaaataaaccaaaatagaaattgtgtctcttcatgagtaacaacacctaaaatagcaatttttctcaatatttaccatttcctgttgtgtagcagatactggttcctttgattctttaagttgttatttggagtattcagctactttagggatgatttttaacattacatgagccaggcaagtaaatgtctaaaacattacttttaaatgtttaaacttttaaatgtttttaattatttaaaattaaagcccaagtataaaataaggagaaaacagaagaagctacagaaactactgcttgagtagcaactgatctgatgcagtgtctcggtctccctctagttctatttctggctaggaagggtattgaaaggtcaatgtaaacaaatgctgaagtcgtcaagcttctcagctggcctcatgtctccctgtatttaatcttcccaactgaacttctgactcatcatcttaacaatgacctgtttccctttgagagttcctccccttctctggccgcttttcttt

SEQ ID NO: 7580 - DNA, 105 bp, Homo sapiens
tttttttgtatttttagtagagacggggtttcaccatgttggccaggctggtctcgaactcctgacctcatgatccgcctgcctcagcctcccaaagtgctggga

SEQ ID NO: 7581 - DNA, 729 bp, Homo sapiens
ggtgcgatctcagctcactgcaatgcaacctctgcctcctgggttcaagcaattctgcctcagcctcctagatagttgggattacaggcatgcaccaccacacccagctaattttgtattattagtaaatatagggtttcaccaggttgatcaggctggtctcaaactcttgacctcaggtgatccacccgccttggcctcccaaagtgctgggattacaggcgtgagccaccacacctggcctctatattctactttaaggttcaggagctaggactcaacaaactgcatttcccagacacccttgctagttggcttatcggtaggttctgccaaaatggggcatttagggagaggttggaaggtgggagttagggagaagttccttctcaatgtctctgttcctgtcaggcaacaattggctctagtctaatgtgtcttttcctcactgaatataaatgagtagactgaatgaatgtgcttgttattttgtttgcaacctacactattactttatctcctccctctcctcccaccccgcaaaaccatataaacaacagcaaaagaaaaaaatcctccacaaaacttcttaccatcttacagagaacagctaacagttggtgaccacacaagaattaaaatgtgttgaagtatggtcttatatttgcctggcactctacagagtactttcatgaagatgacctcatgatcttaaacaactctgagaaa

SEQ ID NO: 7582 - DNA, 615 bp, Homo sapiens
ttttatttcacaccagaagaccttagctgttattattacttcacctaaatgggtgagagacagacgcagagggtgccacgtgggccgtcctcgtctgctggatgcagagggttaggagctagcccagttcactggttttagagccagccttctggacatgttcttgcctcctgccctggaaagggacatgggctgtccttcctgcatggcctccagccctgtggccagatgtggcatgaagtccccagccttgtcacctgcgccctgtgagtggagccgggcagcggggcacttcgtgtctttcgttcctcactggacgcatcatgacatcttggagaaggactcacctgtgtgccgggtccctggactgagcccctgcattgtgcatgggtactgccctgccgcacctgctaccctgttgacccccacagccatcccctcgtgaaacccctcctcccagctccctgaggccagccatcctcaggagccccacagaccccgccacctcactcccgtactcactactcacttgagctgacagcagggtctcccccagcaccgctggcactgctgatattcagggcctctgtgacgggacatcctgagcactgctgg

SEQ ID NO: 7583 - DNA, 666 bp, Homo sapiens
caggtcatcatgtgccgagcgctggaagtactctgaaaaacgtgtccttactcatgtgacactttccttttaattgggacgaaagccaggaaacatgtgagtcttttaatgatgagatgtgaaaaaaaaaaataaagcctcatatctggaaaggtggcactggcaatagcagcatagttttagcattttccccacatcctacacaaaattagagtaattagatttttttttttaatggaaggaggcttcgaatattgaagaaggcacatctgggagcagagacccagggacagcctggcccgggcctgggcaccccaccagcactgaattcttaaagagaacttggaaaactctaaggtaggcacaccccaaagccagccttgcctgccgagatctgagggttgaacaggcctagaacctcctgacagcccagagagtgaggaagccatcaaagactcaggagccaactcgaagggaccccactggccgatgatgatgtgatttatgccccaaccaggatgaggactgcagttgattgaaacccatcatgtctgcttgaatcattcaaatcatggcattagaacaaaatgcacagagcacctggtggatacagaaaaagattcattatcttaaaaattagatacctcaagtgaatcatccagcact

SEQ ID NO: 7584 - DNA, 400 bp, Homo sapiens
ctgggtgtggtggcgggcacctgtagtcccagctactcgggaggctgaggcaggagaatcacttgaacccgagaggcgaaggttgcagtgagccgagatcatgccactgcactccagcctgggtgacagagcgagactccatctcaataataataatatacatagtgatttatgttgcaggcatcacgttggagttactattgacctccaaataacaggtcatttaaaacccttaaaaatgtgtgtgtttacatatatatatacaaatatatacatagagataaaggacagacttttaaaaaatgaattggaagaatatgtgccaaactcaggataatggctgtctctagggatagaaagtaggggaacaggaccaaggtgtgggggttggagtgtgaaa

SEQ ID NO: 7585 - DNA, 270 bp, Homo sapiens
gcgagactccatctcaataataataatatacatagtgatttatgttgcaggcatcacgttggagttactattgacctccaaataacaggtcatttaaaacccttaaaaatgtgtgtgtttacatatatatatacaaatatatacatagagataaaggacagacttttaaaaaatgaattggaagaatatgtgccaaactcaggataatggctgtctctagggatagaaagtaggggaacaggaccaaggtgtgggggttggagtgtgaaa

SEQ ID NO: 7586 - DNA, 400 bp, Homo sapiens
ctgggtgtggtggcgggcacctgtagtcccagctactcgggaggctgaggcaggagaatcacttgaacccgaaaggcgaaggttgcagtgagccgagatcatgccactgcactccagcctgggtgacagagcgagactccatctcaataataataatatacatagtgatttatgttgcaggcatcacgttggagttactattgacctccaaataacaggtcatttaaaacccttaaaaatgtgtgtgtttacatatatatatacaaatatatacatagagataaaggacagacttttaaaaaatgaattggaagaatatgtgccaaactcaggataatggctgtctctagggatagaaagtaggggaacaggaccaaggtgtgggggttggagtgtgaaa

SEQ ID NO: 7587 - DNA, 1274 bp, Homo sapiens
tgtggccgggcacagtggctcacgcctgtaatcccagcactttgggaggccaaggcgggcagatcacgaggtcaggagatcgagaccatcctggctaacacggtgaaaccccgtctctactaaaaatacaaaaaattagccgggcgtggtggcaggcgcctgtagtcccacctactcgggaagctgaggcaggagaatggcgtgaacccgggaggcggagcttgcagtgagccgagatcgcgccactgcactccagcctgggtgacagagtgagactccgtctcaaaaaaaaaaaaaaaaaaaaattacaggtctgtgagaaaggggttgtggttgctgactataagctgaaggttgcagttcttttacactgatcattaagcatgggagataagtccaaactgaattagacttattgcacagcttggtttttctcactacctctaagctcttagtttgggtacagcaacagcacagtgctgctcattcctcaattgctgttttatggaagtgcccagctccatttcttgtgttcatttctccatgatagttgtagagtgaggttgagatatgggtaaatcctgtaactagtgtctttctgatactcactacatgctaactaaaattttgaaaaaaaaaatggtagcactgctttctctttctctaaaatggcaatatagtactttagcatgagtgatttaggggtagaatgatctaaaagggcagcatagtattttttaatacagtgtattaaaatgtttaaagtttaaaaataattttgatatgggattgtattattcagccctttccctaggtatgcgtaagataattcaagatagttgcagatagctgccatgaagatccccaggagataataataaaaaaatccgggagattttaatgaaaaataatggacatttagcttttgtccagcagttgggaaacctgttaaacctgatgagtcatcctgactcattctctctcactctaccaaatacaagcagagtgcccattaaatatttggcttagttcacaaagttccatttttttttaatggctgatttgtctactccaattatacagtagttagatagtatttctggagtttaagaatgagttaattatcaaatctataatcaaacttttggttccatactaaatctgcggcctcttgcaattaatcccatttatcctccttaaaattagaaaaggctcctgagctgagattctgccactgcactgcagcctgggtgacagagtgagactccatctca

SEQ ID NO: 7588 - DNA, 317 bp, Homo sapiens
gtctgtggccgggcacagtggctcacgcctgtaatcccagcactttgggaggccaaggcgggcagatcacgaggtcaggagatcgagaccatcctggctaacacggtgaaaccccgtctctactaaaaatacaaaaaattagccgggcgtggtggcaggcgcctgtagtcccacctactcgggaagctgaggcaggagaatggcgtgaacccgggaggcggagcttgcagtgagccgagatcgcgccactgcactccagcctgggtgacagagtgagactccgtctcaaaaaaaaaaaaaaaaaaaaattacaggtc

SEQ ID NO: 7589 - DNA, 235 bp, Homo sapiens
cgggcagatcacgaggtcaggagattgagaccatcctggctaacactgtgaaaccccgtctctactaaaaatacaaaaaattagccgggcgtggtggcgggcgcctgtagtcccagctactgggaggctgaggcaggagaatggcatgaacccggaaggcggagcttgcaatgagccgagatcgcgccactgcactccagcctgggcgacagagtgagactgtctcaaaaaaaag

SEQ ID NO: 7590 - DNA, 3192 bp, Homo sapiens
gcttgtgcctgataattcatttctgaaggtgcaatattaagtgtcacagtgtccagctggtgatattttcagcatagaaacctgttagacacggcagcattaaggagatggaatgaattgatttatttctcttctgaattgcttggcagtgcttcaagattgacgcatcagatttgcacaatgtgccactttaggagattatttcttccttccttcagccagacagaagactgcagtaggtaatgatagcttaaacttgggaaatgtccttcttcagagacagcgtcacggacattttggagaggatcagattactctacagctgctttccctggtggacctgaggaggcacacccctgagccaggactttaagggagagggtagaacaacctagaagctcagaaggtcactccaactattatcttcccttctgtgacttattgacatacactttgatatcaaggcactgatgctgataacgtgagagaaaggaatagattaattatgggatgaggagtattttaaatgctaaaggctttgtctaaaataattcacatttttccatccagtggttcctctctttgaatcctgttagaatgacagtagatcttttaattctttccccactttaggcatgactttgaagaacctgaagatgtgaaaatgaaatggatactgtgctccttttggctaggattggggagggcccactaactgatctctactacccagcccctttcaacatcaaagctactttttttttttttttgagacaaagtctggccctgtcgccaggctggagtgcagtggtgcagtctcagctcactgcaacctctgcctcctggattcaagggattcccctgcctcagcctcccgagcagctgggactacaggtgcatgccaccatgcctggctaattttttgtattttagtagagacgggatttcactttgttggccaggatggtctcaatccaaagctacttttagcaggattgaactctgaggtcatccagtggccagttgtgatgctgtcacttttaaaactggaatgagttactgttcggatggtggctttggtctgaggcctgtgattcctgttttgccatttcttggctgtgtgtttgaggacctcttaatccctagcctcctcatttgtaaaataatccttcccatggaccttgtgcatttcatggaaatgcagtagtatggggtctggaagattctttgtaggcattctacctttccctatgtgttccaagtgaccctcatctggtgcattcttcatttgattaaagcaaggaaggaagctttagcagagggctgttatctcttgattggccgctgccatcccctgacccaccgtcttcccttttatgcacagtgatggcagagacagcaacagacagcttgcccaaacacactaagctgaattaaagcaccacccaagtagaggtctattctattaagaagggatcatccagaaattgaggtcactataacacaagggaaagattcaaggatcccaaagtgtctgctaggaagtggccaatgagggcttcaaagagtgtttaagttttagtccatccccaaatacagttcttccttggacaaaaacatctcagccatgctctggctgaattgggaggtgacagctgcctagctttgcgcttcctacctgatatgttaactcacgcaccattatactgtggttgggaagtatggtggatggtagatggaagacgagaatgggagtgagatatttacacagttctgaattttgggggtgagggctgtgcattcttcctgtcaaagttgtattaatatcagtagcataataatgattaaaagcatactctttggagttagacttcctggcttagaattgtgactatactagttaatcagttgtctcttttggcaaattatttgacttttttcatatcagttttccaagctgtaaaatgaaaatagtaatagtatttaactcattgttttaagttaaatgaaataatacgtatgaagtgcttagaataatctctgacaaatagtgtccactcacgaaatgctgtttgttctagctgctgtagtagcatatctctcgtatccttgggcaagagactttggcttttgaatttacttatctaagatcctctaagacagctctgatacaatttcttcccagccagcattcctgcaatcccaaagacccccccttttccatatttttttttgtccttggagacttctaaggtttaaagttatatgtatgttctttccttagcaatcaatacccattacatatgtctcacaattacaacttttcctggagacagatgttaatggattctgtccagcccactagaccctcacttccctatacatcagctcttgagtttcctaaaagcctgaacttcaattagaaagtgatcaggaagcttctcaaaaagcctaggaatctaatcaatatttctcacacaatggtgatgattagtagaggacatcagttgtcatcaacagtccaccacaatgtcagataagtaacacaggatgcaggcttctgacattcaccatccattatacatcccctgggaggtgggagcacttcaggtttccatggcagcagtcggccaagctaatttgatggccttcaaaaaaaaaaggaacagataatatataattaaacaacaacaaaaactagacacccactcgcagtagttttaaggaccctgggttttttggggtttatccaaatgccaatgtcaagaagattgggcttcataactgagagtaaagaagatttatccttccagtctaaaatctccattcaaagctttctagctgagaacccagttcccctttcgttttagggatatggttcctgtttgcctatttccatccacaactctgccagagacgaaagcagtgtttgaaacaattcaccaagatttccatctggaatcatcaagaatggaattgatcaaattccttaagaaatttacttaaagtcatgattttgacagcctagtgctacctggaaaagggacagcagcagcctggagcagttttctagctaacaagaattttgttagctatgtggccacctagtggctcttccatggatgtcgctgatgcattgtcaggtacacagacaattgcccactaataaagaagttattatctttcttggaa

SEQ ID NO: 7591 - DNA, 3192 bp, Homo sapiens; identical to SEQ ID NO: 7590

SEQ ID NO: 7592 - DNA, 9434 bp, Homo sapiens
cgttattacatgatgtagggatgagcaataacaaggagacagttatttttctcccatctttatctaccaatttacaatcacgaaggattgagtaacttttattcttctaccattaaggaagaaaaacagaaaaagaaaatggctgtaaagttggaactagcaaaatttcttcaagaaaccatgacagaaatggcaaggaggaacagagccaagatgggcgatgcctctacacagctctcatcctacgtgaagcaggtgtccatcttttatgtaatgccgaacaacttcggggctgggcgttctatgaaaaacgcatgtcatcatggatttcccaaattgttcaccatctttggaattgcaaatatctaaattatgaacatataatattgtaaacatttaatattataaacattgatagtagtttgcagaaaagcctgtcttaaagtaatcaacgttttgaagacattgataacttcttggagagaacagtagatttagagtcaaacttccaaactcctgatttttcagctgatgtagtttgacttcagatggatatcttttctttataccacgaagccgatttccagatgtcagacagagtcccataaatgctttgatgtctctttcaaatagcctattgggaaagttaaattaagtagaaaacacattttaattggcctttttgtcccactgcataggtccagacaggccacaagcccagcacaaaggagatagttcgcttctccaaactatttgaggaccagctggccctggaacacttagatcgccctcagctggttgccctttgcaaactgctggaattgcagacatttggaaccaacaacctgctccgctttcagctcctgatgaaactgaagtctataaaagcagatgatgaagtaagagcttaaccatagctctagggaattagcaaggttttgggacataccttagggtgcctgtgggatgaagtgtgcagtattttttgtttttgtttttgtttttgagacaaagtcttgctctgtcacccaggctgcagtggcgcaatcctggcttattgcaacctccacctcccgggttcaagtgattctcacacctcagcctcccaagtagctgggattacaggcacacatcatcacacctggctaatttttgtatttttagtagagatgggacttcaccatgttggccaggttggtctcaaactcctgacctcaagtgatccacccgcctcagcctcccaaagtgttgggatgacaggtgtgaccaccatgcctgggtagaagtgcattattttctgttgggtctggtcatgttgggttctgacaaaatgagtggtttaaacaaccattaccatgacaacctgaaccttgattactcatttgaggagttgtcatccccttacccatttcttgagaaggccatcataagcagttagtaatttggatgtcttagctgggactcatctaaagcagttaggacctgctgggaaggaaacagcagctcagtagattcctgacaaagctctgctcccacacttctgctctcataccgggaagctggtgccaaagtcaatattctgccgggcgcattggcctgccaagaaggggtagttggcttggtatgcaaagcataatactgggaggaaaagcagagcctcaacaccttgtagaagaaaggcacccttggactataactactaattaggcttttttaaaaaatggaaggaatgtttgactcagaatcagctgctttataagcattccacctgggggagcaggtttcccagaactgagaaagcatgatccttttggccccatttagatttcagttgttgctcttagagctttggaataaacaacactggtcccagaaataccattgttttgggttacgccaagcagaaactgtgttatttactgagggagttttgtggaccagtgtgttagggccatttctgggggtgttggggggacagcaggggagaacactacagggacatgcaacaaatggtacattgtgagcttttcaagtgaactacttttttctaatgaaccataaagctgccatggaaaagtatgtatgtcacaaccagacaaaatgcagatcaaaaagggaaataattactctgatgacagaatgttgggaaggagttgtgtaaatagccctgatattgctaattgctaatacctgttggcaggattcccattatttcaactgccacctccctacgtcgcctttgcagtagcagccagtgcaggggacaaagcatccaagcctctgattctgtttccactgatttgctggaatttagggtttacgtaaaattggaatcaaaagttccaactccatcccttacatttctttcagataattgccaaggaaggggtgacagcattgagtgtatcagaactacaggctgcctgtagggcccgagggatgagatcactgggtctcacggaggaacaactgcgacaacagctcacggaggcaagtagcagcgcccctctggggtcctcttccctagaactctctcctacaatatgcagacctccttatgtgatttctcctttgcaagtgaaccgtcttacttaatttgccttatttcattgagcagtgggatgctgaaggactaggttgatttttcactttgattgggatctctatcagttttgtattgctgcctaagaaatgaccatgaacttagtggcttaaaacaacactggtatattagctcacagttggtaggtcagaagtgcacgctgtgctcctttggaggctgtgggaaacgacctgcttccaagttcattcagtttgttggctgaacttagttccttgcagctgtcggactgaggtctttgtttcccagctggctgtgagccccgggctactctcagcatctagtggccacctgtattccttgcctcttggcctccttcatctgcaagagagaacttctcatatgccagagcttcctcatgcttgaaatctccaatttcccccgtgtttgacctctagccccagatttaaggtctcatgtgattggtgaggcccatccaaagaatctccctatcttaaggtcaaccgacttgggacttcagttacacctgtagaatcccttcacacagcagccagaatactgttgaataactaggagagggtgtgggtattgcagggacaaggtgtcttgggaccaccttagaattttgacctacttcacgtagtgtaacgggtcctggcaaaaatttcagttcaaggcctgtcatctgtgtgaatctgtctggaggtccccactttgcctggtggcccacctggggctgcttttcaattagtgccccaaaccagcacacactgtggtaacccatgtttaatatttttcctcagatagcatatttggacttcaagtaagagcatcaatgctttaaaacaaaggagtaactcctattacatttcattctcatcattgtaagaaatgccatgaagaatgcacagatgatcttaggttaccagccatggtgtggcttggaaaccatgttaggttactttttcctctcatgtgtgggaccagctctggttggaagacagcacattgtagagaaagatccttaaaatcatgtatttcttgaacgttggctatgacactgtcactgcagaagctttgtgaatactttttatggtaccttttgaattttatcttttgtgcatatattactgatcttaagaagacagagtctcactctgtcgcccaggctggagtgcagtggcactaacacaggccactgcagcctcaaactcccgggctcaagcgatcctcccacctcagccttcctagctgggaccacaggcatgtaccaccatacccagataattagaaaatttttttgtagagacagagtcaccctgtgttgcccaggctgtgatttattctttcacattatctacactttgtccaacagaagatacttgactactttgatccacagttgggttgagagtttaattgaattctccctctctgagagtgattccaccatagtgagggaggctgtagggtgccccctcagtgcagaagccagggctgggctcttgtccgtgttctgccgtgactcatcacctgagcggcttggcggaaagggcgggggcggtgggaagctgtcagccagggagggtagatgaccgcggatcactctggctctggtgttctgattctcacgtgttgttcccctcccgttctccagtggcaggacctccacctgaaggagaacgtccctccttcccttttgctcctgtcccgcaccttctacctgatagatgtgaagcccaagccgattgagataccactcagtggggaggtgagtacctgggttaatggggaccctcgacgtccatccaactgaggcctctccacaaacacttggtgtactcttgcagttagagcaggcatttcttttggccttttagaatttgacccaactggctttatgtgttttaaaaatttctaaaaaaaccaaccaaccaaccacaaacaaacaaaacaaaggaaggccaggcacagtggcttacgcctgtaatcccagcactttgggaggccgaggtaggtggatcacctgaggtcaggagtttgaaactagcctgaccaacatggtgaaatctcatctctactaaacatacaaaaattagctgggcgtggtggcgggcgcctgtaatcccagctacttgggaggctgaggcagaattgcttgaacctgggagacggaggtgcagtgagacgagatcacgccattgcactgcagcctgggcaatagaactagactccgtctcaaacaaaacaaaacagaaaactgaagccactcagttttacctccagccttaaggctgctactgcctttgagcccagcttgattgagaattttactaataggagcagtttattcctttttcttaactatcttcattagcagactggtgtgtgtgggtgtgggtgtttctgctgctttctccttttagactgaatggttcctgttctatttcatttgtccagattcctattagtctttaagcattgaatggcttatctagaatgtctttcaactcatttccttaatcatttttcttcctggtgttgtagggaagagcataagattggcccagtcactacagcatcttgctctgggcccatcagaaagggcctcccgcttctctagctggtggcttcctgtctgactcagaacccggcatgagtaagaaaggaaagattcttgtagaatatgctacactgtggtttaggggactagtccaagtactaagtgagggccagtcgttttacatcttaattatgctgttgactccttggacaagccaaggaaaattatttgaagtccaatatgaaaacccaacttcaggaaacaccatcttgctttcccttttcatatttctagagtaatctggttttgggatttgtccaggaaaaactctagggagactaggagcagtttcagagtatagaccatgttctaaaaggcaggctagtgggttcttattctatccaactcttggatccactcatgtgagacagaccaaagttaatcgtcattcttagattgctgtcaggggcaaggaaatcttggaggagctcactgtctcagctaaatctgggttctcagaattattctagagggccataagctctttatccagatgttgctttctggagtgggtgagaacggaattaaggacaaaatgataagctcctaagcaagttattggctttttcccacccatgtttttaaacttctattctccatgtatatatacaaaatgagaacaagtagcatgctaggttctgtgaagaatagagacatcaaatatactgtaattttggatgtatgtagccttatccctccaaagtccacaaattacttccaaagcacagtgatatatgtttttcaaatctaattcctaaagataggttagctagctattctatcaccactcccattcttatcgttatctattttaataccactcctctccccatcttccttgcgttataggagcttaccattttagtaaatcaggcaattttatcatttattattagatactaaaaatgaaaaagatgcaacatagaccaagttacatcaatgctattagaaaataactgaggccagtagcagtggctcatgcctgtaatccagcactttgggaggctgaggtgggtggatcacccgaggtcaggagttcaagaccagcttggccaacatggtgaaacaccgtctctactaaaaatacaaaaattagtagccgggcatggtagtagacgcctgtaatcccagctactcaggaggctgaggcagggagaattgcttgaacccatgaggtggaggttgcagtgagccgagatcgagccactgcactccagccttggtgacagagtgagactccatctccaaaaaaaagaaaaaaagaaaaacaaataattgagaaatggcttttgaggccaacagcaggaccagtgccatcagtggattgctaatgattattttaaatgctagaatctatcagagtgcaacttttgtatataaagtactcaaaactcaaagagaaataatactaagttgctacatcaggggcatatttcataggttactcataaagggtgtagctagaggaggaagttagggatttagtggaaagcaaatagtgctaaaaaaggcattgactactgtaaaagtttctgggttttaggaagagcagaaagcttatgatacataaaatgtttatctccccaggctccaaagactgatattcttgtggaattacctactttcactgaatctaaagagaacatggtggatcttgcacctcaactgaagggaactaaggttagacagttactttccatttggttaattagattaaaaaatgaaaatagcaatgggtcattttctcctgttttaatccccttaatgaaattgaaattcaatacaataatgttccttaataaggaatatttattgtactgtttgatctaagaggaagcttaatatttggctacacgtaattaggttccagattttgccttttgaatcctgtgccaggatatgaggtagttgtgacaagttcctggtagtcaaggtagtggactgtagattaatacacattttcttttaaatcagtaacccaactctcagttctgatgtttaaggatgaagactttatacagccgccaccagttacatcatcacccataacaccatcaacacctatttcattacctaaaggacccatcacttcttctgaagaacctgtaagtatctttaataaatgaaaaagaaagagaagaccctttccctctagttatctttaagggcagtgagaatctagaattagtcctgttgcaaaacactgcacaattcttcctgttgtccaaacaggaaattgtaggccaaactttagtcatcttgtaaccacgttttttacttcaactatccaaaaaaaaaaattgtgggtcagactaaaacatgcaaagtgtagaagtcagttacaatataggcagaccctttttttcttatgtgccaggtggaaatagtttccatgtgttattttacacatgcttccgacgtgaggaaatactagctggaaagcaactttaatttccagagaaatgcatgtaaataagaaactacttatctatcatccagttttcccaattgggtgaagggatttggggcaagagcacagggcatgaagagagtaaacagtggggaggttgtgggagagttgaagtgggaagtggctcctgtggaccaaagacatggctggcaggacagagaatctatgaagacacagatggggtaagcccagaaaagcatcccaaggcacacacataccttgttttttgtaaatctcctttatcttttattaccaaggtaaattataatctcagatttgactttgtggtcactattttgattaagaaaacaaaaatagcattcactccttaagaacttacacgtctgtgactaatgcctacagtccttgttttttacgcctagacactccaggccaaatcacaaatgacggcccagaacagcaaggctagttcaaaaggagcataaaggactacttgaggatggagctcactctcttcagcttccggccctcaacagtggcatctgtaaaggacctcccagataagactgtctggcttcagagagcggatcagctgtttagcccgtggggcagtcctttgaggcctggtaaccattccaggtgatgtgggtagtgagaccaagttcagaccacttagaaaaatataattgcaaagtcccatttcctctgtaccattgtcaccccactcaactttgtataaagcccaccccccatcatgttgtttttttagtttcatgtgtacgtcccttcagagaggaaattttttgcacaatggaatcagcttggcaccttagatacctgtctcctatggcttggaattctgagtaagaacttggaagttccaaaaaccattttaggagcacctgattaactttctgaatgatccaccagtaggatcagcaccctggaaacaaagtaccttatgagatgggatggatatactccccagtaagatctttctggatataatgaagcttcctggagaaacagactggcaatcagaaagatttggctgcttccgacacctccatcttgggcctgcagaggctgcagcaatctgtgaggcagccgcaatctgcgaggcagccactcttctagcacatatggctttcattagccaccattttgctaggaagcataattaagggtttaagccttaaccatgtttgtgttgggtgtgtgtgtttctggccagtttgtctttcacaaataagactattagtcatagggattgtgaaagtctgatataatccctgtgctacccagcaacaagtattacattaggatatttatgcttggtgttttcagtattaataatatgaaataatagatagactgccatgcagctgaccaagggctttcttcccctggggagtggttagaaggccaaaggtatttcagcctgtaggtgataaaattagatttctttacttgctgtggttagacagcagtcagttaaaacaagtaaaactccactgtcctgtctgggatcacctaaatgaggaatgtcaccagcacttcacagcaagaatatgcattctacaatgctttctaaatttgtgctccatcagagaagccccaccatgtcccactaatgaagcccagttctttgggaatgatgaatccctactgtgcacatacagcaatcatggatcctgcctatcgaggtgattcacaatacactttcccatttcaaaaatgacgggtattttaattagtccacatttcaggtgttaaatgtgggaaagggattagctaaa

SEQ ID NO: 7593 - DNA, 9431 bp, Homo sapiens
cgttattacatgatgtagggatgagcaataacaaggagacagttatttttctcccatctttatctaccaatttacaatcacgaaggattgagtaacttttattcttctaccattaaggaagaaaaacagaaaaagaaaatggctgtaaagttggaactagcaaaatttcttcaagaaaccatgacagaaatggcaaggaggaacagagccaagatgggcgatgcctctacacagctctcatcctacgtgaagcaggtgtccatcttttatgtaatgccgaacaacttcggggctgggcgttctatgaaaaacgcatgtcatcatggatttcccaaattgttcaccatctttggaattgcaaatatctaaattatgaacatataatattgtaaacatttaatattataaacattgatagtagtttgcagaaaagcctgtcttaaagtaatcaacgttttgaagacattgataacttcttggagagaacagtagatttagagtcaaacttccaaactcctgatttttcagctgatgtagtttgacttcagatggatatcttttctttataccacgaagccgatttccagatgtcagacagagtcccataaatgctttgatgtctctttcaaatagcctattgggaaagttaaattaagtagaaaacacattttaattggcctttttgtcccactgcataggtccagacaggccacaagcccagcacaaaggagatagttcgcttctccaaactatttgaggaccagctggccctggaacacttagatcgccctcagctggttgccctttgcaaactgctggaattgcagacatttggaaccaacaacctgctccgctttcagctcctgatgaaactgaagtctataaaagcagatgatgaagtaagagcttaaccatagctctagggaattagcaaggttttgggacataccttagggtgcctgtgggatgaagtgtgcagtattttttgtttttgtttttgtttttgagacaaagtcttgctctgtcacccaggctgcagtggcgcaatcctggcttattgcaacctccacctcccgggttcaagtgattctcacacctcagcctcccaagtagctgggattacaggcacacatcatcacacctggctaatttttgtatttttagtagagatgggacttcaccatgttggccaggttggtctcaaactcctgacctcaagtgatccacccgcctcagcctcccaaagtgttgggatgacaggtgtgaccaccatgcctgggtagaagtgcattattttctgttgggtctggtcatgttgggttctgacaaaatgagtggtttaaacaaccattaccatgacaacctgaaccttgattactcatttgaggagttgtcatccccttacccatttcttgagaaggccatcataagcagttagtaatttggatgtcttagctgggactcatctaaagcagttaggacctgctgggaaggaaacagcagctcagtagattcctgacaaagctctgctcccacacttctgctctcataccgggaagctggtgccaaagtcaatattctgccgggcgcattggcctgccaagaaggggtagttggcttggtatgcaaagcataatactgggaggaaaagcagagcctcaacaccttgtagaagaaaggcacccttggactataactactaattaggcttttttaaaaaatggaaggaatgtttgactcagaatcagctgctttataagcattccacctgggggagcaggtttcccagaactgagaaagcatgatccttttggccccatttagatttcagttgttgctcttagagctttggaataaacaacactggtcccagaaataccattgttttgggttacgccaagcagaaactgtgttatttactgagggagttttgtggaccagtgtgttagggccatttctgggggtgttggggggacagcaggggagaacactacagggacatgcaacaaatggtacattgtgagcttttcaagtgaactacttttttctaatgaaccataaagctgccatggaaaagtatgtatgtcacaaccagacaaaatgcagatcaaaaagggaaataattactctgatgacagaatgttgggaaggagttgtgtaaatagccctgatattgctaattgctaatacctgttggcaggattcccattatttcaactgccacctccctacgtcgcctttgcagtagcagccagtgcaggggacaaagcatccaagcctctgattctgtttccactgatttgctggaatttagggtttacgtaaaattggaatcaaaagttccaactccatcccttacatttctttcagataattgccaaggaaggggtgacagcattgagtgtatcagaactacaggctgcctgtagggcccgagggatgagatcactgggtctcacggaggaacaactgcgacaacagctcacggaggcaagtagcagcgcccctctggggtcctcttccctagaactctctcctacaatatgcagacctccttatgtgatttctcctttgcaagtgaaccgtcttacttaatttgccttatttcattgagcagtgggatgctgaaggactaggttgatttttcactttgattgggatctctatcagttttgtattgctgcctaagaaatgaccatgaacttagtggcttaaaacaacactggtatattagctcacagttggtaggtcagaagtgcacgctgtgctcctttggaggctgtgggaaacgacctgcttccaagttcattcagtttgttggctgaacttagttccttgcagctgtcggactgaggtctttgtttcccagctggctgtgagccccgggctactctcagcatctagtggccacctgtattccttgcctcttggcctccttcatctgcaagagagaacttctcatatgccagagcttcctcatgcttgaaatctccaatttcccccgtgtttgacctctagccccagatttaaggtctcatgtgattggtgaggcccatccaaagaatctccctatcttaaggtcaaccgacttgggacttcagttacacctgtagaatcccttcacacagcagccagaatactgttgaataactaggagagggtgtgggtattgcagggacaaggtgtcttgggaccaccttagaattttgacctacttcacgtagtgtaacgggtcctggcaaaaatttcagttcaaggcctgtcatctgtgtgaatctgtctggaggtccccactttgcctggtggcccacctggggctgcttttcaattagtgccccaaaccagcacacactgtggtaacccatgtttaatatttttcctcagatagcatatttggacttcaagtaagagcatcaatgctttaaaacaaaggagtaactcctattacatttcattctcatcattgtaagaaatgccatgaagaatgcacagatgatcttaggttaccagccatggtgtggcttggaaaccatgttaggttactttttcctctcatgtgtgggaccagctctggttggaagacagcacattgtagagaaagatccttaaaatcatgtatttcttgaacgttggctatgacactgtcactgcagaagctttgtgaatactttttatggtaccttttgaattttatcttttgtgcatatattactgatcttaagaagacagagtctcactctgtcgcccaggctggagtgcagtggcactaacacaggccactgcagcctcaaactcccgggctcaagcgatcctcccacctcagccttcctagctgggaccacaggcatgtaccaccatacccagataattagaaaatttttttgtagagacagagtcaccctgtgttgcccaggctgtgatttattctttcacattatctacactttgtccaacagaagatacttgactactttgatccacagttgggttgagagtttaattgaattctccctctctgagagtgattccaccatagtgagggaggctgtatggtgccccctcagtgcagaagccagggctgggctcttgtccgtgttctgccgtgactcatcacctgagcggcttggcggaaagggcgggggcggtgggaagctgtcagccagggagggtagatgaccgcggatcactctggctctggtgttctgattctcacgtgttgttcccctcccgttctccagtggcaggacctccacctgaaggagaacgtccctccttcccttttgctcctgtcccgcaccttctacctgatagatgtgaagcccaagccgattgagataccactcagtggggaggtgagtacctgggttaatggggaccctcgacgtccatccaactgaggcctctccacaaacacttggtgtactcttgcagttagagcaggcatttcttttggccttttagaatttgacccaactggctttatgtgttttaaaaatttctaaaaaaaccaaccaaccaaccacaaacaaacaaaacaaaggaaggccaggcacagtggcttacgcctgtaatcccagcactttgggaggccgaggtaggtggatcacctgaggtcaggagtttgaaactagcctgaccaacatggtgaaatctcatctctactaaacatacaaaaattagctgggcgtggtggcgggcgcctgtaatcccagctacttgggaggctgaggcagaattgcttgaacctgggagacggaggtgcagtgagacgagatcacgccattgcactgcagcctgggcaatagaactagactccgtctcaaacaaaacaaaacagaaaactgaagccactcagttttacctccagccttaaggctgctactgcctttgagcccagcttgattgagaattttactaataggagcagtttattcctttttcttaactatcttcattagcagactggtgtgtgtgggtgtgggtgtttctgctgctttctccttttagactgaatggttcctgttctatttcatttgtccagattcctattagtctttaagcattgaatggcttatctagaatgtctttcaactcatttccttaatcatttttcttcctggtgttgtagggaagagcataagattggcccagtcactacagcatcttgctctgggcccatcagaaagggcctcccgcttctctagctggtggcttcctgtctgactcagaacccggcatgagtaagaaaggaaagattcttgtagaatatgctacactgtggtttaggggactagtccaagtactaagtgagggccagtcgttttacatcttaattatgctgttgactccttggacaagccaaggaaaattatttgaagtccaatatgaaaacccaacttcaggaaacaccatcttgctttcccttttcatatttctagagtaatctggttttgggatttgtccaggaaaaactctagggagactaggagcagtttcagagtatagaccatgttctaaaaggcaggctagtgggttcttattctatccaactcttggatccactcatgtgagacagaccaaagttaatcgtcattcttagattgctgtcaggggcaaggaaatcttggaggagctcactgtctcagctaaatctgggttctcagaattattctagagggccataagctctttatccagatgttgctttctggagtgggtgagaacggaattaaggacaaaatgataagctcctaagcaagttattggctttttcccacccatgtttttaaacttctattctccatgtatatatacaaaatgagaacaagtagcatgctaggttctgtgaagaatagagacatcaaatatactgtaattttggatgtatgtagccttatccctccaaagtccacaaattacttccaaagcacagtgatatatgtttttcaaatctaattcctaaagataggttagctagctattctatcaccactcccattcttatcgttatctattttaataccactcctctccccatcttccttgcgttataggagcttaccattttagtaaatcaggcaattttatcatttattattagatactaaaaatgaaaaagatgcaacatagaccaagttacatcaatgctattagaaaataactgaggccagtagcagtggctcatgcctgtaatccagcactttgggaggctgaggtgggtggatcacccgaggtcaggagttcaagaccagcttggccaacatggtgaaacaccgtctctactaaaaatacaaaaattagtagccgggcatggtagtagacgcctgtaatcccagctactcaggaggctgaggcagggagaattgcttgaacccatgaggtggaggttgcagtgagccgagatcgagccactgcactccagccttggtgacagagtgagactccatctccaaaaaaaagaaaaaaagaaaaacaaataattgagaaatggcttttgaggccaacagcaggaccagtgccatcagtggattgctaatgattattttaaatgctagaatctatcagagtgcaacttttgtatataaagtactcaaaactcaaagagaaataatactaagttgctacatcaggggcatatttcataggttactcataaagggtgtagctagaggaggaagttagggatttagtggaaagcaaatagtgctaaaaaaggcattgactactgtaaaagtttctgggttttaggaagagcagaaagcttatgatacataaaatgtttatctccccaggctccaaagactgatattcttgtggaattacctactttcactgaatctaaagagaacatggtggatcttgcacctcaactgaagggaactaaggttagacagttactttccatttggttaattagattaaaaaatgaaaatagcaatgggtcattttctcctgttttaatccccttaatgaaattgaaattcaatacaataatgttccttaataaggaatatttattgtactgtttgatctaagaggaagcttaatatttggctacacgtaattaggttccagattttgccttttgaatcctgtgccaggatatgaggtagttgtgacaagttcctggtagtcaaggtagtggactgtagattaatacacattttcttttaaatcagtaacccaactctcagttctgatgtttaaggatgaagactttatacagccgccaccagttacatcatcacccataacaccatcaacacctatttcattacctaaaggacccatcacttcttctgaagaacctgtaagtatctttaataaatgaaaaagaaagagaagaccctttccctctagttatctttaagggcagtgagaatctagaattagtcctgttgcaaaacactgcacaattcttcctgttgtccaaacaggaaattgtaggccaaactttagtcatcttgtaaccacgttttttacttcaactatccaaaaaaaaaaattgtgggtcagactaaaacatgcaaagtgtagaagtcagttacaatataggcagaccctttttttcttatgtgccaggtggaaatagtttccatgtgttattttacacatgcttccgacgtgaggaaatactagctggaaagcaactttaatttccagagaaatgcatgtaaataagaaactacttatctatcatccagttttcccaattgggtgaagggatttggggcaagagcacagggcatgaagagagtaaacagtggggaggttgtgggagagttgaagtgggaagtggctcctgtggaccaaagacatggctggcaggacagagaatctatgaagacacagatggggtaagcccagaaaagcatcccaaggcacacacataccttgttttttgtaaatctcctttatcttttattaccaaggtaaattataatctcagatttgactttgtggtcactattttgattaagaaaacaaaaatagcattcactccttaagaacttacacgtctgtgactaatgcctacagtccttgttttttacgcctagacactccaggccaaatcacaaatgacggcccagaacagcaaggctagttcaaaaggagcataaaggacttgaggatggagctcactctcttcagcttccggccctcaacagtggcatctgtaaaggacctcccagataagactgtctggcttcagagagcggatcagctgtttagcccgtggggcagtcctttgaggcctggtaaccattccaggtgatgtgggtagtgagaccaagttcagaccacttagaaaaatataattgcaaagtcccatttcctctgtaccattgtcaccccactcaactttgtataaagcccaccccccatcatgttgtttttttagtttcatgtgtacgtcccttcagagaggaaattttttgcacaatggaatcagcttggcaccttagatacctgtctcctatggcttggaattctgagtaagaacttggaagttccaaaaaccattttaggagcacctgattaactttctgaatgatccaccagtaggatcagcaccctggaaacaaagtaccttatgagatgggatggatatactccccagtaagatctttctggatataatgaagcttcctggagaaacagactggcaatcagaaagatttggctgcttccgacacctccatcttgggcctgcagaggctgcagcaatctgtgaggcagccgcaatctgcgaggcagccactcttctagcacatatggctttcattagccaccattttgctaggaagcataattaagggtttaagccttaaccatgtttgtgttgggtgtgtgtgtttctggccagtttgtctttcacaaataagactattagtcatagggattgtgaaagtctgatataatccctgtgctacccagcaacaagtattacattaggatatttatgcttggtgttttcagtattaataatatgaaataatagatagactgccatgcagctgaccaagggctttcttcccctggggagtggttagaaggccaaaggtatttcagcctgtaggtgataaaattagatttctttacttgctgtggttagacagcagtcagttaaaacaagtaaaactccactgtcctgtctgggatcacctaaatgaggaatgtcaccagcacttcacagcaagaatatgcattctacaatgctttctaaatttgtgctccatcagagaagccccaccatgtcccactaatgaagcccagttctttgggaatgatgaatccctactgtgcacatacagcaatcatggatcctgcctatcgaggtgattcacaatacactttcccatttcaaaaatgacgggtattttaattagtccacatttcaggtgttaaatgtgggaaagggattagctaaa

SEQ ID NO: 7594 - DNA, 11294 bp, Homo sapiens
tttcattttctctcaggtcaatttcactgtcttttatttgacagctagcgcagtctttggggaaatttgtgggtgatttgagtagtaacagcaaggacatcactgtaattatgatagtgccttatatttttctagcacctctcccaaggacttatgaagacttttagattcttcatcccttcacacaacattgcttcaaggtagggccaaggcagaaattatcatcactgttttacaaggaaagacactcctgtgcggtctcaaagcaaatgcttttaagagctaaaaattcatttcctagttctgttcaccaaatgatgccttctttaaacataaatacaaattgtaatgttagcaggtgctatttacagagagaaacaaagagaattttacaatagtcgccaacactgcagctgccaaaaaatccctagctcagaaatttaaagcagcaatcccattttccctacagaaatgaaaacatattgaactttcttttgtatttagcagtaatccagcaaaatataagctttaatatagcgactgaggagtggtagtttgagccatgaggtacgggggagccagaatccacttagtgaggacagtgatgaccagcaggtggcagaagtaaattccaagcagccaaaaaaccaaaaacattcggagaattttccccccgttcctgagggacaggatggagtttggacaggaagaactgtaagaagccaagatctgcgacagtcccaacaaatacagtctggtcacatggatacaggaaggacgatctggggaggcataccaacaagaaacgaagccagggacctgaatgcaaaactagcctcaggtgacatgttctcctgcacttagaagcactggcaaaaccatgcccacatagagggggcagacacatgtctgggtttcagtttctgcagaccttcatcatttgttttcctttttgttttctctgttgcccaggctggagtgcaatggcgcaatctcggctcactgcaacctccgcctcccagcttcaagggattctgcctcagcctcctgtggagctgggattacaggcgtgtgcaccatgcctggataatttttgcatttttagtagagatggggtttcactaagttggccaggctggtctcaaactcctgacctgaagtgatctgcccacctcggtgtcccaaagtgctgggattacaggcgtgagaaccgcgcccttgctttcctcttaatcactgtagctctaccccgtggctattcctaggtaggtgccccctccccagcccaaccccaccggtttccttggaggaaaccatccatggtcgatggctgctgggccttgactctctgcccagcgcctctactgcatggatggggttcctgccctcgaagcagacatcttctttttctgactttccaaaagcagcggagaggcaggaggtgcgtcgtgaggtctgggtgcaggacctaggaagaagaggttacaaggaacctgcgccgggagcatgcggtgccctcgggacagacctagccccagggcccgtgggtgtcccttctttccagtggacattcccacccttttcatacagcccatagataaatgaagcagcagcaatttttattgagggacctaaactgaaaataggtttagaacataatttaaaaaaataaaacagcaaaagtagcaaaaaatatatgacctttttaaaaacattttccttttttttcttttttgtttttaatatatagcaactgatgcctcccagccaccaggagcatcttacccgatgggtaaatctctggtaacgacccttttaaaaagacatgtaaatatatactcagatttatacactttgtgttttcttcatagctatatacagagcccccagtttggggctgggccccagggccacaacactgcccccaacctggccttcgcctcaccatcctctggtaccaggcatttggtcagcaaagcaaactagtatcggaattaataagccactggcaccacctatctggggcagaggtcaccttcaatcgaggcacgaagcactgacctccctactgctgtagccctgaggacaaggcacctgccaccagagtgcgaggggcttatgggtgaaggcaaaacagaccaaaccgacaggagaaagctcaggaagctctcacttgcatgcctgttcattggctcccactccctgccctccaggcagtgcctggtggcagggaggggtgttggtccaacatctgggaggggatgaagtggctggcagcaaagatctgcctctttgcacctctcaccagcaggtggagaggaggtggagggagaggtgagctgagtggggtgaaggcaggccacacaggaaggcccctggtaggcagccggctcctgccagcaggaaaggggacagggacggacaggtggtgggcccagcaggggctgtgggtgagggttacagctgacggtggagtctggggagggcgtgtgggtggcagtcagcggcgtttgagtccgccattggcaagctgggctgggtgtcggggcaggcagggctcctcgggcagcggctcatgagagaagacggaatcctcccctgaggagcacgtagagctccgggtgtcgggaaagctgggggagtactggtccaggggcatggacaggtccaggtactcctgtgatgggcgagaggaagcagcgatgggccgggcccctcctccctgctcagggaggtgcgtgcacgcagtggggacggcctgagctctggctctggcacgggcagccttacctggttggaggtcaaggccacgatgcggtccaggtcttccaccagctgcttgaaggtgggtctctgtgagggcactgcatgccagcagtcccgcatcatcatgtacctgcggcaggactgtaaggtcagggacgtctcctggagatggatactctctagtctagccccctgcccctcaagcccactcttgccccaaggcctggctcagggcctccgacatctcctcgggcttacagctcgttggtgcagttactgggcttgtccatgcggtgaccctccttcagcagcttgaaaagttcctccacaggcacaccggggtatggggagccgcccagagtgaagatctcccacaggagcaccccgaaagaccacctgcaaatgggcggagagccacagggtgttagagcttctccgcctcccctcccccagcacaaatcctctacccagggcagtgccaggagacagcatggagaacagatcagcctttcaacatctggagcagagggaatggccacagacaatgttttgtttttctctctggggcagaaagaggactcctcagtccagggagaaagcaggactctacagtgctagaagctctctatcccacacctccctggcaattgctattacaaactcacacatcactctggtgggtgtagatccggtcaaataatgcctcgggtgccatccacttcacaggcagtcggccctgaaagcagcacaggggaggttggagtggccccaggcagggccatgagggcacaggtgggaagggactggggggtgggttctcagcccaccccactccttgcttctcagatgaaaccaccagcacagggcggccttgtcggcactcacgttggttgtctttttatagtagtcgatgtggtgaatgtcccgtgcgaggccaaagtctgctatcttcatcacattgtcctctgtcaccaggacattcctggctgccaggtctcggtgtatgcactgaggaaggaggaagggagagcgggaggcggggaggtgagggagctggaaggctctgggcggccgccacccatgcaactagccgacttgtctcatagaacttctgccacactgctctgccccccgaacctttgctttccctcttctaacattctctgccagctccaggcttctcatcacagcaagcgctcctcccttccttccccaaagactggccccttatgcctctgctgcgtctgcagcgatgcatgctcctaggtcctgcctcccagcacagcaagtccacatggggctgggctcaaaccaggccagcccttacacaccaaacactgcactcaacactcacagacagtttcattttatcttcataacaattctacaacaggtattgttatactttattttcttttgagacagggccttgctctgtcgccccggctggggtgcagtggtgtgatcatggctcagtgcagcctcaaactcttgggctcaagctagcctcccacctcagcctcccgagtagctgggactatcggcacgcactaccacacccagctaattttttaattttttttttttttttaaagacggggtttcaatatattgcccaacctggtctcacactcctgagctcaagcaatcctcccgccttggccactgcacccagctgatattattattattttgtatttgaagaattttaagatgctaagtagctgcctgaggctacgcagaaagtggcagtgcacagatcggaccctgcatcagtctgaccccaaggccacctggctacactggtgctcctgactctgcagttcccagagagcctaagacaacacacagggcacacagggccagtgctcagtgcatccacaacgccaccacaagatgataagtcacaggctggaagactaggggggctctgttcccaccctggcattacccaggggagccttcaggttccacaccttcttggaggccagatactccatgcctcgggccacctggtaggcgcaggacaccaggtccttggaggagagctgctcctctgggttgtggctggggttgtagcagtattccagccctgggggcctccgggcctgcaggtactcccgcaggttgcccttggaggcatactccacgatgacatacaagggacctgcaggcacaggagaagaggccatggggccagcagcaggtgagcaggtttggcttcacctcaaagaaaccccacccccagcagcacaccccggccaacctcccatctcctgcctcctcttaggggacctgggaaatccattctactacccaaaaaaaatcagagaaataattactcccagcatagtccagaaaattcccgagcaacattggggtaagagccccagtttgtctgtttattttgagatggagtctcactctgttgcccaggctggagtgcagtggcgcaatttcggctcactgcaacctctgccttctggattcaagtgattctcctgcctcagcctcccaagcagctgggattacaggcatgaacaatgcctggctaattttttttttttttttttttttttttgagatggagttttgctcgttgcccaagctggagtgcaatggcgcgatctcggctaaccgcaacctccgcctcccgtgttcaaacgattctcctgccacagcctcccgagtagctggaattacaggcatgcgccaccacgcccggctactttttgtatttttagtagagatggggtttcacctgtaggccaggctggtctccaactcctgacctcaagtgatccacccgcctcaccctcccaaggtgctgggattacaggcgtgagccactgtgcctggcctatttatttattttatttttgagacagcgggagtatctcccaagctggagtacaatggcgtgatcttggctcactgcaacctccacctcccgggttcaagcaagtcttatgcgtcagcctcctgagtagctgggattataggcatgcgtgaccatgcctggctaacttttgtattttttagtagagatggggtttcaccattttgaccagactggtctcgaactcctgatctcaagtgatcttcctgcctcggcctcccaaattgctgggattacaggcatgagccactgcacccagcctgagcgctcttagaccataattactcagctgcctctgttaacacaccacgtgtgtgaatctaggtatctgtattcctgaatgaacaccaatgagcggagcccagatcccgagataacacattttaaacctctgccaaagcagcctctcttaacccccttccctagctgtggctgagagaggccttgggactgataccccagctcagatcttctccccgctgggcagggaaagccagtctggccggcacccaccatcctgcgtgcaggcccccagcaggttgatgatattcttatgcttcccgatcatcttcatcatctccatttctgagatcaggtctgacaagtctttctctgttgcgtccgctttaaagaacacgttgagactcatttacttgggaagggaggagggcaggataaaggctaagggagtggggtatgtgtcgaggggctgcttttccctgggacttgattctctcctccccacttcatccaaacttgttttctcttccctctcatgggagccgttgttgcaataggtggtagtgagtgggcagggatgtggtgaggaaagcctgcaagcgatggatccaggataaacacctgaccacagcccaggttgacgccaaggaacagagtgacgtcatagaacaatctcaaggtgcagaacaccccctccactcccaggtaaccccaagcaggcagcggagcaggtgtgggcagcaaaggcaccagagaagctgttctgctgggcccgaggcctgctgtttgcttggaatgggacaagattttctttgcaaggacagaagcatcacttacacttcaacatcttcacagccactttggtcacacggttgggtttgtccttgtccagcccgatagcctctgccaacaccacctgcccaaagcagccctctcccaggggtttgcctaagaccagtctttcgggggaaacagagagtggcataagttggggctggtgaagttcaaaccttgagaggcaccccatctccacctctctgtatttcacccaactgcgagcagaaagtggaatgaatgtttctgcaggcatttcatgaaccttcaccgcccagaaggtgttagtatacacaccttccaccactagaatagcaagcaaggaatgccttcaaaaagttgggagtcaaagtattattacctgtcccgaggcagctcccagcgagggtcttcgggaagctcatactcagagacccctgctagcatgggagtcccactggaggagagccgtgatggccgaaccagaagaaccccagagttcatggatgcactggagtcagcagacacctgcaaggaagagtggggtcaccctagagcaaggaggggggacggggtgactccttcccattcttagtcagggcttcccaacaatggcagaggcacatgtctgtgtatctgatgttctttcctcaacacagagtggtccaaagaccatggtaggccaggaggcccaacttctaggactgacctatttctgccacaagctggcctttctggacttcactcacctttaaaataagcagaccaaatgcacctcttccagcttgacattttataactgatcattgcagtaacaactctgttctcctgactctttgcaaatactttgccttagcttatggattcctaactcccaaagcaccttccagaatgagcacaggcttctgagggaacggtcattcttgcacacacctgtgccatctgtaccatttcctcccgtggggaagggtgggcacacaggggacaagggtatggtatggctgagatggtttggctgtgtccccacccaaatctcatcttgaattcccacgtgttatgggagggacctggtaggaggtcattgactcatgggggcaggtcttccctgtgctgttcttgtgatagtgaataaatctcacgagatctgatgattttataaaggggagtttccctgtacaagctctcttctcgtctgccgccatgtgagacgtgccttttgccttctgcaattgtgaggcctccccagccacgtggaactgtgagtccattaaacctctttcttttgtaaattgcccggtcttgggtatgtctttctcagcagtgtgaaaatggactaatacaaacagttctcttctctaccctgcatctctgcacttctaagcagcccttggggacagttcaaattcatgctattggctgcacattctgtccaaataggacttcctcccaatccatgtcccaggagtccggaggacttgcagtgtgatatggagggtgcaggaaattcacgggctacactagcttgaaacagactctagagcacttagttcatgatattccactgtgccttgcccagaagccagaaaataaggcccaaagctataaattagggacaatggagagggcagggcattagaggcccagagagagaggtggtgctgagtgtgcaaatcccccatctactttctgttacctgtctgcgcagagggatgctcttggccagcttgtgcacagccatctggctgtggaagtcactcttcttggtaccactcttcatcttgtagacgatgaccgaccccaccatgcaggagatgaggaaggcccctgtgcaatagatgatgatctccaggtacaggggcgaggtcatcactgccggcctctcttccagggctgagtcagtgcgaacagggtgttagcaggcttggagggccccgtccatgcgaggtcccgctccattagaaaagcaacacctgtctcctgtcccctgggaacttttagggagaagaaccatggcaagttctagctaggactgggattgtggcactaggaggatcaggcaaccccctgattttggaggctgccttcaatggacttgagccatggaaaagggatggcctagaaccatcgtgctacacaagccccatcttcattaattcctgagcctccttgctcagctggactggagaggtacaggcacccagggatcctgcaagggccagctgagaagtcacttctatgtgcctttcttggtctcctcagggagccatggcccttctctgcaaagcctcagcactgtgtgcatgcacttaacatgcggggacacagatgtttctgagtcctctgtccctaagaagacacggggtccctgagggcagggttggtgcctcgtttatttctgcaggccacagtacctggtgatggtggcactcacagaatgaggacagaggacaggaggggaaccagcctgtgccttgctcaatgtcccactttgggtctgtgtcatctctgtaggggcacacaggtaaatatttattcctagccaaaccacaggcaaagctgacttaatttccaaaaataagcttttttggtagttctttcaaattctactcataggccccaactcctaaaacttaaggaaatgtggcggcagggggcggagttccattttgttattctcttctcccaccttctgattaggactcaccccccaccccattgccacagcagctaagccagttcggtccacctttcccttcagcacgagaggctgggaggctttcatcccagcacgcacagcactggtttcatggaacacgctttgccccacgggtgtggacggccctcctccttccacaggcctcctcccaaccttcccctttaaaacccaccagccaaccatggaggcggcgcccctgggaaccttcccagagaggcatgaggcatgaggcacgaccctagactgagcccagagaacgtcccaaggcctgacaaggagacagcagagctgatgacagggagaagtgttgctgttttttctttccctgatgttgaggaacgaagacaactgattgggagcacatggggagcacggacaggaccaagacagggacgatgataaaaacagaacgcttctctgcctccagcaggggcatccggagaccctgacgggcaagcagggcagagtgggaaaggaggggagagagaagagggcagtgccagcaggaacagccagacccacatgcaggacattccgagagacagcagcaagccctggccccgcagtcaccagccaccaccctgagcaggctgcaggctccttcctccctggctcaacacgcagacctcccctcttgggagaggagagacggcagcaggcaaacaggatacatggacatcgtgaagcctgctgcggctgcctgagacaggcctttctgaaggcaactcagttcacctgtccaggctgacctccttcttcaaaggcaataggatggcagtacaggagggtgggctgctctttgcaagcagcaagccccacccctgggctgagcacttgagaagggagaagaggtgtagggccctatctgagacttttcagatgctcagtacccagcggaggggggaggctgctggacccaaggacggaaggagcctgccctggaggagtcgggctgcagggtaaacccagatcccgggcatgcattgcaatggccagggggagagcagaggcaggtgtacgggtgggaggcctccgtgcgcctgcaaaactagggaagctcttctctgagctgagaggattcagccctcaaagctggggcaggatgtggcaccaggcaggcaggagcccattcttccagctctcctgcctctgtgtctccccaagcctggaaatgcatgctccccccgtgcccgtggcgagggcaggacatcgagaggagaagttacagtgtgtaccttccagaacggtcaaccatgcagagtgatgggagagtccgatagagttacccgccaagcacgtatactcccctgcgtcctcaaaggagacatttcttaagtgaagcacctccatctctttgtcggtggtattaactccagcagtctagaagagacaacggaagcaaaatggacaagcacaggacatgagacctctaagagacgcagagcaagggaaggagacagaaagaagggggactagaggaagaaatgctccctgacatcttctttgcaacaaggaacaaacgaaaaccaccaggcagcaaaacctgttagaggaagagggtgagaccctgagggaagaactccggcagacctgagaagacgatggctggttacgacccttcaccagatgctggcagccactggcccatccgagcatgcgggcggtgagcggcatggagaaatggggccggcgggcaggggctgtttggtttcaggtaaagatagccagaaggtgaacacaggagggatggcgggggctgcagacacacacatgcacacgcatacacacacgcacatgtgcatacacagccagcagatgcgagtatgcaagggaatgcctaaccccttctctctctttttt

SEQ ID NO: 7595 - DNA, 15123 bp, Homo sapiens
tttcattttctctcaggtcaatttcactgtcttttatttgacagctagcgcagtctttggggaaatttgtgggtgatttgagtagtaacagcaaggacatcactgtaattatgatagtgccttatatttttctagcacctctcccaaggacttatgaagacttttagattcttcatcccttcacacaacattgcttcaaggtagggccaaggcagaaattatcatcactgttttacaaggaaagacactcctgtgcggtctcaaagcaaatgcttttaagagctaaaaattcatttcctagttctgttcaccaaatgatgccttctttaaacataaatacaaattgtaatgttagcaggtgctatttacagagagaaacaaagagaattttacaatagtcgccaacactgcagctgccaaaaaatccctagctcagaaatttaaagcagcaatcccattttccctacagaaatgaaaacatattgaactttcttttgtatttagcagtaatccagcaaaatataagctttaatatagcgactgaggagtggtagtttgagccatgaggtacgggggagccagaatccacttagtgaggacagtgatgaccagcaggtggcagaagtaaattccaagcagccaaaaaaccaaaaacattcggagaattttccccccgttcctgagggacaggatggagtttggacaggaagaactgtaagaagccaagatctgcgacagtcccaacaaatacagtctggtcacatggatacaggaaggacgatctggggaggcataccaacaagaaacgaagccagggacctgaatgcaaaactagcctcaggtgacatgttctcctgcacttagaagcactggcaaaaccatgcccacatagagggggcagacacatgtctgggtttcagtttctgcagaccttcatcatttgttttcctttttgttttctctgttgcccaggctggagtgcaatggcgcaatctcggctcactgcaacctccgcctcccagcttcaagggattctgcctcagcctcctgtggagctgggattacaggcgtgtgccaccatgcctggataatttttgcatttttagtagagatggggtttcactaagttggccaggctggtctcaaactcctgacctgaagtgatctgcccacctcggtgtcccaaagtgctgggattacaggcgtgagcaaccgcgcccttgctttcctcttaatcactgtagctctaccccgtggctattcctaggtaggtgccccctccccagcccaaccccaccggtttccttggaggaaaccatccatggtcgatggctgctgggccttgactctctgcccagcgcctctactgcatggatggggttcctgccctcgaagcagacatcttctttttctgactttccaaaagcagcggagaggcaggaggtgcgtcgtgaggtctgggtgcaggacctaggaagaagaggttacaaggaacctgcgccgggagcatgcggtgccctcgggacagacctagccccagggcccgtgggtgtcccttctttccagtggacattcccacccttttcatacagcccatagataaatgaagcagcagcaatttttattgagggacctaaactgaaaataggtttagaacataatttaaaaaaataaaacagcaaaagtagcaaaaaatatatgacctttttaaaaacattttccttttttttcttttttgtttttaatatatagcaactgatgcctcccagccaccaggagcatcttacccgatgggtaaatctctggtaacgacccttttaaaaagacatgtaaatatatactcagatttatacactttgtgttttcttcatagctatatacagagcccccagtttggggctgggccccagggccacaacactgcccccaacctggccttcgcctcaccatcctctggtaccaggcatttggtcagcaaagcaaactagtatcggaattaataagccactggcaccacctatctggggcagaggtcaccttcaatcgaggcacgaagcactgacctccctactgctgtagccctgaggacaaggcacctgccaccagagtgcgaggggcttatgggtgaaggcaaaacagaccaaaccgacaggagaaagctcaggaagctctcacttgcatgcctgttcattggctcccactccctgccctccaggcagtgcctggtggcagggaggggtgttggtccaacatctgggaggggatgaagtggctggcagcaaagatctgcctctttgcacctctcaccagcaggtggagaggaggtggagggagaggtgagctgagtggggtgaaggcaggccacacaggaaggcccctggtaggcagccggctcctgccagcaggaaaggggacagggacggacaggtggtgggcccagcaggggctgtgggtgagggttacagctgacggtggagtctggggagggcgtgtgggtggcagtcagcggcgtttgagtccgccattggcaagctgggctgggtgtcggggcaggcagggctcctcgggcagcggctcatgagagaagacggaatcctcccctgaggagcacgtagagctccgggtgtcgggaaagctgggggagtactggtccaggggcatggacacgtccaggtactcctgtgatgggcgagaggaagcagcgatgggccgggcccctcctccctgctcagggaggtgcgtgcacgcagtggggacggcctgagctctggctctggcacgggcagccttacctggttggaggtcaaggccacgatgcggtccaggtcttccaccagctgcttgaaggtgggtctctgtgagggcactgcatgccagcagtcccgcatcatcatgtacctgcggcaggactgtaaggtcagggacgtctcctggagatggatactctctagtctagccccctgcccctcaagcccactcttgccccaaggcctggctcagggcctccgacatctcctcgggcttacagctcgttggtgcagttactgggcttgtccatgcggtgaccctccttcagcagcttgaaaagttcctccacaggcacaccggggtatggggagccgcccagagtgaagatctcccacaggagcaccccgaaagaccacctgcaaatgggcggagagccacagggtgttagagcttctccgcctcccctcccccagcacaaatcctctacccagggcagtgccaggagacagcatggagaacagatcagcctttcaacatctggagcagagggaatggccacagacaatgttttgtttttctctctggggcagaaagaggactcctcagtccagggagaaagcaggactctacagtgctagaagctctctatcccacacctccctggcaattgctattacaaactcacacatcactctggtgggtgtagatccggtcaaataatgcctcgggtgccatccacttcacaggcagtcggccctgaaagcagcacaggggaggttggagtggccccaggcagggccatgagggcacaagtgggaagggactggggggtgggttctcagcccaccccactccttgcttctcagatgaaaccaccagcacagggcggccttgtcggcactcacgttggttgtctttttatagtagtcgatgtggtgaatgtcccgtgcgaggccaaagtctgctatcttcatcacattgtcctctgtcaccaggacattcctggctgccaggtctcggtgtatgcactgaggaaggaggaagggagagcgggaggcggggaggtgagggagctggaaggctctgggcggccgccacccatgcaactagccgacttgtctcatagaacttctgccacactgctctgccccccgaacctttgctttccctcttctaacattctctgccagctccaggcttctcatcacagcaagcgctcctcccttccttccccaaagactggccccttatgcctctgctgcgtctgcagcgatgcatgctcctaggtcctgcctcccagcacagcaagtccacatggggctgggctcaaaccaggccagcccttacacaccaaacactgcactcaacactcacagacagtttcattttatcttcataacaattctacaacaggtattgttacactttattttcttttgagacagggccttgctctgtcgccccggctggggtgcagtggtgtgatcatggctcagtgcagcctcaaactcttgggctcaagctagcctcccacctcagcctcccgagtagctgggactatcggcacgcactaccacacccagctaattttttaattttttttttttttttaaagacggggtttcaatatattgcccaacctggtctcacactcctgagctcaagcaatcctcccgccttggccactgcacccagctgatattattattattttgtatttgaagaattttaagatgctaagtagctgcctgaggctacgcagaaagtggcagtgcacagatcggaccctgcatcagtctgaccccaaggccacctggctacactggtgctcctgactctgcagttcccagagagcctaagacaacacacagggcacacagggccagtgctcagtgcatccacaacgccaccacaagatgataagtcacaggctggaagactaggggggctctgttcccaccctggcattacccaggggagccttcaggttccacaccttcttggaggccagatactccatgcctcgggccacctggtaggcgcaggacaccaggtccttggaggagagctgctcctctgggttgtggctggggttgtagcagtattccagccctgggggcctccgggcctgcaggtactcccgcaggttgcccttggaggcatactccacgatgacatacaagggacctgcaggcacaggagaagaggccatggggccagcagcaggtgagcaggtttggcttcacctcaaagaaaccccacccccagcagcacaccccggccaacctcccatctcctgcctcctcttaggggacctgggaaatccattctactacccaaaaaaaatcagagaaataattactcccagcatagtccagaaaattcccgagcaacattggggtaagagccccagtttgtctgtttattttgagatggagtctcactctgttgcccaggctggagtgcagtggcgcaatttcggctcactgcaacctctgccttctggattcaagtgattctcctgcctcagcctcccaagcagctgggattacaggcatgaacaatgcctggctaatttttttttttttttttttttttttttgagatggagttttgctcgttgcccaagctggagtgcaatggcgcgatctcggctaaccgcaacctccgcctcccgtgttcaaacgattctcctgccacagcctcccgagtagctggaattacaggcatgcgccaccacgcccggctactttttgtatttttagtagagatggggtttcacctgttggccaggctggtctccaactcctgacctcaagtgatccacccgcctcaccctcccaaggtgctgggattacaggcgtgagccactgtgcctggcctatttatttattttatttttgagacagcgggagtatctcccaagctggagtacaatggcgtgatcttggctcactgcaacctccacctcccgggttcaagcaagtcttatgcgtcagcctcctgagtagctgggattataggcatgcgtgaccatgcctggctaacttttgtattttttagtagagatggggtttcaccattttgaccagactggtctcgaactcctgatctcaagtgatcttcctgcctcggcctcccaaattgctgggattacaggcatgagccactgcacccagcctgagcgctcttagaccataattactcagctgcctctgttaacacaccacgtgtgtgaatctaggtatctgtattcctgaatgaacaccaatgagcggagcccagatcccgagataacacattttaaacctctgccaaagcagcctctcttaacccccttccctagctgtggctgagagaggccttgggactgataccccagctcagatcttctccccgctgggcagggaaagccagtctggccggcacccaccatcctgcgtgcaggcccccagcaggttgatgatattcttatgcttcccgatcatcttcatcatctccatttctgagatcaggtctgacaagtctttctctgttgcgtccgctttaaagaacacgttgagactcatttacttgggaagggaggagggcaggataaaggctaagggagtggggtatgtgtcgaggggctgcttttccctgggacttgattctctcctccccacttcatccaaacttgttttctcttccctctcatgggagccgttgttgcaataggtggtagtgagtgggcagggatgtggtgaggaaagcctgcaagcgatggatccaggataaacacctgaccacagcccaggttgacgccaaggaacagagtgacgtcatagaacaatctcaaggtgcagaacaccccctccactcccaggtaaccccaagcaggcagcggagcaggtgtgggcagcaaaggcaccagagaagctgttctgctgggcccgaggcctgctgtttgcttggaatgggacaagattttctttgcaaggacagaagcatcacttacacttcaacatcttcacagccactttggtcacacggttgggtttgtccttgtccagcccgatagcctctgccaacaccacctgcccaaagcagccctctcccaggggtttgcctaagaccagtctttcgggggaaacagagagtggcataagttggggctggtgaagttcaaaccttgagaggcaccccatctccacctctctgtatttcacccaactgcgagcagaaagtggaatgaatgtttctgcaggcatttcatgaaccttcaccgcccagaaggtgttagtatacacaccttccaccactagaatagcaagcaaggaatgccttcaaaaagttgggagtcaaagtattattacctgtcccgaggcagctcccagcgagggtcttcgggaagctcatactcagagacccctgctagcatgggagtcccactggaggagagccgtgatggccgaaccagaagaaccccagagttcatggatgcactggagtcagcagacacctgcaaggaagagtggggtcaccctagagcaaggaggggggacggggtgactccttcccattcttagtcagggcttcccaacaatggcagaggcacatgtctgtgtatctgatgttctttcctcaacacagagtggtccaaagaccatggtaggccaggaggcccaacttctaggactgacctatttctgccacaagctggcctttctggacttcactcacctttaaaataagcagaccaaatgcacctcttccagcttgacattttataactgatcattgcagtaacaactctgttctcctgactctttgcaaatactttgccttagcttatggattcctaactcccaaagcaccttccagaatgagcacaggcttctgagggaacggtcattcttgcacacacctgtgccatctgtaccatttcctcccgtggggaagggtgggcacacaggggacaagggtatggtatggctgagatggtttggctgtgtccccacccaaatctcatcttgaattcccacgtgttatgggagggacctggtaggaggtcattgactcatgggggcaggtcttccctgtgctgttcttgtgatagtgaataaatctcacgagatctgatgattttataaaggggagtttccctgtacaagctctcttctcgtctgccgccatgtgagacgtgccttttgccttctgcaattgtgaggcctccccagccacgtggaactgtgagtccattaaacctctttcttttgtaaattgcccggtcttgggtatgtctttctcagcagtgtgaaaatggactaatacaaacagttctcttctctaccctgcatctctgcacttctaagcagcccttggggacagttcaaattcatgctattggctgcacattctgtccaaataggacttcctcccaatccatgtcccaggagtccggaggacttgcagtgtgatatggagggtgcaggaaattcacgggctacactagcttgaaacagactctagagcacttagttcatgatattccactgtgccttgcccagaagccagaaaataaggcccaaagctataaattagggacaatggagagggcagggcattagaggcccagagagagaggtggtgctgagtgtgcaaatcccccatctactttctgttacctgtctgcgcagagggatgctcttggccagcttgtgcacagccatctggctgtggaagtcactcttcttggtaccactcttcatcttgtagacgatgaccgaccccaccatgcaggagatgaggaaggcccctgtgcaatagatgatgatctccaggtacaggggcgaggtcatcactgccggcctctcttccagggctgagtcagtgcgaacagggtgttagcaggcttggagggccccgtccatgcgaggtcccgctccattagaaaagcaacacctgtctcctgtcccctgggaacttttagggagaagaaccatggcaagttctagctaggactgggattgtggcactaggaggatcaggcaaccccctgattttggaggctgccttcaatggacttgagccatggaaaagggatggcctagaaccatcgtgctacacaagccccatcttcattaattcctgagcctccttgctcagctggactggagaggtacaggcacccagggatcctgcaagggccagctgagaagtcacttctatgtgcctttcttggtctcctcagggagccatggcccttctctgcaaagcctcagcactgtgtgcatgcacttaacatgcggggacacagatgtttctgagtcctctgtccctaagaagacacggggtccctgagggcagggttggtgcctcgtttatttctgcaggccacagtacctggtgatggtggcactcacagaatgaggacagaggacaggaggggaaccagcctgtgccttgctcaatgtcccactttgggtctgtgtcatctctgtaggggcacacaggtaaatatttattcctagccaaaccacaggcaaagctgacttaatttccaaaaataagcttttttggtagttctttcaaattctactcataggccccaactcctaaaacttaaggaaatgtggcggcagggggcggagttccattttgttattctcttctcccaccttctgattaggactcaccccccaccccattgccacagcagctaagccagttcggtccacctttcccttcagcacgagaggctgggaggctttcatcccagcacgcacagcactggtttcatggaacacgctttgccccacgggtgtggacggccctcctccttccacaggcctcctcccaaccttcccctttaaaacccaccagccaaccatggaggcggcgcccctgggaaccttcccagagaggcatgaggcatgaggcacgaccctagactgagcccagagaacgtcccaaggcctgacaaggagacagcagagctgatgacagggagaagtgttgctgttttttctttccctgatgttgaggaacgaagacaactgattgggagcacatggggagcacggacaggaccaagacagggacgatgataaaaacagaacgcttctctgcctccagcaggggcatccggagaccctgacgggcaagcagggcagagtgggaaaggaggggagagagaagagggcagtgccagcaggaacagccagacccacatgcaggacattccgagagacagcagcaagccctggccccgcagtcaccagccaccaccctgagcaggctgcaggctccttcctccctggctcaacacgcagacctcccctcttgggagaggagagacggcagcaggcaaacaggatacatggacatcgtgaagcctgctgcggctgcctgagacaggcctttctgaaggcaactcagttcacctgtccaggctgacctccttcttcaaaggcaataggatggcagtacaggagggtgggctgctctttgcaagcagcaagccccacccctgggctgagcacttgagaagggagaagaggtgtagggccctatctgagacttttcagatgctcagtacccagcggaggggggaggctgctggacccaaggacggaaggagcctgccctggaggagtcgggctgcagggtaaacccagatcccgggcatgcattgcaatggccagggggagagcagaggcaggtgtacgggtgggaggcctccgtgcgcctgcaaaactagggaagctcttctctgagctgagaggattcagccctcaaagctggggcaggatgtggcaccaggcaggcaggagcccattcttccagctctcctgcctctgtgtctccccaagcctggaaatgcatgctccccccgtgcccgtggcgagggcaggacatcgagaggagaagttacagtgtgtaccttccagaacggtcaaccatgcagagtgatgggagagtccgatagagttacccgccaagcacgtatactcccctgcgtcctcaaaggagacatttcttaagtgaagcacctccatctctttgtcggtggtattaactccagcagtctagaagagacaacggaagcaaaatggacaagcacaggacatgagacctctaagagacgcagagcaagggaaggagacagaaagaagggggactagaggaagaaatgctccctgacatcttctttgcaacaaggaacaaacgaaaaccaccaggcagcaaaacctgttagaggaagagggtgagaccctgagggaagaactccggcagacctgagaagacgatggctggttacgacccttcaccagatgctggcagccactggcccatccgagcatgcgggcggtgagcggcatggagaaatggggccggcgggcaggggctgtttggtttcaggtaaagatagccagaaggtgaacacaggagggatggcgggggctgcagacacacacatgcacacgcatacacacacgcacatgtgcatacacagccagcagatgcgagtatgcaagggaatgcctaaccccttctctctcttttttaagagatggggtaccattctgtcaacccaggctggggtgcagtggcataaacatagctcactgcagcctcgacctaagctcaggcaatcctcctgcctcagccttcagactagctgggactacaggcacacgccaccatacttggctaatttatttaatttgtagagatggggtcttgctatgttgcccaggctggtctcaaactcctggcttcaagcgatcctcccacctcagcctcccaaagtgctgggatgacaggcgtgagccactgtgcctggcctatggccccttctcttaatcaccactcactcacaacttcagtctgaagtaccatttgtaacacagcaaaaccgtgtccccgtgagtcctcacatggatccacacaaagccaaggaacacacagaaggcagagagggaacccacagacaccaacacaataccaaaccaaaccagcctcccaggccgggtatttttccatggctctgggcactagaaatacagtagggtggcaaggacagtccagtactggcttccccgcctgccccagcagcttggggcctacatcaaatccccagcacagggtcccatccatctccccattaccttttgccacaggtctggtgacagtgagccacgcagactggttagcttcaccaatataattggaaaccttacacacatactccccgctctgggcctctgtcacattgaacagggtcagcacctccgcatccgagctattaatccccgaatgctggaacaaaccaacgacacaccagtcagttgggcaaagctgagatgtggccacgcacgttgctcccgtgtaactttcaggcaggcccagggagcgaagggagatgttaagtgagatttattacctttcccttccagtttttttttttttttttttttttaacgcagagtctcactcactctgtcacccaggctggagtgcagtggcgtgatctcagctcactgcaacctctgccttctgggttcaagcagttagcttgcctcagcctcctgagtagctgggactacaggtgccaaccactatgcacagctaatttttgtatttttagtagagatggggtttcaccatgttggccgggctggtctcaaactcctgacctcaagtgatctaaagtgctgggattacaggcgtgagccactgcgcccggccttctttcccttttacaagtacagaacaagtggacttcaaaagtccaaagcatttgattaaaaaaaaaaaaaaaaaaaaagaatcactgcttcaaatggaatgttctatttgtgtttaacccactccctccaggactggagcaggggttgtgagtggagacagtggccaatgacctacagagcagttttagcaccagcagcaaagagaagagaagggagggccagtatatctctgagacagctaagctaggggaggatgaggtctaactctgggacaaagaggtaaacaactttcccagcttctggttccttcctgttgcgagatccactggagatttaggcaattaccttccctggattaatggagcattcagggacaatgaatgtctgggagtgagaggaaaaaggaagaaaatgccattactcctcgtcctcatatggcttagaatttatatatggcatttgtttttccaactcttcgtaagagatgctcttatcatgcaccccatttgccagaaagatcgtacgtaactcaggacacagggctaagactgggaaacgcttggtggaaaggctctggtttcgggcaatgaaaaggcaggggtccaaatgccttccttgtgtagctgaccccaaagccccagtgacgttgctctcaaagcttattacagaccagcaccacccatccctgcagccctctgttcccagctcacctccactttgtgacctctgttactagtcctgggggatgtggctagatccctactgagatggagtgtgtgtgcctgaagcgtgaggaatgatcccattcgggggcaactgagcctgcccacaggaacttgagcccccgagacagtggtctccttcccagtagactggcccacgaagactggtgccatgattaccttcaagatctggacataaggcaggttgtctgggccaatcttgctcccattcacctcgatgtgctttagccactggatgtgcggctgcgggtcactgtacaccttacacatgaactccacgttgctacccagggccactgttttgttggcgggcaaccctgcttgcaggatgggccggtgaggggaccgctctgtggaagatgggagaggaggcacttgtcatggggaccttgccatggctaaagaggggtgggctcacctgcgccctacttggctttcccagtgatgggttgtaaacctcccagcacttctgctgagcccaagcctctcaaaacagagctggggaaagggacaccctctcttcaggccctaagccatcaggatcctcctccccaaggcagtcatcatatttacagtcacagtaagtcgctcatgctttaatggagaaccttctaattcagttgcacccccagacctcagcacaacctgctcctccttaaaaaaccagagtcactttgactcctgctattcaaagtgtggtccacgagcagtgctaccagcatcccctaggagcttgttagaaacgcggaatctcagatcttaccccaacctcttggatcagaatctcctttttaccttttttttttttaaaggcagggtctcactctgtcacccatgctggagcacaagggtgtcatcatagctcactgcagcttcgaattcctgggctcaagtgatcttcccacctcagtagcctcagttaactcagctggtactacaagtacatgacactgcactaggctaatttttaaatttttttatagagacagggtctcactgtgttgcccagctggtctcacactcctggcctcaagcaatcctccagccttggcctcctaaagtgatgggatcacaggcgtgagtaatcccatcatgccacctggagctcataagccactgctcctggccacaatctccttcttagaccatatcatcataatcaagaagaacactggctgagagattctgtacccaatgatctctagggagtgagtttcagaactcctagaaggaaaaggttgcggtaatagctccaagaggctcaatgttcttcccagagtctcctgtgatgccctgaagttggcacaggtgtgcagttctgcattagcaaggtgtctgacctctctgagcctatgcgcctgtgctcctgtgcagggctagactaatactgcccaccttgcaggtgtgccatgagcattacagggcaggtatttaaggagcctggcatcttgctagcattaagcgacagctcctattacgctacatttaacacctctccaacaacgcctccttcaggacagactctgaacagcaccttcaatttcacagtgacaaccagctttgaccgtgttactgtctgatcttaactctattttacagataagaaaagtgaggctcaaaagggagaagtgacctgctcaaggtgacaaagccaagaagtgccaatcgctatcctgactctgcccctaagaaacctggacaccccggctgtgttctccaagcctggctcttcccactaaactcattcctcctgctgcctctgccctcttacccacgacatccagctggtatgtgtggttgatgctgccgtactcattctccacaatgcaggtgtagttgcccttgtcagagggcaccacagagtccattatgatgctccaggtggcataacggacctg

SEQ ID NO: 7596 - DNA, 367 bp, Homo sapiens
ctgtgtagtgctgtgttcatgtctgttagagcacttaactcactgtattgtaattacttatgtctgttttctagttaaactgtaagccacattaggtagagtccatttcctagttttctttgtttgtaaagaaaaacccagggccactcaaggagttagctcaactggcagactggatagtttgcaccaggttgagatcgtatctcattcttgtctgggcgctgtggctcaagcctgtaatcccagcattttgggaggccgagacaggcagatcacttgaggtcaggagttcaagaccagcctggccaacatggtgaaaacccctactctactaaaaataaaaaatcagcggggtgtggtggcgtgt

SEQ ID NO: 7597 - DNA, 367 bp, Homo sapiens; identical to SEQ ID NO: 7596

SEQ ID NO: 7598 - DNA, 375 bp, Homo sapiens
caaagagacctggcccgggagacggaaggtgtgggttctaacgcagagcctttccccagcacctgaaacagctcatgcaccgcgtttcctgaagcccaaatgaatctgctgcctcgaaagttctgtggtctttgctcctgtccaatttccagtgactcaatgcacatcagcttaaattagctaacttctccttgcttctgtgccacacacaaaaattaatcatggcatcaggtatcttgatgcactgaaagagtattacatttaaacagacgggcagcgaatccatgaatcatcctgagcttcacatacccaccctccatttcacatgtgtcgttttcatatagtgcagccgctctgcccactgggagagaggac

SEQ ID NO: 7599 - DNA, 256 bp, Homo sapiens
cttcatagtaaatttgctgctgctcactctttcggtcttcaccactcttaagagctgtaacactcaccacgagggtccgcggcttcattcttgtaagtcagtgagaccatgaacccactggaaggaacaaactttggacacaatattatcatgtttcatctattctaagatgcgtaatttttcacattttagcagatctggaaccacagcatgtcacacaatcaacagttttagatttaataaaaaatagtataaa

SEQ ID NO: 7600 - DNA, 256 bp, Homo sapiens; identical to SEQ ID NO: 7599

SEQ ID NO: 7601 - DNA, 95 bp, Homo sapiens
tttttttttttttttttttttttttttttgtatttttagtagagacaggtttcaccatgttagccaggatggtctccatctcctgacctcgtgat

SEQ ID NO: 7602 - DNA, 780 bp, Homo sapiens
ctctggaggggcggggccggcgcagccgcttccgggaggtgcagaagttgtccgatcactcgcctctcgccggacgtgggcaacccgaatgcggtgggactgcatttctcctcatccttccattggctccccacggaccccccagaaactcctgacctctaccgtgcaattcacgggagctgcccgggcacggaaagcaaaatcagcttggagaaacacttctcaagcctgcaagacccggtggcacgttcattcttgcattgattggttcgtaccctgtgtactgagcgcttagccctgtactccggctccttttgaggccctgtacttaagctcaatagtaccaacaacagctgagagtttgcggtctagtggggaaggaaaatgcagaaccaaccaactaggtgtgatactatgtggttaagtgacatgcagaagacgtccccagaacagcataaaaggaacatttggttaggcctggggtcagcttcacagaggtaacaacggacggtgaacagctcaagcaaaggtccaacagcatgatccaagcctttgtcaatgttttgtaatctcgtttacttgcctgtaattcaagagggaaccatgtcttcttaaaccctgaagccacaattggcaggcctcaaggatatttgcagaatgatggtgtcttagggttcttcagagaaaccaaccaataggatatatagagatatataaatttattattattacaagggactggccacgagattatggatgctgagaagtcccacgatctgc

SEQ ID NO: 7603 - DNA, 246 bp, Homo sapiens
ggtcccagagcgggctccagctcggccgcggcggcgtcgcccgtcaggctcaggctctccccgctcagctcggccaccactcggacccagcgctccctcaggagcagctccaccagccccgctttggtggcccgcgtccacaccgccatggccggccccgctccagccgccgcagtcgccgcagctaccctcattccagtcaggcagcctcggcgcttccctcttcccgcccggaggggcgggccc

SEQ ID NO: 7604 - DNA, 270 bp, Homo sapiens
gcactttgagaggctgaggtgggcggatcacctgaggtcacgagtttgagacaagcctgaccaacatggagaaaccccatctctactaaaaatacaaaaaattagccgggcgtggtggcacatgcctgtaatcccagctacttgggaggctgaggcaggagaattgcttgaacctgggaggcagagattgcggtgagctgagatggcaccattgcactccagcctgggcaacaagagcaaaactctgcctcaaaaaaaaaaaaaaaaaaa

SEQ ID NO: 7605 - DNA, 1332 bp, Homo sapiens
ccaactacagcctttggaaacaagactgagaaaaatacagtagaagagttacagttacagaaaggcttctggtaactttctctccaacaggcataaatttaaacacacgcacaaagaaacagatgttcctcaaagggcagactgggggtaaaaaacatttccaaccctctcccctcttcccaagttgcaaaagtaaatccttgtccagagttcacaaagatactaaggcacttgagagagagcagggatggaggaggagggaagaaagaaaggatagtagagagagcagtggaggaaacgcaggtgaagtatggaaactagttcactgcaatcatataaatgacccattgttaggaaggataaaccccttattggaaataacctctccaatcatttattttccaagtggtaggaggctgccttgaaatgggattgtctctgcgcaaaggaggctcctgtcatgctctctgctatccatattcttcctggcacagagcccagccttgcatttactgtgttttatttgcagaaacgttaccttgccagctttagtgaaatcctcttagatatataaattacgtcaataaggtttcacttatatgtacatctcaaatagctctcattttggaggttacttaatagggagatcttattaatatgatttagattttaatacccaaagcagtgaagataggactgggattcataagcgacaacaccataactctgtagttcttaccaaaactaactttattaactggcatttttcaacattttttcttctctggtttttgacctgctggtcacttctgtgcagatttttcttatgtgcatataatcctaaattgaatcatgttgctgaagtgagtgtccaagtgaattcttacatcaaatttccaagccagatttgactggaaggcctaaagccttgggaaatagctcgatgggaatttaatccaaagaagggaaagagcccatattattttccattcacttcccaacagaattgggtgtctacgctgctcagagaggaggagatggagatattttagtcagaggctgccagttactgtctccaagacaagctactgcagttggtttccactggatttgtatcaagcacttgtccaagaggccagactccaactaacagttagcaagtcagcgatcttccatacactctccacgggggttgttgtggtaacaaggagaaacgtgaacttggccagtcttaacgtcctatttcctactgaccatatacttaaaaagcagaattcaagaatagccaagaaaaaacactcccctaatttctttcaagtgtgtaagacagct

SEQ ID NO: 7606 - DNA, 1332 bp, Homo sapiens; identical to SEQ ID NO: 7605

SEQ ID NO: 7607 - DNA, 457 bp, Homo sapiens
cttaaacgcgaaaattctttcctattgtgcttgctaaatccggaagcgcttgtagctttgacagcttgaaccacaccatccccttcagagctgcagagaacttcagatctcctctgccccgccccctctggctattgagaactattgtacacccaagcttccttatgattggataaagcttttgtcaatctcccaagttgtcccattgattagaggatcaaatcgtcaattattctccgggtccagacatttcttttcgggttaggttgactgctgaggccagacgtcttttacagaacagagcacgtacaggatttccccccacccctttctggaaccgagcaagcgctaggaggaaaaaaaaatctgtcaagctcagcaattttttcaaatcccgaaaaaaaaaaaaaagaaaaagaaaacccggtctctgatgcacatagcaaaaacaccatca

SEQ ID NO: 7608 - DNA, 457 bp, Homo sapiens; identical to SEQ ID NO: 7607

SEQ ID NO: 7609 - DNA, 263 bp, Homo sapiens
aaaaagtctgcctatctgaataatcatggcagtggtgtttttttcttgctctatttctttatatattgattaaatataaatcacatgttcactacccaaaaaaccccaattgtccttaaactctagcaaccagaaataactaatgtaaccagaaatatatcctacaatatttccttataggtacataaaatgggatcatcctttctgtgttgttttatatcatgctgttttccagttaatacaacacgactgtctttccatgt

SEQ ID NO: 7610 - DNA, 263 bp, Homo sapiens
aaaaagtctgcctatctgaataatcatggcagtggtgtttttttcttgctctatttctttatatattgattaaatataaatcacatgttcactacccaaaaaaccccaattgtccttaaactctagcagccagaaatatctaatgtaaccagaaatatatcctacaatatttccttataggtacataaaatgggatcatcctttgtgtgttgttttatatcatgctgttttccagttaatacaacacgactgtctttccatgt

SEQ ID NO: 7611 - DNA, 445 bp, Homo sapiens
aaaaaaacaacctgttaacctagatttctatggccagcagaaatagccttcaaaaataatggcaaaataaagactttttggacatatcaaaaagggaaagaatttgtttccagcagacctggactcaaaaaacattaaaacatacacattaacaagatgtgggttttacagcatatatgtgattatacaaccatgaaagaacaaaaaggaggagatggaattatactgtcacacatttcttactctgtgaaaggagactgtagtaacttctggatgcatatgtaatctctagaacaagcactaaaaacacaaacagggataccataaagtcagtacatctgcccaagagggattaactgctacgagaatcattctcctactgtaaacagctagaaaacaggacaaaaatacatgaaacaactgttttcagacattggacaacagg

SEQ ID NO: 7612 - DNA, 445 bp, Homo sapiens
aaaaaaacaacctgttaacctagatttctatggccagcagaaatagccttcaaaaataatggcaaaataaagacttttgggacatatcaagaagggaaagaatttgtttccagcagacctggactcaaaaaacattaaaacatacacattaacaagatgtgggttttacagcatatatgtgattatacaaccatgaaagaacaaaaaggaggagatggaattatactgtcatatatttcttactctgtgaaaggagactgtagtaacttctggatgcatatgtaatctctagaacaagcactaaaaacacaaacagggataccataaagtcagtacatctgcctaagagggattaactgctacaagaatcattctcctacagtaaacagctagaaaacaggacaaaaatacatgaaacaactgttttcagacattggacaacagg

SEQ ID NO: 7613 - DNA, 328 bp, Homo sapiens
tgaagatggaagagatcttaaaagcaacaggagagcaacaggagaataaaagacacattagttatgtgagaatggcaacatgggttatggctattccatgttttagggccagaaaaaaatggagtcttagctgagcatggtggcacatgcttgaacccaggagttcgagtccagcctgggtaaagtagtgagaccccatctctatttaaaaaagaaaagaagtccaggcacggtggctcacacctgtaatctcagaactttgggaggtgggcagatcacaaggtcaagaggtcgagaccatcctggccaacatggtgaaactgcgtct

SEQ ID NO: 7614 - DNA, 371 bp, Homo sapiens
cccggagtttgagaccagcctgggcaacatagtgatacccctatgtctacaaagattaaaaaatagaaatataaaaagttagctaggcatggtggcacttgtctgtaatcccacttacttgggaggctgaggtgggaggattgcttgaactcacgaggtcaaggctgcggtaagccataattgtattccacccagggtgataaagcatgacgggagatcctgtctcaaaacaaaacaaaaccaaaaaaaggcgaggcacagtgactcacacttgtaatcccagcattttgggaggtcaaggtaggatgatcgcttgagcccagaaattggagacaagcctgggcaacatagtgagaccctgtctctcaaaa

SEQ ID NO: 7615 - DNA, 861 bp, Homo sapiens
gcagaaatgaattcattacatgggcttaacagtttatggacatagcagaagaaagaatcagtgaatatgaagacagattggaaagagaaaagacagaaaaagtcagggaggggtagaaaagagattttagatctgtgggataatatcagatggtctaacatatatgtaattggagtttcagaaggagagaagagaatgtggcagaagacatatttgaagagacaatgctcaggaacttctaaaattgatgaggtcatcaattcacaaatggaagaagttcagcaaatcccaagcaagttaaatacaaaacaaaaataagccaacaaatttaaaaatcccatatataggcatatcataatcaaactgctgaaaattgaagatggaagagatcttacaagcaacaggagagcaacaggagaataaaggcacattagttatgtgagaatggcaacatgggttatggctaatccatgttttcagaccagaaaaaaatggagtcttagctgagcatggtggcacatacttgaacccaggagttcgagtccagcctgggtaaagtagtgagaccccatctctatttaaaaaagaaaagaagtccaggcatggtggctcacacctgtaatctcagaactttgggaggtgggcagatcacaaggtcaagaggtcgagaccatcctggccaacatggtaaaaccgcgtctctactaaaaatacaaaaattagccgggtgtggcggtgcacacctgtagtcccagctactcgggaggctgaggcaggagaatcacttgaacccaggaggtggaggttgcagtgagctgagatcacacgccactgcactccagcctgtcgacagagcgagac

SEQ ID NO: 7616 - DNA, 371 bp, Homo sapiens
cctggagtttgagaccagcctgggcaacatagtgatacccctatctttacaaagattaaaaaatagaaatataaaaagttagccaggcatggtggcacttgtctgtaatcccacttacttgggaggctgaggtgggaggattgtttgagctcaggaggtcaaggctgcggtaagccataattgtattccacccagggtgataaagcatgacgggagatcctgtctcaaaacaaaacaaaaccaaaaaaaggcgaggcacagtgactcacacttgtaatcccagcattttgggaggtcaaggtaggatgatcgcttgagcccagaaattggagacaagcctgggcaacatagtgagaccctgtctctcaaaa

SEQ ID NO: 7617 - DNA, 1487 bp, Homo sapiens
cttgaatccagtgggattgagaactttctaagagtggtgcggctcttgacaacatgtgggctccaccagcagcaatcatgggggatgggcccaccaagaaggtgggcaaccaggcccccctgcagacacaggccctccagactgcctctttaagggatggcccggcgaagcgggccgtgtgggtccgccatacgagttcagagccacaagaacctactgaatcaaaggcagccaaggagaggcccaagcaggaggtgaccaaagcagtggtcgtggacctgggcactggctactgtaaatgtggctttgccggcctgccaagacccacccacaagatctcaacaacggtgggcaagccctacatggagaccgccaagactggggataatcgcaaggagacattcgtggggcaggaactcaacaacacaaacgttcatctcaagctggttaaccctctgcgacatggcatcatcgtggactgggatacagtgcaggatatctgggaatatctcttccgacaagagatgaagatcgccccggaggagcatgcggtcttggtttcagacccgccactgagcccacacaccaacagagagaaatatgctgaaatgctgtttgaagccttcaacacccctgcaatgcacatcgcctaccagtcgcgcctgtccatgtactcctatggaaggacctccggcctggtggtggaggtgggccatggcgtgtcctacgtggtccccatctacgagggttatcctttgcccagcatcaccggaaggctggactacgcgggctctgacctgacagcctacctgctgggcctgctgaacagtgcggggaacgaattcacccaggaccagatgggcatcgtggaggacatcaagaagaaatgctgctttgtggccctggatcccattgaggagaagaaagtccctctcagtgagcatacgatccgctacgtgctgccggatgggaaggagattcagctgtgccaggaacggttcctctgctcggagatgttcttcaagccatctctcatcaagtccatgcagctgggcctccacacccaaaccgtgtcctgccttaacaagtgtgacatcgccctcaaacgggacctcatggggaacatcctgctctgcgggggcagcacgatgctcagtggcttccctaaccgtctgcagaaggagctaagcagcatgtgtcccaatgacaccccgcaggtaaacgtgctgcctgaaagagacagtgccgtgtggaccggtggctccatcctggcctcacttcagggtttccaaccattgtgggtccaccgctttgagtacgaggaacacgggcctttcttcctctacagaaggtgcttctgaacagcgacgaggatggacactgcactggcagtgcctaccctcgacagggtgagcgcactcctacacacagggggtggagccggcgcttattcctgtagcattaaacacccctcatatgcccctcca

SEQ ID NO: 7618 - DNA, 112 bp, Homo sapiens
attttattattcacactctggaatgaatattcagattttgctatttagtatttataattctggttggtagtagtatcactatataaaaacctccatgaaaaaatgtctaaaa

SEQ ID NO: 7619 - DNA, 32249 bp, Homo sapiens
tgtggacagagtaaaaaagtttattaacattctgagaaggacagaaattttcaagaatcatcattagtgttaacaaagcttgatgaaaaaattcggatgcaaggagggtcaatgagttattgggtggtctttcaaataagcaaacctcaagcaataataccaaagtgttttaaaagagcgtttaaaatgaattttattctttgaattttacaggtagtctttagaggcttcaaacaagaactctgttgcaaaactctaataaatagcttgccccaagtccccaaacaaaatgtaaaacaaaatgagaactaaactcagaaggataagcaagacttcagaatgcttggatgttagcaatatttctcatttacaaagagatatcaggcaatgtacaatctccttcatacaagtcaaagagagaaagagacagacaattgaaatcttcacaaagcactccgaaatcttcctatttccatgatagaaatgtcaccagaaaaaaaaaattccatggagaaatcacaatcaagaatgaaactgtagcataaaaatctggtagtgaatgtagcagggagaagagaggaaaatccatcctgtttctttcagggatggagagaggaaggaattgagattacttgggtgagggaacttccaatcagatgccgctagagtgctgaatgttcccttagaccagagttgccactgaaagggcagaggggtcggtttagtgacagttatgaaggcaacaaacaaaggggtctcctcaggtcagtcaacactggccagccccatgtctctgtgctctacagcagccttggaagagtgacccaggggcccaaagcagcctgcatcacaagacagcaaaaatagcacatcaataatttctgcagcggaatcctttggatggccatgaaaggatgcagaaaatgccgtgctgaaatttcacactgggacatgcaggtttcaaaagcccattctagtatcacagtcattattcctaacaagcaatgattaaaattcacaattaaacattcactgttagcttctcctagttacaaatactggtgaagtcttgctctggagagaaagattaatttagagatatggtcattttcagcaagctaaaaaaaccagttgtgccacatttttatctttaaaaatctttaaaacgtatacttttgaccaaaatgcattcaaaatgcagacagataaggttttagtttgggggaattctgaaatcaattaatgtttggagccaggaagctgtaagagagattgattccaatttagtggggctcaattaagccaaacaaaaaagagtcttgcagcacaagtgggaccatcttcctggggaaagggagaagcaggaaatgacctcacaatgcaggactgagaaggggtgtggcctgcaggcactgtcagagctgctctggtttacagacttgctgttaaatatttaactccggtcctgctgatctctggaggacaggtacagacagcactagctcatgcacgagtcattcaagggaggtaggcattttctcaaagcaactccctctccaggcattttagggaagaaggtaaggaaatatccctctctactccccaaacaagttataaaaacattctttttctaggaataatgatatttgttagaataacaagggaaagcttgggttacctgaagttgataagaaagctgatgggaatagaggcggatgggccagggggcgccctggtccaaggcccagtttcttcttaaatacataacagataaagatattgtgcaaaaaaataaagacattcacattttagcagttaaacttttattttactgtttaaaatttttatttactttttttgtttttcttttctacaaaaggcaggtgatgattgttgatctgcaactattgtgttgtgcactccccgaaagggggcagagtaggaagccagggaaggtgctctgaggatgctttctatggagggaataagggctgcaggacactcactggagggagtgtctgggcccttctcctgtcctcctcagccttccctagctcatgtctatggtgttgaagacccattctgtgaacttcttcagcttgtccgaggcgttctgggactcctcctgtagcctcaggttgtcctctcgcaggtgctgcacctccgcctgaaggtgagctttgtcttctttttcctgggaggcagagtgaagtagaaaagctaagaggtgttggccccaccttgcccagctcttctgagtaatagctatggacccgttttgatcttttgtccatttctattcttcgttcctccaaacacctgtctaaacggactggtatcaggtgctaagacactctaagctcagggagcagggcttctagagagattcaaccctgcaggattagctctaagtaatcctggaatgtaagtacattaatgtgtattttaacatccttgttagtcaggattgtcttaaattttagacaattgtgttggtggctgatgtcttgatatatagtcaaggccacccaaaaaacaaaacattcagttcttttggtgcaaaagccccaataacaccgactacatgggggtctgggctactgacacattacacaaggagtggggaggccgggagaggacccagatggtgctggctgaggttcacagcctttcacaaattattgaacagtttttctgtacaccggacaccgaacgcctcctcatgctgtgtgttccagtggcaactgaaatccctgcatccccaaacacatgcaggcaccgggaagacacccacgtcttattttaccatgctacttagaaagggctctcatggttcaagggtagtttgtacagactggacaatttgctttgagaatacatgtttaccttcttcaaatcttcccgaagcatcttcagcataccttccagctggtccactttagaagccagagtgggagaggagtctttactgctgggaacaagaaacaaaagaccatgttggcaggggcctccatggctgggtttgtttttttttttttttttttttttttactctgaggaggctgtatttataaaatggttttcaatgtcaaattactcagtatggcgacccaatgagtatttttactttaaaaaagaaaatggtagtcttaaaaaaaggtaataaaagcttgaactgcagccaatcaatagcttcctttgttaaagatgctgcatcctcacgactaaagaatgaagcacaatagtgaaaatggtctctttggcagcacaagaggtactttctggcagatataattgtcaaacagtaaaatgattcccagggaggctctgggatctctctagtgggctttgacagaggagttactcccctgtgtgtgggaaggaagctggggagctgatgtgataggcaggtcgtctctggtcccaagtgtgtggtcttagctactcatgcaattgcagctaaggtatcatgcctacatcttaaaccactggtctaagtatcttgttagcctaggcttaatgtcttaaattctgtcccagtctgatcaaaaaaccattttcttctcattttctcatgttttcttttgtttatggcacgctaatcatgccgtgctagtggagtaccgaaagaagtgtgagctggggtacggcaggccagccagcgagctagacagacggcatggctgggcacgctctcaccccgagggtcctatggctgaggaactgacaacttttcttgccacactctcctctacctgagttcaagctgccaaattttcctgattcctagccaagctatacatcctcaggggcacaccacagagaacccaaagtcttccatcgggaaaacatgcagagcctcttcccagcgccaatgggaaagagctaagtgactccgaattttctaggtcacggagtaaaaggtattctttactttaaaaataaagattcaagttacaattcctgacctcagatgaactgtgttgatgtcttctgctaatcctaagtctacaagaggccccaggaggcaaaacccaccgtggtgtacagtgtggcaaggctgtgggctgatggagtgaccatgacctccaatctctaaggcaggaaggccaatgaaaagctgacaatgaatgggtttgagaagggacatggtcagctgcagtccataaccgcatagtatggtacggcaggctggtccgattttgggtgggctgaaggccacggatgtggtagaaaaggggcggtgctggacagacacaacgaggctggggccgggcagcagtggtatccttcgcaaagccactgcagctcatcaggactgcagcaacgctcaggagcattctgtctattcacctccatttccatttgttcagtccatgctgacccaagaaaagagcctgtcatcaccctcatctgctgattttttaataatcctttcacaggaaaacagtcttggctcactcacacttctctctgttggaggctccttcctaacgaggcacatttggggcttgcttctgggatatgcatttttaaagttctcagcagtcagcctgattgctgctctcctcaccccagcagtgccagaggtaagtgcggcctctctcctatactcataacaaatgatcccctattcttgtgccttctcgttgagagcacttccttgcagacttgttcagagaagtcctcaatggcaagccccagtttatctgtgccatttacttcaattggctttcctgttattgtccgtttctgaccaagttttacagatacctggagttttaatcacccttgaaaggttttttcctttttcttaagacagagtttcgctgtgtcacccaggctggagtacagtggtgcgatcttggctcactgcaacctccgcctcctgggttcaagtgattctcatgcattggcttcccgagtagctaggactacaggtgtgcaccaccatgcccagataattttttgtatttttagtagagacagggtttcagcatgttgcccaggctggtttcaaactcctgagctcaggcaatctgcccgccttggcctcccgaagtgctgaaattacaggcatgagccaccaatcccagcctcaaagggttttaagggaagagatttcaaatgaatgaaattattctgcaacaagaagtgcttactaaatgttccatacctgactgatgggatgctttaacatacagaaattagcacacataaatctagcaacctcaccattttgaaactaaggggaaaacagaaaagtcggtctctgcataaatagaagttgtaaagtccctgctcctgactgagaagcccttaggacctcagttattgcctacttttcaccttcataccatcttaaccatcctggtgatttagctttccaacacacagacgtgaagcagcacactgggagccactaggactcagcaagcgcatgtataagcatgaccatcagcaacactgcgaaagagactgaaaacccagactgcaggactacacagcacagagcacaggaatacttagagcaaatggtctctcctacctgccccaactggccctgagggcataaatgtattatgacattaaataataatgaatattcatcattatggccgtataagtcatcaagaatagtttaattatgtctacagtattcagttacaaagcgttctgactaaaatgtaaagtgtctagccctgcagtgatcagcttcactcagctactccgtgtggcttccatctcttctccccacagatgcagtcagtggcagatgtgacacaaggtgcagagtactgcccttgcactgggaccaacctgctgtaaggcttcatctgggccagagcctggtcctccagctgatcactgttggatgcagcactcaaggggcgatggttttcatcactagcagcaaaaaatgaggctctctggactggaaaggagagaagaaaccatttagtattttggaaccacatccctggccctatctatcaaagtcaacaagtggtctagttggcagtcatgtctagtatttccagtgcaggatgcactggaaatcttatttcccaaccctcacagggaaaaatatgactgttttagctataagaggattgtagccatgtaatttccctttaagaaacatttgtgagtcaatttctagtcccccctcttccctgctcatcactgtagcattctatgaaatgtttctctggaaacagtccttgtgccaaatttccagaccaaggctttccactcagcaatgaaataaatgcgttcgagagctagcattatgcttaaaacttcttgaagtatgttttccaccacaagattcctggacactctggttggctttaacataaatccataccacctgtattccaaaacataccaagttaaaatttaagccaagaaaactaaatcaaatttaaaataatctcccattagaaaccaaaacttctaccatttgtatatgaaggagattaaccaacacactgaaaaatcaagttagaactgggaatttccatctgctaaataaacagcatgaaggtaaaaggattcactgctgaccattccatggttgcccgacgtacagattctgtggcctagtacatttctccccaaaattaaaacttgactaaatagcaattttcaattctcctaattaagagcaacaacaacaacaaaaacagaaaaaaaaatcacctgctataagtttgtaaagaataataaaaattttagaaagatctttaaacttagaaaaaagtcagtcttcattcaaaaaacaaaaaccccagctgacaatcttatgtcaacacacacatactgcactactttttgtgttttcattacagcaggcaagatcagcaccagtctgaggacctgcatttaagaaccgccagcctaaagcgagcacacggccagcaggctggcaaggagacaatgcagacagacaacgcgctaccgcgcacggagatgagggagaacggcaaagggggcgccccacatttgtgaggataggcgcgtggccaagcagggcaggcactgtgacatttagcaacaatgtcttgcgacgtgatgaaagatcctctctggatacatgttctttttagtcaagggacagctgggattcctctacccattgcccttcccatatacggaggaggcgaggcattcatgttatgaatcctgtggaggaaacaccaggtggcatctgattacataaaacatgtgcctaggtgtccagcttagggtctggtccctactgaatgctcagtaactgatagctcatctggtgaggcacatatgttttgagtgtgtccagagaagtagagtggatggagactgctcactccgctgcaggatcctgggctgtcttgtgtggattcagtggactcaccctcataggctttggcagcatctaccaggttggaccaatccaagtctgcagcagtgtcaggcaggggcatcaggccagggtcgggcataggctgcctgcgggtctcctggatgtcagtgagggagctgtccgaggctgagaactctcctgcgggaagggaggaggaatgagatgcttcttgtgcctgtggaagagccactcaaaacttacctctttcctgttaccacaatagattgtaagccatttgtgactgttatcaatgtccaggttagcaggctgttagtggctattctaaagctgacttgaaataggaatcggcttcctctagtctgccttcattttttcacaacctcccatcatctcccttccagcagtgagtcatggcaaagttagttttgcatggaggcactaagtctgcttttgtgagagctgtctgtccacagcagggcctaggcagcactagcatctactttcctgcacagagtcaagggatttgggccaggaagaagaggcctacttcaacagggagctggattttggagccagaccagggatgtttcttcctactagaggggacaatagggcttatttttttattttttgagacatattctcactctgtagcccaggctggagtgcagtggcatgatctcggctcattgcaacctctgcctccagggttcaagcaattctcctgcttcagcctcccaagtagctaggactaaaggtatgtgccaccatgcccggctaatttttgtatttttagtagagacggggtttcactatgttggccaggctggtcttgaactcctgacctcgtaatccgcctgcctcagcctcccaaagtgctaggattacaggcgtgagccaccacgcccagtttaatagggtttatttttatctggcccgggagtggtaagggacagaaggcccatgcctgccctctctgctgttgaggggcagcccactgggttccatggtcaaaggtgtccaagggggtgtgaggggcacatcaagggatgtgagtgtgctgggttactcagacagagctaagacaggaaggtgattttaggggtggaactggcattattcttctctaggatgcagtcatcacacgagctattctttggaccaattttgggttgcagcagtctaacatcccaagctcttcctaaggggacattttgttgaatacaaatattaaaccattgtaacaacaaactgacatattaacaactaagatctgcttggcagggaggactgggcagagtgagccaccctgaacactgaaggcagctcctattgctcaggttcatgcaggcagataacaggaagggcgggctgctggggtccaggggaaacgacgctcatgacatagaaatgccctcagtaggcagaagctgggtggaagccagggcagagcacaccactccacgagaaggagcacccttggaaggtgactgcgacactcaggtccatgcaaacacacagctaaagctaaatgctcagctagaatatttaagtgactccagaaagacctgtttaccaggagttaaagattttcatgtattatgacagcccggtaagccagtgtattaaatgctttgttttccctttcaaattacgaaaagaacttctctgaagtacagctgctggttattactgtgctcaaaattagcaaaatcatgagtaaatggaagttaacaaacactgcaagatattaaatgttcagttctacttaaatgtgctcctaccaagggtaagtaggaggggagataattctgtgtgtaactcacaacccttctgcccttttatctctggggcccgaatttccatgtgggggataaaagaagtcacccttcctcatcccccaaacacatttcagtggaagtcaccaagcaaggcagggctgagggatcagcccaatgaggactgcctggttagggggtgaaatcactgcagctgctatcttattcaggaaaacaagaaaaagtgaagggaaggggctcagagagggctgcctgtccctgcctttccattgtggactcacatggggcctctagtcccaggactcctcgtctggacaatgaccacgtgtgggacacagatttctgggctgttctttcggaatgtaggcttctactactcagggcctactctgatatgacacatgcagagaagacttcacaaaggggttacctttacactgcaaaggcaaattaaaagtacagagaaataagagagcaatcaaagtaaggcaggaataatggaattcacggaagactgaccccgatgtagggagagaagaagagaaaaaggttaggggcaggaggtcactaccagaaggcttgttctggagtctggtgacaaaaagtggtcatttcatgtgccaaccttggttcatcggaggtgacttcctggcgcaaagacaacccagattttagctgcaggtggatggagcagctttatttaaggagatttaaggagcaggggaagctggcatgatccttggggcgagcagggtgggtgggactgcgctgctgaacagtgagtaggacagagacatggaggaacattcatgagcgtgggctgagagctcaaaaataagggagcaaaagcaagagatgtaaagaaattactgttccagagaagcagcagaaggaaaagaaacatgggtatgaatggacactggagatataaaagctgcagcagagttcaccaaaggaaaaaggacagaagggaggaagggtgacagcagtgcatccagcaaatgatcaagaacactggttccgtgacaggcatctgctgtgctgggccacagctatgaggggaggtgtagagccctggaatggggtgggacagagacaggaaaaagggaaaaaccaaatttaaatcccgagtgccagaaagtggcccttaataaaactgggatctagttgggtcacaaagcaaacaaggcatatgtggaccaggtgcaagaacatggaggtacccatcatccacaaaccttttccttacataatgcttgcctgctcactgcacgaagaaatcaatgagtcaacaaatgagtggttgacaccacaggcaatttccttacagcctgggaaagaatgacagcaatggcaagtctgggttcttatggtagctacaggaagcagtggataccactctctaagaactaactaatctagtgctagccaaatttgctcaatcataacagcagctggcatggttgctaagaataccaattcccagactattcttttggagattcaaactcaggaggtcttgggtccagtgtgggaatctgttatttctagcaagcaacccaggtgactatggtggtctgggattacaggagagagagggcaaatgaggaaggggcgggtgagctgagaccatctgagcatggatacaggacccctctctgagcacatgagtggcagccacgtctggggacactgaccatcatcaacagggccatccaggctgcagctgaaagaccacttaccatgcagcgatttcattcctaaggtgtaagaaggcctcctcaacgggagcgacttggggagagaagggtacgtgctactgaagaggacgtcgttgggcagggcttggtccagaagtgacgccctggaggtgaaaaagtgctccctctggctattgtaaatgctctcgtccgacagtgttctgtgcaaggcccgccgtgaggtgggggtgctggggaaaggagactgaggagaggagagtgcgtggaactgaaaaacaggatcaagacaaaagaaagtcaattttctggttcagatccctgagaccaaggttgggggagggtgggataaccaagttactgctccagacacacccctagcaaggaagcttcagggctcattgtctatttctacaacctcaaggagctaacccaagaattcctggtcattattccttagcctggcatgctgcctgcagtctatcagtgctccctatgtgattcaggtatgtgattaagtggacctatcaagatcgtgtgtggttaaaaacaagactttaggatcagacaaatgtgggttttatttgaatcctgtgtctctgaccaaatcatacaatctctctgagtctaattcctcatttgtacaacgggagcacaaaacctctcaggattaccacagggattaaacaaaacgctggactgagcacaatggcaggtgtcagtggcatgatgaaatggtgttatggcccctgggggaagagagagccacagtgccaagagggtatcctgacaagcttgtcggatgataacatgcttgctgggcaacaagggtatttgatcatcaaaatattttaactcacatagcaggtagctcttgattaactactaacttacaccaactgaacctatcgaggtagataaatttcatgagttttggagaaaattcattttttgaagatgcatttctattcatgaaataagaatagggtaggctgggcgcggtggctcatgcctgtaatcccagcactttgggaggccgaggtgggcagatcacttgaggtcaggagtttgagaccagcctggccaacatggtgaaaccccgtctctactaaaaatacaaaaattacccagccgtggtggtgcacgcctgtaatcccagctactcaggaggctgagacaggagaatcgcttgaacctgggaggcagaggttgctgtgagccatgactgcaccactgcactccagcctgggcaagagagtgagactctgtctcaaaaaataaagaaagaatagggaagtcagctttctaaatgacaaataattatatatttaaatatacatgacaaatagttccagatgtatctcttatcttttgcctctgtgaccaaatttgattttacttgagattttttctgcaaatagcaagcttctgagtatctcttcactgagaacagcagataccttaaaaatagcaacctgaaaggcaacagagcatttgacccgtgaacaataaagttatccttattcatttgctcttaggccactgtctgcctcgatagggaaaatgatgtggagaacaggtgaagatgtgaggagggtgtcactgctggttgaaagccaccctgggacttcccatgacactctgaaggggcagagagagaatgatttagcaaatgctccatttagtgggctgattacagacccagaaatacagtggatacacagggcctagcatgcttccgctcaacaagccaggggtgaatcaggtccaggctaccctcaatgtggtatgcacagctgctgcataaataccaaaagattatgaatcaaacacattgtgaatacacccaagatgtgaccaactgggtaaaaattattctcactttaaaaaaattcctgatgaattaaatccaaggtacgtatgtacttgtctagaaactaaattgctgtgataaatgctttgagagagagaacttggaatgaaagtgataatttcccttctctttttgtggagaagagtgagcattagagccattatatggcttgctaactgtaattttcttaaaaaataaaaccagattaaaaaataaaaccaaataaaacatctccacctgcaaggttctaggactatcacataaggctcctgcctgccaggtcagatctcagatttctgtatgaaaaaactgctgctaaatagttttcagcacccctggttttagtaaagggatttccttttccagtatccccagcctgatggttttacaggtgtgaaaccctccgccaattctagtttcagcctctttgggaaatgttaatatgcttcaaggccatgaacagctaccttgaagagcttctttaagcagggtgccctatgaaaagttaaaacaccctgcagtgaagggaggcagggcaggaagcagaggaagcaacctaccccgaaggcgttctgctcattaaaaggtaggagaacccagccttgtccaagaatgttgagatggccccttgccccatcctctttaactccagtcttaaaggtgtgcagaactaactgcttcccaagagcagcccctgcctgccttgcaggttgtacctgggattgcccaggagcgctgcctggtgctgccagcccttgggaaagaatcgcagtggagtgggatggcactggaagtgggatcacacctggaagggatttcagaggacattcgagaagggggctggttctaacttgtgctccaaggaggccctaagggttccttatagcaccactgctacggagaggttcaagtgggacccaggagtccagaccatcccatccctcccataagagaaactctactgtctgaattctatataatggggttccatgtgtgatttaaaaaaaaaaaaaaaaggcttcctgagctttaagactggttgggcaccactgatctcctctggtcctctatctcacagttgaggaatggggcctggagaggtggcgttttgtttcatgccagtctcctgttctctcattcttttcagtgcccctggctattagtgacatgtgtcacctgcactcacaagaaactcttcctaaatactggagccacacgaagccacctcctttggtatatacctgagagcactggcactactgtctgttcacttgtcagactgtatgccacccttggggaaaataacgttatcctatctctgcttgccagtgaggtttcttagagtgctgtagctctgccactgttcttgaggtccttgctctgctgacaaatgagcctgggagtgaccctgccactcaatattaacaaaaactcataggtagcactggctatccaggaaaatcaatgtggcacatgagtggctttggagtgtcacagcccaaagctggccatgacacctagtatcctgaagcctgaggcagtgactcagagccttgagccaggagtggcctggaagacctctcaagggcatgccagccttactgacacagcagagcctccatcattcagatgacgactctcagaagacaaagggagctactaagctgaactcatctgaaactaaacctgctcaaataagatgaaactggagagagaaaacctgggcctattcccagttcctgcttacagccttctcactgtgatggtttagccagcagaagcactttcttcgcggagtctcacagtaatacagtcacaacataaagaaagcacactcctgtttcaaataggaatgctaaagtaattcattttggaaataaaagccaagacctggaataaggacaaaatcagacatttgccttcaattatttctactgcataagtaaatcaaaagaatgaaggctctgagcttgcctcttgccaaaaatgttaaactaggagttggaagaaaaactcccttcagggcaggttttatttccctttaacctcaaaggaaaaatctgaaataatttttattttgaactggtacttgaacattttaatatacctctttgggttttgatggataaagaaagaagtttcaagcactgtctttcgcaaggttgctaaggaaaccatttgtgccctgaatgatgagtcagaactgttaagtgctggcttatgagacggaaattacagaaatcaagaatggctacatctgtacaatgatttattaacataaatcatgttaacaaatcatttatttctcgacaaaactctaaagtggtccttgggggtacattcagttcctatgaatgttgattttttaggtttagggggtttatctggcctatctggggagatgcatgcacacgcacacacacgctagcatggtgctagggaagcctgagggcggcagccccacacagctgctccacccgccatgcctcttgcactctgatcacagtctgaagctggtgtgtggtttaggaaatattctagcttccatttcaatcaattcaattctcaaggttcttcttaaagctttctagtctcttcaaatagactacaaatcatccacctaagaacctagagaacagaagacttcaaagtttgcagccatgacctttctgggggtgcactcccttctcctaggagacccagaagacctcagacagaaatacctatactcagagtgacgtaacttcaggcccagctcaataaacacccattccaatccccgggggcgtgagactccacactttatagaacaagaaaggagagagccttaagtgagtttccaaaggtcttacaagctgagacgagtacacaaacctttccatgtggtcacataaaggtctggacaacacaaaaacgtacacactggacaggtattcaggacttggtgcagagagactgggttttagagaagacatttacagtctggaattctgagcataaaatagaaggctttatgaagtcaagagagtttggaaagttctgaaggtgtgtgggtagacttagattgctggattgaagcagcagctgtacatttacttttgggggtgtggcaatgagagcgactgtctatcaggcagtttctctgagtgaagagaataccatatatggccagtaggtttgccagacagggtcaggagcaaatggggccatttctgagaagacgaggaccctctggacagaagacagtaaaacccttatggaaaacgttctagctttccataggagccacaggtgtctctgcacagtttccaagaagtcatatcacctaagtgatgttcagggaatcatgcactctgagcaggacacagcagaagaataaacagctgtaggggtaggaccaggtaatagaaaccatgactaatgagatgtggctgcagggacagagcactgtcaaacactgtggaccagttatcagggaaatgggatgatagcaggaagtgagacttagtgaagagcagccagtaaccaacactttctggaaagtgtgactatggttaatagccccatcatgtctggcttgtttctaattgccatctaccctgagctctgtcttgtaccttaaaactcttctgtgattcaggagttgggctttcaagatcaattagtttctttagatcttcttcaatggtggacttggaggttggcttaggagatgcccggaggtctctggttgaggcacgcagcctggtgtgggctatttcattgccatcgctctgatgacgcctggacaaaaaagggaagagatgatagataccaactcaacaaggctggctcaagggcatgatgggctctaaaggatgtaagtcaatataagtcaatagagaaatattatgtggagaaacagataattacttctgtttatatgcgaatctactcatataaacgcttactgaagaaacaaaaccaatttgaaacacaaaataaaatctgatgaataagtcactcttttaaataaagctattagttttactaagccaaaattagcaacagatttactaaacgaccacagggtatacatccaaaatgcaacctttgcacaaacgaaaacaaaataattgaatgaatcatttaattttttgatgtactaccttgtcaaaaagtcctttattttcaggggtactcactcactttgtaatattccctctggtgcctactggcctagttaagaattacacaggaaggctgtgattaatataatcaaagggactagtatggtcttagcaccagaggggcaattattctgaagtgtatccttcaaacacactcttttcaagatctaagattctcaaatcctaacattttgcaataaatcttatttaaggaatgaggcagagaaataatttaagaaaatattacttaggaaaaaaaatcataatcccaccaacagaccaactcctgccaaccccctagcccggcctcttttgttgtaagagatcacgccaagcttttctattctctgtcctgttaaaagcaagccaccagcaagggaaggaaagtaactcttactttctcgtgtccataaatcccacggagtttatggttccttcgggttttttccatccaatcaggtacttgctagtagcgccctggcgagggtaaaaactcctaggaccagaggaggaggaggaagaggaggagaaggatggtgcgagctgtgagggggcagctggatgaagctcttctttaggtgaactccgggcactggtgaaaaccactgggctggcagagtgtcgggagctcatggtactgaggagaagcagggcaaagacatgtgtatctcaggatcattatgtcagctataaaagtgctgtccggggtacgggtgatggctgggttgaacaacagtgaatttttcatgaactattaacagcgatgcctggctggccttcctggctttctcatcataatttaaatgtctgctctcaaagtgacagatgaccactagggcttagtctgcactttaaaaagtaaaaatacttaagactgtcagggacactttcaacttttttcacttttttcacattggcaccactgacgtttgtcacggaagtctggcagtggcaagagacagaagaaagagaagtaaaaggtctaccgtctccatgcctctgtcttgctttcctcacaactagggattgtggtgatgctctctgggaccaagctgaggaggggagaggagactcaagcagggctatggctcttcagactcacatccaaggccaaggggcacagtgagtgctccttccccatggcagctggcattcctattggctctggaagctgctggtcgatgtatttcaaacatcggttaaagattacaaaactagggcaacattggttaaagattacaaaactagggctgggcggggtggcttacgcctgtaatcccagcactttgggaggctgaggctggtggatcatctgaggtcatgagttcgaaaccagcctgaccaacatggcgaaaccctgtctctactaaaaatacaagaattagctgggcatggtggtgtgtgcctgtaatcccaactacttgggaggctgaggcaagagaatcgcttgaacccgggaggcagaagttgtggtgagccaagatcacgccactgcactccagcctaggtgacagagtgagactccatctcaaaaataaaaaagattatacaactaaagtctgcatgactaaagagtccaaaactctggggtttcaagagttccagagcagaaaaaggcaagattttcaaaataagggatgagagttttagttgactaaaactcatgttaaaagtggaaggcctttaactgtaggattttcatacttcctgcccagtggtctcacaggaccacactatttgagcctttctgagttctccagcatggggtgagaccaaagatggctgactcttgctacaacagactttcagttatttttacttgaggtttaattaacagtatgtggtcccaaagcgttcctcgatggcactttcatttgtcaaaaatgaatcgtcctgacctaaataaagtacagactctagttaataatactgtatcaatattgacttggggaggaagataactgaatagaaccctctaacaactgtgcctccacaggaacaccaaattgaacaactatccacacaaaaaagcaccttcataagaatccaaaatcaggtgagtgatcacaatacctgcttgtcacatcatatcaaggggaaagaaccactgaagagggtgggaaagatggtcctgcatcgcctatgctccctcccccacccctggcacagcagcttggagagagaatctgtgcacgtcagagagggagagggtgtgggactttgcattggaactcactgctggcctgttacagcagagcacaacactgagcagaattctgctggcacccacggacagagcatttagaccagctctgggccagaggggaattctcagccagagtgggaggaagctgagtcccagctggttctgccaccagctgaccaaggtggcctggggccctgaatacatatgagtggcagtcaggccacagggactgcagtccttgaacaagccccagagctgcactggtttaagaagaagtggacttggggtgcacatgaccccatgtgacaccagccatggtggccaagggaatgcctacaccaccagtcctccaactccaggcagggaagtttggggagaggctccttccacttagggaaaggaaaggaaagactacagagggctttgtcttacaacctgagtagcagctcatccacaggaaaataaagcaggtggaatcctgaagccctcgattccagaactttgctcctgagtggcgttccagacccacccagggccagaagagagtctgctgccctgaagcgaaaagcccagacccagcaggattcaccacctgctgactaaccagcccctgggccttgagtaatcattggtggtagccagacagcagtcaccacgggccttgggtgggaccccgtaccgtgctatcttcaggtctgaccctgtgcagtgccagctgtggtggccatgggagtgcttgaatcaccttccccaactctaggcaacccagcacagagagagactcctgagagggaagagagagagagagacattgcctagcaacccagagaattctcccttatcctgtccaagcccatcaaagcagtgcttcttggagttggtgagtcaaagcgttcctggacttagggtgccccctagtgctgatacatctacagtgaccacaaactaagatcacaacagtcccatttgaatacacggaaagccttttccagaaggacgggtacaaacaagcccaggctgccaagattggaataaatacctaactcttcaatgctcagacactgatgaatgtacacaggcatcaagaacatccaggaagacataacctcatcaaatgaaccaaataaggcatcagtgaccaatcccagagtgacacagaattcagacagagaattcaaaatacctgtcctcgagcaagttcaataaacttcaagatatcacatagaaggaattctgaattctatcaaaaatttaacaaagagatcaaagagattgaaatagtaatttaaaaatcaagcagaatttctggagttgaaaaattcaattgacaaagtgaaaaatgtatcagtttctcaacagcggaattgatcaagcagaaggaagaactagtgagctcaagacaggctacatgaaaatacacagtcacagtagaaaaaagaaaaaagaataagaatgaaacatgcctacaagagctagaaaatagcctcaaaagggtaaatttgtttttcttttttttttagacagtctccacccaggttggagtgcagtggcactatcttggctcactgcaacctctgctcccaggttttctacttcagcctcctaagtagctgtgattacaggcacccgccaccatgcccagctaatttttgtatttttagtagagacagaatttcacgatgttggccaggatggtctcaaactcctgacctcaagtgatctgccagccttggcctcccaaagtgctaggattacaggcatgagccaccatgcctgtcctgtcaaaagggtaaatctaagaattattggccctaaagaggatgtagcgagagaaggagatcggggcacaaagtttattcaaaagaataatgaacatttccaaacctggagaaagatataaatatccaggtacaagaaggtcacagaactccaaaaagatcccacccaaataagactacttcaaggcatatattaatcaaactctcaaaggtcaaggataaagaaaggatatctgaaagtagcaagaaaaaagaagcaaataaaataaaagggagctccaatacatctggcagcaaacttcctggtggaaaccttacaggcccacagagtgggggataacatatttacagtgctgaaggaatattgattctcaagctataataaatgtactacactaatgtaagatgatgccaacacgggaaacttggtgaggggtgtatgggaactctatctttgcaacttttcggtaaatttgaagctattttgatattaaaaagtcccacaataggccaggtgcagtgtctcatgtctgtaatcccagcactttgggggccaaggcaggcagatcacctgaggtcaggaatttgagaccagcctggccaacatgatgaaaccctgtctctactaaaaacacaaaaatagctgggtgtggtggtgcacacctgtagtcccagctacttgggaggctaagcccagagaactgtttgaacctgggaggtggaagttgcagtgagcctaggtcaataaacactggtgctcaacatcatcggttactaggaaaatgtaaattaaaaccacaatgaaggaccattacacacctaccagaatggttacattaaaagacttataatatcaagtgctggcaaggatgcgaagcactagagctctcatacactgctggtgggagtgctacttgttatgaccacttcggaaaactagttcagagaccctactaagttgaacatatgtatattcttgacatggatattgcattcccagaaactcaaaagaaacatatatgtatgtgtacaaaaggacatgtacaggaattcttaatattggctgggtgcagtggctcacacctgtaatgccagcattttgggaggctgagacgggcagattacttgagctcaggagtttgagaccagcctgggcaatatggcgaaccctgtttccataaaaaataaaaaaaattagccaggtgtggtggcatgtgcctgtagacccagctacttggggggctgaggtgggaggattgcttgagctcaggaagttgaggctgcagtgagccaagttcacaccactatactccagcctgggtgacaaaatgagactctatctcaaaaaaataaaaagaagaggaaaaaaaaaagcaaagattctgaatatccaaaattggaaacaatccaaatgttcatcaacagtatagtggacaaatgagctgctatattctcacactgtaactataacatagccatggagaaaagctaatgttacctgcaacacatggataaatcttagcaacataatgttgacttaaagacacagggcacaaattaatgcagatagtatgattctatttatattatataaagtcccaaaacagacaaaataaggctattattttcttaatttttgtttttgcttttgagacagggtcttgctccattgctcaggctagagtgcagtggtgcaatcatagctcactatagcctcagcctcctgggcttaagcgatccttccaccttagccccccaagtagccaggactacaagtgctcactgccacacctggctttcacatgtattcttaaaaggataactggttaaataagatcaaccccgatccttggttttatctatgaacacaatgggctgacactagctcccaggtgtgaaatgccagtgcacttcttttcactagtggttctaattgagacagccccatttaattgattagatttaggcacaaaggttatgagagaaacaaatgaacaattcactggtatggctttcttctttaatgcacacaactcacagcatgaagctgtgcacttcagtacacagggcctctaattcagtgggcctgtgagcgtcacctgggagctcttctaaagcatactttcttgtgtcccaatcctagatatttaatttagtaaaggaggaatgatgcctggaagattaggtaaaatgtcctccaagtgttcacaccaactgaggcctactgctcactctcatccagttgaattacacacattgttatgacggtcaaaatccagttccatattgtctaggtgaagaaggtgaagtcgcggcagcagtgtttctcaagccacagaacatggccacctgtaggtactgatgtaactggggaatcctgggcttgtgttagatcttccagagccccagaaatctgtattttaacacacttccaaagtattctcatgtttttttgggttgaagaaatactgcattagcccctcaactcctcccactctaaaatgagtctgtctctgggcacagctgtgggtgggctccttgcagctgaccaacccactggcctgagactgcgtcaagggatgtgcacccatacacttcacctaagaatctctgaagtagattaaattacaatacaactaccatgaagctatcagcttcataatttttaaggggagctgtgtggctgggctctttcattatcctggaaatttcatgttaatttaataggctgcaatttcattttactcacagagagttaaatcttgtcataggaattacgtaagaagggaatgaaccaataatatctaacaaaaggaaaagagcattagatgtaacaggaaataataactgcaatatgttacttttctcaatgtataagaagtgagtttaactgagtatggccaaattggaatcactagaaatttactcaagttgtctctaaattctacatgaagaaactactaactttaatttttctataagctatagggcatttctcctttcctaaaaaggaacaaccttagattctgtctggtcatgtcaggatattaattttgaaaaggaagagaggatacacaagtacatgataccccatataaaagaggtcgggcgcagtggctcacacctgtaatcccagcactttgggaggccgaggtgggtggatcatgaggtcaggaaattgagaccatcctggccaacaaggtaaaaccccgtctctactaaaatacaagaaattagccgggcgtgaaggcatgcacctgtagtcccagctactcgggaggctgaggcaagggaatcacttgaacctgggcggcagaggttgcagtgagccaagatcgtgctactgcactccagcctggcaagagagccagactgtttcaaaaagaagagaggtagtgaggtcaccgaggatctgggacagcctgaatctgtccaaacttctcatcttgacctgatgctcaaatgaaaccatggatcacgtgtacagcaacctggtgattttacattcccagctgtggcgaagctttataggaggggatgctagatgaccaatctgcaaaaaagatgctactctcagcgggtgctgctttaaggaggacctacatctatttgctgactttgccaagcgatgagccacacaggattgggaagcctgaatgtcatcagtcaaggcccagagtgctgaacctatgaggcctggggagaccactgtgaattcctgcatcgtcactgagatcatcatatcctgtgaaaaacatctgccagccactgtctgtgttgtagaaagctgctgatgggaaaacttggagtcatctactatttaggaatggcaagggggttttagacaagcttggcctgctaaagatggtattttcaggaagcagagagaagcaattagtcacctgtcaaatggctgtggcaaaatctgggcaatggctgaatgctggtctaataccaaggagaggagagctgatcgggtttcctgtgattgcttgtacaaataacaagcctttgggtgacagataatgtggaggataatgattaaggaggactcctcccactgtgttcagcactagccagttctgtactctatccaatagagtaccgtacggaacacaatttagaagacactaattccaaaggactgggggaaaacaagtgaagtagggatgattaagttgacaaagaagatatccaagtgactgcagtaaagaaaaattgtccatctataaaaggcagaaatttaacagtataagggcatattaatacatacagcatagggaaatgagtggccagctatatgcagcagtagaagcctcagggatcaccgtggaccacaagctgaaaagcctgtaacgctaagctatttaataaggggctaacaagatatctatgaacattatcattttattgggcatagctgagaagagtgtcatgtccaagttttgcatctaaaaaggataaagaaaacaaagccagatgcttgagaagagaaaatatgattataggatgaaacacacaaagtgtagttataagagctgtgggagatacctgcttgttaaaagaaaagtcactagaaaattgttaaggcaggtgatgaagagcttacaaaaggaaatgacaaaaaacctttggtcttaaaatgacatttacagtttgcaatacatttgataatcttttttattttcaacagacatgtaaaaacagccatttagtaggtggaacaggattttggtttggtggtactaggctatgctaatgtgtatgacatggcacattaccagctgcaggctttatccattagccactgagtttctgacctgctgtctattgtgtagaatctgaacaagctgactgctgaaatgcagtttgctggccagtgaactgaaagatgcaatagtaagccatcttcatttgtcaccatgtgcttgtatctgtttaatttgtgcaccttaaaatcctatggtgtattccatggccaatatgccatctcctagattacagatgagggacaagccaggtgaaatggtacaactggccacaggccacatagctgaccaatggtagaactgagacttgaaccagggtctcaggctccaaatctattttccttatgttcctctcccaacttgcctgggggtagagagctataccaaattttccttctttctttttttgcaaatgaccacgttatagtcaataatctatatccaataactaggttaaggcaagcagggccaacacatgttctcagaatcttagatgtcaaaaatcttcatgtttagaaaacactcagctcataaaaagacatttattctctcttaattgtgtatttgagctgtagctagaggaatggaattaaatattgaaaagggagaggacttattatatactgaaattatttagaaaagttgtgtgggccaggctcagtggctcatgccggtaattcctgcactatgggaggccaaggtgagaggactgcctgagcacaggagtatgagaccagcctgggcaacatgatgagaccctgtctctataaaaatattaaaaattagcttagcatagtggtgcatgcctatagtcccagatactcaggaggctaaggtgggaggatcacttgagcccagaaggttgaggctatagtgagctgcagggccaccactgaactctagcctgagtgacagaatgagggaccctgtctttaaaaaaaaaaagagagaaaagctgtgaaatctcttgagattatttccctccccactgccccaataaaacaattgtatgaattctcatcctggtagaatgctttacatatgacgaagaatgggctctctgccctttctgaattccttttggccttatgatttaatgacacttgaagaatttgggcttgctacatcaactgaatgaatggattagttgcttcatagaacaaagcaaaaaaatgttttgttggtgagatctgcatcaagcatctgtggcttgacagagggctcattttctcaaggttcacttgaaatttcttcctcagtggttctatttttcagtctttgaggttactaaaagtaactggttctggataaaataaccacccccaaaagctggaagaggtgtggcaagatcgcttaggccaaatcacctggagttctgccatgtaacagcaacatagaacataatcgtgaatgtttattgtatgcggtgatgcaaagcaaaaattgccaattaaaatgatccatacccacaacctaggctaaggcaaatagagtcaaccacatctcttaagagaagttctggttttgttattttagagggtgaattttcatattctgagttagtccataatatttagaaaaataacattctcatcttaaggaaaaaatataaaagagaggcaattaattgttagtaactaaaaaaaaaaacatttccaggcagaaaagatttagagaaggaaatgttacaggtaaagacaacggagtaacttctaaacaaagatggaaggcatatttctcacatccataggatgccaatgagggtgcagggaacagggcatacacagaggcacacagacagcccagtgtgccagagtagcctgaggcagtcctaatgttcaatgtaaaccacacataagaagcctttcttttcctcagctctcaagaaacatacagcttttgtggcatgaaccatcaaccagaaaaagcacattcatgaaattgagctgtgttgacaactgtgggcaggcatttttcttggtctttaaccagttcttccagtgataatgtcagacactgaccaacatatatctagatcctgactgatatttgtatattagctgttctaaagtttttccttgtcatacttcgtagagtttacaaacttttatgtagacatgacagtttactaagacttcatgctacacaaagactctatgtatgctctcatacctacacctataagcactgcagctctgtgcaaatactgatgcatctgtacaataaccttcaaaatagttagtggttttctaagagccaggagttgaggatttatgtaacttttgaactggtttgagtcatcaggcaaaaaacataaagaaaagtcattctttcatttttttgagacagtgtctcactatgttgcccagattgacctctaactcctgggtacaaatgatcctcctgcctcagcctcctgagcagctgggactataggcccatgtcaccgtgcccagctagttattcctatttgctcattggcatgtattgagtatcaatctattatgctcatgttggcacggcctatgcaaatatacttaggatgaacatattgggtgaaaaatcctcttgtactgactagatggcagtaaaaaggtatatgtgatcgcataagtgggtagtaattggctacaggtgtctgagggggccttagggaagcaagaggaaggagacctggagaatagctggctaacaaccgtggacaccaaaacaagtcaggtcagtcagttacagaagagatatctatgtgcaagcatgaggtagggtttttagctttctcatgtgtgttctcaaattaagctccaacaccagaaacagcattggtcagcaggtctagaggattttggactaactgaggaggtccttgattgccacacaaactggcactgcctactgccaaggccagaacgctaagaagaaaatgaatgctgcttaaatttaagaatgtccttaaattactactatcttcacctctcctaggcttaccactaatcttttttttttcagtggttcattttaagatctgaaagtgaaacagccattaccaaaaaataaaataaaataaattttctccctaaatttccaagcttcataaagatacacatatattctagggagcaataatttagagcaattaatagacgtttttagttatagaaagttaccagtatgtgtggcttcttttaatgacattcaaatatagcaactctatgtaattaccaacctgtattaatgtagctctcatgaggagctacaaaagatctgcatgatcatcaagagggagactagaggacagagaaggtaggaatggagcccagccagaaagatgcagtgaaacttaatcactgtaatttagactttgtcactgagtcccaggtacaagctcttttaagcactgtcaagatatctctacattaattgctgttcctgtcttctgaggacacaaacactctaatttgctgtgattttagtttttctatagcaatgtgcatttggtggctaagtcccctttcctccagaaaaggcaggctgctaaagctctgattatccaactcactctgccaagatcaacataccaaagtctcaaaacatccctacttaccagagtctagaaatgaatgtgactcaaatgagtgggtgagaagctctgccaccctccctgaatggccacattcttctcttctctagtaagtttgactttcaataggagagttatttctaaaggatgatttcaatgattctgcattcttccagttagaagcagaaaatttagataatcctttgaggccttcaggcagctccagtcagcacattcagataatgcaaacccagatgcttttttcagggagctttgttgatcccctgggatttgttagataatggcacagccgcacattctgtgctttggtttcaggggcccagctctttccaatctcactccatggtgatgccatttgagacaagatctctataaccaactttcttctgccatcacattggaccagagaaatattttcagatggaagacattcttaaaaaaaggcatcctcctttcaaaatgacaaattgaaaaccaaagaaataggagtcaaactaaacttaaaaaccagagagaaactattcagatatgcaaaatgttctaagtcaatgcacagtctactgagatggggatgtgccaagaacagccagcgagtgtcatcattctgtcttgtgtgattctgtctatatggttatggcatctgatgcccacttcctgttctactttggcaaacacatctcttataccatttgaatcaaacaatctactttctgaattgtggaacggaatacatagtactcaagaatactgagactactttcccaatttccttttgcttggaagccatggagtttccagacctatcaccatcattttgagatctgcaatgtggtagtggtaaacagaaacaaaactagtgaaaggcttcattccatggggcctgacattttaaatgaagggaagctcaatgataagtagcgatagagactccatgagaaaacaaaatacttagctggtcaagtgaaagcaatccaaattaagtagaggatgtcctctctccttaaggttatctggggtttactgacagattatgtgcctagatttccatttgaaaaataaaaactaaattaagcctctctattacttttctttttctttctttctttcttttttttttttttttttgagacagaatctcactctgttgcccaggctggagtgcagttgtgtgatcttggctcaccgcaacctctgcctcctgggttcaagcgattctcctgcctcagcctcccaagtagctgggattacaggtgcctgccaccatgcccagctaatttctgtacttttagtagagacggggtttcaccatgttggccaagctggtctcaaactcctgacctcaagtgatctgcccacctcggcctcccaaagtgctgggattacaggcgtgagccaccacgcccagcctctactatttttcttgcggtcataatcatagcagacccagaagacagcaaggttagatggtctcacacattgatcaatgactgacaacaatcgaagataaaaggagaaaccacacagagatcaacaggcctaaaaagacagtgatggaatgcttcttccctatgtggatcttgtcacattggggattttaggctccaatcaagaggaaacgacaaatagtatttattttatctagaggtgtgatctccaaggatacaggggaatgtgtactttcctattctgaaaggtatgtctaattttagctacacgtttctattggacatcccccactctcaacccattgctgccaggagccaattactgaaaaaaagttacaatgtaaatatcaggtaagtgaggttctcggcttgagaggcacgtaaaggacgtgcttggcatcgcaaacgatgctctgttactcagaaaagacctctgtcttttaacaatatggtcaatattttaaaaacatagtcttcaaaagcttgtcccagtatacattccctattactcaccgaaagccaacattacaaaattacaaatttcctctcaaattgtagtagccaggaacattattttaaaaatcaaatccaactttaaaaagaataaatctgcaaaattttctcacagtttaaaataatgcactaaaattgcaggattaaagtattttgaaggcaaataaagggcattaaacatataaaaataattgtcactgcagaaaaacctcctttccttatacactattgagcaaagtaaagtgggctgaggccagggaactgggcttaggtctgggctgggaatcagacagcggggaagggtggttaccttgtgtgggaagcagcatcgtttatactgaaggtgctgttctcccttgtcagaggggtcgagccggcttggctcttgctgtgtatgtctaagctcagggaagactctgttttccggtccaggccgtggctctctgtctccaaagtccgatctgccatggagattacttcactggagctgtgccataggggtgccactttctccttgcctggccctgagcgaggtgacgatgtggcagcccccagcgaggctgtgctgccgtggctggggccataagaggtggtgtcaatgccactgtcagcagaggtgccttgcagatagttatagctgttgagttcggattctgtgcggtccccatcgtaccacttctcatcactatgggcacttgacgcattgctggagagagtattgctactggagtggctcgagtagtggctatcagactgcaagagaagcagaatttatttgagtgcaaagttttgcttcctgaacaagagaataacagaaatgacactgtgattaatttctagttatagggctctgaaggcctaaaagttccaataatgactagtcacagtaagacagggaacctatgtcactatggtccattcagaagtatccatggtaaagggtactagaaacgtgttttttttttttaatctatttttcattatttgatttatgctaaagtatcaatactat

SEQ ID NO: 7620 - DNA, 1968 bp, Homo sapiens
gttttttttttgtttttttaataagacagtttataatgggtttgcatgctcaaacaactttgcacataaagctatcttaagacaagtcaaagttttgacgtcttgagacagaagctgcttcactggcagaggccctgtcccacagtgaacctatttatcttctgagtagggcaggatggggcttcaggtataggaagctgagaagctttgctaatagagaaagaataaggatagatactaaaaggtacaactcccaaattaatccatgcccaagaggcagatctgacttgagagcccaggtttgtctccggctctctcctaaacatcttgactggacacctttcaccagcaatccaaatcagaccttttcaagactaacacattttatcccactctccaataacgcaaactgcccttcctatatttgttatctcaagataaacatcattttttttttggtaccacataatggctttattcacaggacaacttgtgactgcaagtcatgtgtctagtcaagctaaacatggtgaagccatttttttccttcctctgtctttactttccacagtcaattgggttaattaagttcaactactatttactgagcacaaactgtgtgtcaggcacctggtgctggtcctgataacacaaagacaaagaagatatctagtttccaacctgctgaggggcttctgatttctctcacctgcagcctgggtcagtccaagtgtcccgacaggtctctcaacttccaggctctctccaccccattcctccagcagccccaacccaccctcttccatcaagtcaacagactgctaaaagcctattcaaagcttccctttgcctacaggatagaggaccaaatccctgagaccctctttaaggccttgaaccatctgaccaaaccccatcctcatctccatccccattaatggctccacacaccctacattctagagaaagtcaaggtgtcccagttctcagactctgcccattcacactattattcatctttttctctctgcctggaatgccttcttcctttgctactcacataaaaaggcctgatgccaacatcatagctttgaattcatagattagaatctcctcaaatcccatgacaatctgttctttgcaccattacaccaagtcatacagaatggttattttatgtgtgtctcccttaatgtgaattaagattctgtctttaaggggccaggactgagccttatttatctttacatttctgagtgcttaacatgtgttttgaatgaaggagaatccctatcagtggtgtagaaaatgaagaagagaagggggattcaggacaagtaccatagttatgtcagatgccccaaatcaggagttctcaactatggtggggctagatcacttgaacaacagttggtcactaataatgaagtgccaaaatttgtgaataatttaataaaagcaactgtaacagactgaaagttaatatgccttctaaaatgcaagaaaaagggatggagttacaggtgatagaattacacctaagcccagacacccatgtgagtatcatccatcttacatatgatggtgagagaacttaggacaatgcctgttctaactagtgtgaaatggggtaaacagggagacttgggatgtcagtgttcgggaaatgtggtgagaagaaagaagcagggtttctaaagtcttcctgttatcatcatcaatcttgctgttgctatacagactgtgagaaatatgggccaatcacccactggcactgtaattaggttgccagatctcaaagtagtgtatgcgtggggcaggtatggcggggccacgtactagtgggatactagctcatttctacttcaggtaatgtgttttaataagagaagatcaagacatttatctgggtaccataacatgggtttctctttactcttttccactgagacatattgcaaatttctc

SEQ ID NO: 7621 - DNA, 649 bp, Homo sapiens
cctggatgtatggggatgtatctggactcggatttcactgtattttttttcagttctgaggaaagtatgaatgccagtgttatttattcactgttcagtttctcaagtttgttttagtagttcttgctttgagaataaatatcggaactctgtgaggaaggcattccagaaataaagctggctattcatggcatggtttttggcaaataccttccctccactacggagggaaactctgtttacctttttgaagagtcggcagaaacccaggttcacagttctgccaccaaaagaagaaagcagttcagttcagtgagaggacagactcagcatgatggacaaaaggctgagctgtgctggctaagcgtttgatttcaggagtaaaaaaacgctctttctatgttaaagctgcaattaacgttcttggatagctctcacagtaacttaaataggtaatctagattttctcttacctaaaaggacacttaaatctcattttcttcaataattacaattttctataaaatgagaataataccggccaggcgcagtggctcacgcctataatcccaacactttgggagcccgaggcaggcagatcacatgaggtcaggagtttgagaccagcctggccaacatggtgaaaccc

SEQ ID NO: 7622 - DNA, 649 bp, Homo sapiens; identical to SEQ ID NO: 7621

SEQ ID NO: 7623 - DNA, 649 bp, Homo sapiens
cctggatgtatggggatgtatctggactcggatttcactgtattttttttcagttctgaggaaagtatgaatgccagtgttatttattcactgttcagtttctcaagtttgttttagtagttcttgctttgagaataaatatcggaactctgtgaggaaggcattccagaaataaagctggctattcatggcatggtttttggcaaataccttccctccactacggagggaaactctgtttacctttttgaagagtcggcagaaacccaggttcacagttctgccaccaaaagaagaaagcagttcagttcagtgagaggacagactcagcatgatggacaaaaggctgagctgtgctggctaagcgtttgatttcaggagtaaaaaaacgctctttctatgttaaagctgcaattaacgttcttggatagctctcacagtaacttaaataggtaatctagattttctcttacctaaaaggacacttaaatctcattttcttcaataattagaatgttctataaagtgagaataataccggccaggcgcagtggctcacgcctataatcccaacactttgggagcccgaggcaggcagatcacatgaggtcaggagtttgagaccagcctggccaacatggtgaaaccc

SEQ ID NO: 7624 - DNA, 3753 bp, Homo sapiens
atatttagattcctgaagcttctgcacatgtagttcctagagctgctgcttattaaaatgtcaacatcttcatcttctagctgggacaacctcttagagtctctctctctcagcacagtatggaattggatacaagcaagttttttgggagagactagtgcacctcagcaaacaagtttgggactattagataatcttgctccagctgtgcaaatcatcttgaggatttctttcttgattttattgggaataggaatatatgccttatggaaacgaagtattcagtcaattcaggttatactcttttgttacaaacatttatatagttataaattgaaatttgattagttctctcccatattgctgccaccagttttaagatcatgcagatgtgcaaaggcgaacctttgtctcttaagttggcaaaaactaggttatccttgaaaatctccaccaattaggctttgggcataaaaatgcttttctcacaatggtctttggcttgtcttctgtaataaaatagaccaaacatgttggtaacctgaaaagacagccttaccctcaaaaatttttgatcacttattcatctttgagtgctactatgtttatacaataggcaccaaagtagctaggatcatgagtatggcctttcttactatgccattgttctgtaactgataaggaggcatatgtattaagtcatcacaatgtgttcattattgtgttttgacaagataaggctccataagtatataggagctctttggggagtaggaatttaactggctgggattgtgagagacaggattttacatacttctgtgtagtcaccaataataatagttgacatacaatatagttgaatgctttgagaatctcaaaaattccatgaaatggatggagattattttcacatgacaagtgaagaaactgaggtgcactgaggttcagtggaaacttaaggtgacaggcttttaaaacggctttcttagagtgacaagtttacttgataaatgcagagagaagttgttattggatcattttttagcattcacttattttcatatgtcactattgtttagtaatcatggtcacggggcctttctattttaaaccatcacaatcctgcataacagtcagggagagattatttgctccattttgtagatgagagaacttgattgctacccacccaagttcacatagtttgtaagagctggcaaaattggagtttgaatcgaatttttaggatttgaaattcagttcttctccaaaatctcatttaatgcaaaccaactgacctaaatcttgaacaggaatgtgtgtgtgtgtgtgtgtgtgtgtgtgtgtgtgtgtgtgtgtgtgtacgcgcatgcgcatatatatgtgtattgtgaggattaaagaagatattgtatgtgtaaatcttagcacatatattcaataagtggtgctacagtgaaaccccatctctacttaaaatacaaaaattagccgggtgtggtggtggcacgcgcctgtagtcccagctactcaggaggctgaggcagaagaattgcttgaacccgggaggtggaggttgcagtgagccaagatcgtgccactgcactccagcctgggcgacaaagactgtgtctcaaaaaaaaaaaaagtggtgctagttgttataataaggaacaagatgattttttttcttatcctagcaagaatctgtcctactatacatattcttttgttatttatttatttattttgagatgaagtcttgctcttgtcccctagtctggagtgcaatggtgcaatttcggctcactgcaacctctgcctcccaggttcaagcaattctcctgcctcaccctcccgagtagctgggattacaggcgcataccaccacacccagctaatgttttgtattttaagtagagacagggtttcaccatgttggccaggctggtctcgaactcctgacctcaggtgatccgcccaccttggcctcccaaagtgctgggattacaggcatgagccaccgtgcccagcatatgctttatttttattttttattttttttttatgttttagagacagtgtcttgctctgtcgcccaggctggagtgcagtggtgtcatcatagctcactgcagcctcaaattcctgatctcaggtgatcctcctgcctcagcctcctgagcagttggaaccataggcatgcaccaccaggcttggctaattttaaaaatttttttgtagagacagggtctcgctacgttcactatgttgctcaggctggtctttaactcctggcctcatgcaatcctcccatctcagcctctcaaagtgctggatgcagtggtccacacctataatttattttatataaataaaatatatatatatatacattaatttttttaagagacagggtctggctatcttgcccaggctgaagtgcagtagccattcacaggtgccatcatagcacactactcctgggctcaggtgatcctcccaccttaccctccctagtagctgggactatatgtgtgtgccattgtacccagatctctcctagtatattttaaaaaccttttccatgaccaagaaatccagtttttcagactactatgtcctaaagtgtacttggaagtgtgaatttctggattcctgtcctggctctgccacttccaatatataaccttggacaatgacagagttcaaactagaaggtatatagttatccagttgtgttttttctgcataaatagatcatgcaaaggcaaagttacttccagacattcagaaaatggttatctattattacaatcttgattaaatgcaaataataatcctgcctgacctgcctacctctccagtttgcagtgaaaatcaaaagatgaaataggtgtgaaaatattttgctaaggccgggcatggtggcttacgcctgtaatcccagcattttgggaggccacgatgggcggatcacgaggtcaggagattgagaacatcctggctaacacggtgaaacctcgtctctattaaaaatacaaaaaattagccgggcgtggtggtgggcgcctgtagtcccaactactcaggaggctgaggcaggagaatggcgtgaacctgggaggcggagcttgtagtaagctgagattgcgccacagcactccagcctgggtgacagagtgaaactccatctcaaaaaaaaaaaaaaaaaaaatttgctaaatgggagacttgttattggaatgaggaattattgttactattaggtttttgttttgtttttctcttatagatagtaaactgtagcaactaacactcaacttctgttgttccattttagaaaacattgttgtttgtaatcacactctacaaactttacaagaagggctcacatatttttgaggctttgctagccaacccagaaggaagtggtctccgaattcaagacaataataatcttttcctgtccttgggtctgcaagagaaaattttgaaaaaacttaagacagtggaaaacaaaatgaagaacctagaagggataatcgttgctcaaaaacctgccacgaagagggattgctcctctgagccctactgcagctgctctgactgccagagtcccttgtccacatcagggtttacttcccccatttgaaatgtgatggactccaatcttttccaggaaagcactgtttccctcatgtgtgcagtggtgtatcaataaagatagagaacgctattgaaattacc

SEQ ID NO: 7625 - DNA, 9266 bp, Homo sapiens
gcggccgcagccggaggcgcgtcggctggagccggtcacgatgccccgaaggaagcaaagccacccgcagcccgtgaaatgcgagggggtcaaaggtcaggggtcaggggccttgaggggagaggagcgggggtggggtcagtggagtgggctcaggtcagggtggagggggactcctgagggatgaagtgggcgatccagactcctagcttcccaccgaggcactaagggaatcagagtgggtcagcgagtacgggaagtgtggtccacgagggctggttcctgagggagaatccacaagccccctcccctcttcagtggatactgaagactccctcgacgaaggacccggggccctggtattggagagtgatttgctactaggccaggatctggagtttgaggaggaagaggaagaggaggaaggcgacggcaacagtgaccagctcatgggcttcgagagagactcggaaggtgggttttcgggtcttggttaaggattagcggccgctggagaccccagcccttcaggaggcaggttaggtgaacagaacaccatttcctgccacaaccgagggctggtttagtttacatttgagctagatgacttcatttgtttaatggtccaatcacttccatcactttgttgaggtgaagttctgaggcctggtcaaaggtgataggaataggagggtgggtgaatcacatggagcaactgattaaaagtaaatgccctgtctctctccctagcccattccttatgtgtatttacttttaagagaggttcagggaagcaaactctctgtaaatcattcaacccagtatttaggtctaatctaactccctttcacctgcagcgtaagctccttttgtattgagaggttttagtttctgtctttatccttccatgtccctcttccctgtgatcttagcatcaccctaccctaatttgctgcactacccatccacttatgcaagatgttttttgaaagtcattgaggggatccatgtaaatatctgttctttaggcaggcaagtggtattacatgcattactttcattgtctccacttccctccaaattttgcctcagagataggttttattttatatcagctccttactaaaaggggccttagcaatagagcttagaaaaaggtcttgggggctctctccctttcgtatttttactttcttgtctcaagaattaatttcattatggattcatttcagtctgtgatccactgtgagcccttgatccttgaccattgagggaaactagatacaggtcaattctaccatcactagattagtccagtgtaagaggtagacaattcatgttgaattttctggaattactgcaggggagaccttgattcctaggagggaactaaagggatcatcaaagctaagggtggagccaagcaagtggggagaccataagtgaaaaggggagagtttggagcctgatcctaccctatgctgatgtctcttcttatgtctatttcaccaggagactctctgggggccaggcctgggcttccctatgggctgagcgacgatgagtctgggggcggccgggcactaagtgcggagagtgaagttgaggagccagccaggggtccaggggaggccaggggtgagaggccaggcccagcctgccagctgtgtggggggccgacaggtgaggggccgtgttgtggggcaggagggccgggtggggggccctgctgcccccacggctactgtactcatgccgcctctgcaccttcgtgtcccactactcgagccacctgaagcggcacatgcagacacacagcggagagaagccgttccgctgtggccgctgcccctacgcctcagcccagctcgtcaacctgacacgacatacccgcacccacactggcgagaagccctaccgctgtccccactgcccctttgcctgcagcagcctgggcaacctgaggcggcatcagcgtacccacgcagggccccccactcctccctgcccgacctgtggcttccgctgctgtactccacgaccagcccggcctcccagtcccacagagcaggagggggcgggccccggcgacctgaaggtaagacacaccagggaccaaagatcttgggacatgggtggctgaccctaggaatgcttggattggattcatagcccaggtctttgtccccacagatgctctgctccttccagatttgagcctccatgtgccaccaggtgtgccagtttcctgccagactgtgggcagctgcggggtgaaggggagggcctctgcgggactggatcagaaccactgccagagctgctattcccttggacctgccggggctgtggacaagagctggaggagggtgagggtagtcggctgggagctgccatgtgtgggcgctgcatgcgaggagaggctggagggggtgccagtggggggcccacacgctgtacaaaggctttgcctgtagcctctgcccctttgccactcactatcccaaccacctggcccggcacatgaagacacacagtggtgagaagcccttccgctgcgcccgctgtccttatgcctctgctcatctggataacctgaaacggcaccagcgcgtccatacaggagagaagccctacaagtgccccctctgcccttatgcctgtggcaatctggccaacctcaagcgtcatggtcgcatccactctggtgacaaaccttttcggtgtagcctttgcaactacagctgcaaccagagcatgaacctcaaacgtcacatgctgcggcacacaggcgagaagcccttccgctgtgccacctgcgcctataccacgggccactgggacaactacaagcgccaccagaaggtgcatggccacggtggggcaggagggcctggtctctctgcctctgagggctgggccccacctcatagcccaccctctgttttgagctctcggggcccaccagccctggggactgctggcagccgggctgtccacacagactcatcctgaactaggtccttcttccccatgttttatacagacggaccagaagccacctttttctcccccgctggccaggggctccacacagactaacgtaggcactataaggaccagcccaaccccatgggcgggggggcccatatggaccaggggaccttgccttgactgaggcacttcacgagctcagtgagaagggccctgtattcacctccactgcccccaggggctgtggacaaaccggctgggggactgcccagcctcccacctgtttatttaacttatttcagtgctttataataaaggaaacactaacaaagccatgtctatgctgaattggcaatggcaggcaatttggccttacccttagcatagtagtccatgctgtgatgggggaagcaggggcagtgagagggaaccagaggtaggcagcagtcaggctgagtttaatgatggggaactgggccagaccaaacacagacctctgcccatccccttggcctttgcgatggctccaagaggccagaagcggccagaggagatatggttcctccccaaggcaggcagccatggtcccttagactttgtgcaaaatactaaatgctaatttggcatcgagggccagctctgaaaagagaaggggcaatcctctgtgcagccagcccaggggacaaggaaaggtaggatacgaggcccctggccaagagaaaaggggtaggtaggaaagaagaaggaaaagacccctccgcccctagcatgggggacacaggcacagggcaagtttctgtaaattcctctggggtagagggcagacatccaagcagtggagattacagatcctcatctccaatgccctcgaaggcgaaattgccgtggacatcactggcactggcatctgtgctgggactgccaattccccgcaagctcacggcactcagcttactctgtaacaaaggcagggtggggtcagagatcttgggcgtgcaagatcccccaacaaacagcaacctcaccaacgctggaactcactgagagtttgaccatagactcccgggtggcatcaggtgactcctggggaagaagaggcagaggtgtcagaaactcactaggagaggtgaggcagggctgagagccagggttctgaccaggaggtaatacttacaagcagtggtggggacttcactgcttgctggctgtctgagcgtctcagagtaccccccacccgccggcgcagcatctggggacagacacaaggtgccggtgagggcaggatcacttcccctccctctcaagacaagcctcacatctaggacaaaaggcaaggggagcacacctgctcactgctcagtccacacttgctgcctaccttcctgatactgccgccagatttcttcaccatcagttcatcaaccatggactgcaagcagatgctcatcatgatagcctgagggcaagaagagtgtccagcttgatgagagtggtcactctgagcccagcaccactaatgcctcccatattgagtactggaaactctacactttaaggtgctccagaggagggctgagggtaggttcacacctgggggctagtgatggtgacccactgtagccggtccttgctcatgaggtattcaaaagccagttccaggcgcacctcaccccggccccggcctgggctgctcgtgcttccactgggcaatggtacctgggagaggaaggggaattcggttgagttcactctgaccaacctgtctggctccctgacccgctgcagcccatacctaagctcaaggcttgccgggcccccaacccaggcccttccccctcctaacccgactcacagaggaggtgacccgccagcatcgcatgcgggtgacccggaaggagccttctcggagttgctggccaggcaggcggagctgcaggctgagctcactgttgcccgcgctcaccaccacaggacagtccttttctgggaagtcagccacacaggcatcaaagcgcaagtagccatagtgccgcagcgtctgggccagtctcaggaactgaaaaatggtcatcacatgggggtagattaggagggagaatggggcagctcagaaaaagcaaccccggtcgggcgcggtggctcatgcctataatcccagcactttaggaggcagaggcagacagatcacaaggtcaggagctcaagaccatcctggctaacatggtgaaaccctgtctctcccaaaaatacaaaaaattagccgggcgtcgtggcgggtgcctgtagtcccagctactcgggaggctgaggcgggagaatggcatgaatctgagaggcagagcttgcagtgagccaagatcgcgccactgcaagcccttagaggaagacagagaggaggcagggctcacctccttcttggagactttctcttgcagagatttgagttgccggtgctgttccttggtgaccaagatccacccacgctcaatatctgataccgtctatagtagagacaaggggcaggcagtaggaggtcccagtcagcaatccaaggaaagcgtctaccattacctctgtccagcctgacccctagccccacacttgagcgacctctctgcagtaagtccttgatcttgtcagcttaataaaagtagggagagtagatattgtgccagcagcactgatagtattctaggaacttccccacaaattgggaacaaagacacgacagcagttttcttgggagagtgagtcacccgttattttcttcaggggaagggttctgaggcagctccaagctcacctgagcataaagcaggttcaggccaacccggttctccatgacatcgtcatcataggcagagtcccaataactgtgaggccaaggggtggaaaggggtaatggggctaagctgggttaaggcaagaggtagaatggaaaatgggcaaaacaggagcaatctggaactatcaggggctaatggtatagtgggaggaagcttgggaggcctggcagaaacacccagcactacacccccttgtccagattattctgtctcaatatgtggcccaataatccaatccagcacagcacctcccacccctccccttccaggcccagccctgacctcttccttagcacaatcttatactcttgactccgaaggctggtgacagacacataaggcagctcaaactcttgcaacttccgtacaactacaggttaaaaaaaaaaaaatgaaaatatagtgagatttaaaggaagggaaatcaagaaagaagtgccctgaggcaatgttcattctgggggtgggggtggggagttaggggggctgcaaactctactgaagtacccttgtactgcagtcaagtccagagaaactcacaagaaaaggctccatcctctttttctcgaactaagaatagactaaagtatccaatcaagtcatctggaagatccagctttgcagctacagcctggggatagggatagaagtacagctcatcatactggctggttccaatcattctccaagcccaggaccccaggatgtaggggaagaaggggcagtgctgaacaagcgcctcacctccaggacatcctcagtctgatctgaagttagcacgttgaccagaactttctgcccgttgctgagcagcacttccaaggacacttcctctgtggggacctgctgtgtctcctgttgtgagcacacatggggatgggaagcactgccttgtcccttgccttgacctatgcccaactctatttctaggtcccttgtgtgtctttattctcagctgcttaaatataggctgtgatttctttgatttcataagaatagaagttccattccattaaaaaagatgactcctctgttattaagatgacatggcctggctgggtgtggtggctcacacccgtaatcccagcactttgggaggccaaggcgggtggatcacctgaggtcaggagttcgagaccagccaggccaacacggcaaaaccccgtctccactaaaaatacaaaaatgagccggacatggtggcaggcgcctgtaattctagctacttgggaggctgaggcaggagaatcgcttgaatccgggaggcggagattgcagtgagctgagatcgcaccactgcactccagcctgtgcaaaagagcaagactctgtctcaaaaaaataaaagacatgaccttccagcaaggtcctttccttaaatcttggtcccacccaaagccctacctgttgtgcccgacgcaggaaactgttgaaagtctcgctgctcccaagcaatgggtcttgccgaactacgaggacaagagaacattattacaggaacttagcactcactcttggctccccagtcctcctctcagtaggttcccccgaccccatttcctgggctgatggtggcctgccacatcccccagctggcctcacctcactcactgtttgcataaattcttcacctgccccacccttggctgccatctaggtgagtccagtctatagaactagggaaataacaatgatgttaatctaaagcacatcagatacaaattaagttctctccactgatattaagactagtgttatactagtatttctcatagatgttagtgcccaaattgttttgctagtacacagagttacacatcctcgtacactatttactttgctaactgcataacagatcaaacaagagccttcctagatctagaaattaaatcaggcccttccacagaaccagctgtttttaagtctctccccatagtcctcaatatagtcaacctagtttcctgcaaccactcaccagcttgcatgtacttctctaactgctctctcctctgttctacctcagcaggagtcagagagaaaagcttctttggggggaatgcaggaagcacattggccccatactccttccgaagctatttagagaaagagatacaacccttcacataaacacagaaaatgagatgaggcaatctacatatgctcataatgttctcttgggtgcccctcccttccctcagtccctgttcccctgtctaccctggtcatctgagaaacaattcctttgacagcggtagcacctcaagggagctgtcctagatataagttgtgctctattttactgtgtacaagtcagcccctccacagtacggggaggatttgtactgggccaggacctatagggagccccttgaccacctagcaagactgttcactgaacccttaaaggaaggaaagggctttataaagtgcacagttaatagctaagtctgttcacaaaatatcttaggacttaaagggactttgcagatcaaagaatccatctttcagttgtagaaactgaggcccaaagaaatcagtttctacaggcctcatgcctgtaatctcagcattttgggaggcaaggtgggtggatcacctgaggtcaggagtttgagaccagcctggccaacatagtgaaacccctctctactaaaaatacaaaaattagctgggtgtggcggcagccgcctgtaatcccagctactcaggaggctgaggaaggagaatcgcttgaacccaggaggcagaggttgcagtgagccgagatgtgccactgcactccagcctgggcaacaagagagaaactccgtcccaaaaaaagatatcaggtaacttgttcagggttgcacaactaattatcagtggagctctactgagttaaatagagtttaagatctggtaaggaaggaggagaaacattgcatcacagatacataacgataattggcacagctaaacacactgaaatgagccgaagaacacaaaaggaaatcggtgaatcgtttgtataagcagggaaaagaatttcaagttgccgctcagatgacagaaggaatgtgctttgacagcctgggtggaggtagtggggggaggggttggtttgtccatgcaggggtaaaggctactagagcagtaagactggacagaaaaccagaatataagaacaggaaggagcagttgttgcgcggacattaagcttcttagggagttcccggaaatgtcagacaagataaaccagggccctaccctgtggcagtgattaaaggggaactacagcctacgggaacaagaagagcgggtaaagggagacactgatgtccacgtgtagggaagggcttgaagctgtctcaaggcaggggtgctagtcccacctgctcgtgcagccccaggagctggctgtagcgcacccgacagtgcaggactcca

SEQ ID NO: 7626 - DNA, 6271 bp, Homo sapiens
aggatgctcacaactgtattcctgagctggacagtgagacagccatgttttctgtctacgatggacatggaggtaactttaacagatcatattggtaacattctaggaccccaattccagacgttccagggcaagaacaggtccctttgttcatttactttccagggtctggccctcattatcatttcctgcgtggtgctgtttttctgtattctgtcattcttttttcccagtaggtactgtattggtttataatctcaccaggacttgttttaatccaaagagcctctatctttttttatttttattttttaaaatttttaggctgggcacgcggtaggtcacacctgtaatcccggcacagtggatcacgaggtcaggagttcgagaccagcctgaccaatatggtgaaaccccatctctactaaaaatacaaaaattagctgggcgtagtggtgggcgcctgtggtcccagctgctcggaaggctgaggcaggagaatcgcttgaacctgggaggtggaggttgcagtgagccaagaccatgccactgcactccagcctgggcaacagagcaagactcttgtcttaaaaaacaaaaaagtgtacccagttgagctgattctttatctttttttcactggagaactaagtatacaggtgagaaaagacgagatatttatacccgagagaattgatggtgaaatccatttttttggatcagaacttccccaaacagtgtccttcaaatagggttcaggggtgctaagatatttatcccctcaacccttggggttcactccagtatggcatataaatattgtatcactttctatgtgtggggagcagtgctccaggtgaccttccttcctttccttctaggggaggaagttgccttgtactgtgccaaatatcttcctgatatcatcaaagatcagaaggcctacaaggaaggcaagctacagaaggtctgtctgcttacaccgcccattcctcacttgtgtaggcttttcccttgttctctagcccttgggcttttcctttctttttgtcctctagctgctgctgcttatttactcttgaagaattctgttcctaaaacgagcttattggccgccttttagacttgccttattattcctaggcctctgagctgtttttatctgtgagtgtctcttagtgtggtggctcacactcttaatttgtattccatccttgtgctcaggattgtatatagggagttcattttgtactagtcttagactattttgcttatattcaggctttagaagatgccttcttggctattgacgccaaattgaccactgaagaagtcattaaagagctggcacagattgcagggcgacccactgaggatgaagatgaaaaagaaaaagtagctgatgaagatgatggtgagtgtggcatcccttgtttgaggggaaatcagcattttaagaaatattctttaatattacttatcaattctaagataggatggctttctagggacctggggagtccttatgttaaagaaacctatgatgttctcctgcattgtatgtggttatgaaaaggagggagagaattatcttcgttgagtggcatctgagctgtaagcattgtatatacattatcttttgtcattgtgatggggtcttcctggttcctgctagtatttatgtgcttttttttcccctcaagactggagcagttattagccccaatagccaatcattaagcctaaatcctaattcacagtagcattgtgggcttcctggatcctcagccagaatagggtttttacaacttaacaataaaaaatgagacgtcagaggggaagtatagtaactagtgttgttttgattaagaaggggatgaaacacaaaaaccaaaagaagtctgtggaggaggaggagctagggcatgttcttctgagacttgagcgagaggaaccttgggagtgggaggttgtggggaagttagaggctgcaagggctgttgaggtagtgagagggacggatcccatgaggagtctggcatgggggctctgatttagcctcttccctgcagtggacaatgaggaggctgcactgctgcatgaagaggctaccatgactattgaagagctgctgacacgctacgggcagaactgtcacaagggccctccccacagcaaatctggaggtgggacaggcgaggaaccagggtcccagggcctcaatggggaggcaggacctgaggactcaactagggaaactccttcacaagaaaatggccccacagccaaggcctacacaggcttttcctccaactcggaacgtgggactgaggcaggccaagttggtgagcctggcattcccactggtgaggctgggccttcctgctcttcagcctctgacaagctgcctcgagttgctaagtccaagttctttgaggacagtgaggatgagtcagatgaggcggaggaagaagaggaagacagtgaggtaagggcctgtgagggcaggcagatgctgaagttgcagagaggtcctgtttggttgccgtctgtagttttcaactctctttccttctcctattttgacatcatcccccaagacccactgtattctaagctttagtcttgaattcattgagctccatcatcacaggtaccatttgcctttttacctcttcctttgttggtactataacaagcagatctagttctggcttttcagagtctgtctcctagagagagaacaaggagatagttgttaccttggctagttgactgttttcttctctggaaaatttattttctggccacagtgcctgaaagatatttttggctggcagcccttgccttgtcctgggctttttgctagtgactgctaagcccagttcaggatgtcagttgtactcatgctagccctttccatccccccaattttcatgaccatatacttgtatctttcagtgttttgaggacctgtgttcagtcaggacctcttgattctgagtatgagctgtggggagggaggggatcatcccagtctcagcagtctgggatcctccccctggcaggaatgcagcgaggaagaggatggctacagcagtgaggaggcagagaatgaggaagatgaggatgacaccgaggaggctgaagaggacgatgaagaagaagaagaagagatgatggtgccagggatggaaggcaaagaggaggtgtgtggggaaggggagcaatgagtcttgaaaagccacaaggcaggtgtgaatcccctaattttgattttgagacagggatccccctgatactttaggatggaagtaatagtcatggggatttattctgcaaggggaatgagatggtaagcctttggggttgaattatctaaaaacaagggagagggagtgtgctgctgtctctagaaagatgaaatgtgtgcttctcctgtttgttaaagctcttttgggggtcccagtgaaagcaagcataggtgaacgatcaggagcacatcagtgaggaacgcatgttcagaagcccccatgatgctccttttcttcctcttaagcctggctctgacagtggtacaacagcggtggtggccctgatacgagggaagcagttgattgtagccaacgcaggagactctcgctgtgtggtatctgaggctggcaaagctttagacatgtcctatgatcacaaaccagaggatgaagtagaactagcacgcatcaagaatgctggtggcaaggtcaccatggatgggcgagtcaacgggggcctcaacctctccagagccattggtaagggccaagaaactgggaaagacttctagggtctttctctctgtcccagactacctagtagcaaactttaatcttcctagtgcttgtgcctttcaaagcactttaatatctactacctctgttcttatatttctgtgaaataactaagatgggtagaggtatcattatacataggtatcattatacccatcttatgtaacatttgaatgatgaaaaagacctgtgagtgccgggcgtggtggctcacgcctgtaatcccagcactttgggaggctgaggctggtggatcgcctgaggtcaggagttcgaggccagcctggccaacatggtgaaaccccatctctactaaaaaaaaaaaaaaatacaaaaattagctgggcatggtagtgcaagcctgtaatcccagctactcaggaggctgaggcaggagaaccgcttgaatccgggaggcggaggttgtagtgagccgagatcgtgccattacactccagcctgggctacaagagtgaaactccgtctcaaaaaaaaaaaaacaaaaaagacttaaaataaaaagaccagtgagtgactttcttaaggttcagcagtctggtggcagggttgaaactagaaaaactaggacttaggactcagttccccattccactagattatggaactttgtaaagaagggaaatgaatggcaaggtttgacctgccacaaacacaagtctgtgggaagtatccaaactgctcatcaaccattcctttactccaggggaccacttctataagagaaacaagaacctgccacctgaggaacagatgatttcagcccttcctgacatcaaggtgctgactctcactgacgaccatgaattcatggtcattgcctgtgatggcatctggtgagcactggcagaatgccctaaattcccctttctgcagcatgtcttctcttataggactcagggcacctctaggattagagcctaggcagacctaggcctcttggtgggtgaagagcacccagactaaggcagagctgagaatttctgtagttatttacactggcctgggccaccacctctgtccatactcctctacgctgccttagtgagactggaagattctgactgttgttcttgaccccaggaatgtgatgagcagccaggaagttgtagatttcattcaatcaaagatcagccagcgtgatgaaaatggggagcttcggttattgtcatccattgtggaagaggtgagtaccagggtggagaagagagggtgtctggtctgcacagccagggttcactcttttaatctgagctaagtcggcaatctgggagcattatcagtaattgctgacagacgctaaaccccgactccaaagttccaccttctgtcatttccctgacttagccttatgccttatggactagcaggtgggccgttgtgtgatacctcttgcccattcctctcctaccaccctgactcagcaagccagccctcttgtgggactgtagattcctggcaaggtgttcaaaccctgtggctgagctacccccatccctttcttagctgctggatcagtgcctggcaccagacacttctggggatggtacagggtgtgacaacatgacctgcatcatcatttgcttcaagccccgaaacacagcagagctccagccagagagtggcaagcgaaaactagaggaggtgctctctactgagggggctgaagaaaatggcaacagcgacaagaagaagaaggccaagcgagactagcagtcatccagacccctgcccacctagactgttttctgagccctccggacctgagactgagttttgtctttttcctttagccttagcagtgggtatgaggtgtgcagggggagctgggtggcttcactccgcccattccaaagagggctctccctccacactgcagccgggagcctctgctgtccttcccagccgcctctgctcctcgggctcatcaccggttctgtgcctgtgctctgttgtgttggagggaaggactggcggttctggtttttactctgtgaactttatttaaggacattcttttttattggcggctccatggccctcggccgcttgcacccgctctctgttgtacactttcaatcaacactttttcagactaaaggccaaaacctaatcgtacgcatcgtgtccttttttttctgctgccgtggcccccgacttggtcccatctgtagcatgtggcgagcccccatgtgagtgtgtgcgtgtgctcgtgtgtgtcctgcgcgtgtataggagagcccagagcgagctgctggtaggccggcctggcgggcgtcgcggctgcccctcgccccctcctgcagccagaaatgatctagttcccccagggacaggttgggaccggtctggctggcctgaagcctggagtcgggcaggacgcctcctgcgctgctccctggccggctccccgctgccgctga

SEQ ID NO: 7627 - DNA, 655 bp, Homo sapiens
tcttccagattcaatgaatgtgcatccaacaggagcacctgggctgccaccttcagaccagaagagactgcggcgaatttactgattctattacgtgactgcccccagacacttggcaacacattgcctgcaaaggagctgctaactcatgtgctgaagctacatggaaaaaaatcaatgcccaaaatgttgctgcaattaattaagccttcacgagaaaacagggctgtacgttatcagtagttgagccttcccggcctgtttcataaggaactggcttctgtgacccaagtctgatgagcctgagacaagcttggctttacagcatcgagctgcaaaaggcaggtcgaagtcactgtgtggaaaccctgggctcctgcagacctatggttgtgcttatttccgaatgccttagccccttggcagggctgagaaagcgagagctcagtaggtcacatgaccacttgtgagccaatcactgttgcactgggatggcacacactgattggccagccctgggcagcgctcccaccctgcaggtgtttgaagtctgtgtatgagggatgtggtctggctatgggaaagcagggagctgtttcaataccaagggggcaggatttcaaagaagaaaaataaatcatttcaattacctaga

SEQ ID NO: 7628 - DNA, 11839 bp, Homo sapiens
gtcgactggaatacttgggagatgagatgacaggtctggtcatgaccaagacaaaaactcagcgtggcctcatggagcccatcactcacatcaggaagccccactccatccgggtggagacaggtgaggcgcagggctgtaagccagctagcatcttgtgcctggcccggaggcagggtagtgtggaagtggccagcatagctctacagtgaaacaggcccagggcctgtttctctgtggttctctggggtcttaggcaagtcccagagtcttcctgaagtccggctccctcttctttttcttcagtaaaacggtgagagagctaggaaactggagtgcagccatagagctgccgtccagtgtggagccttgagccacatgccgctggtgagcgcctggatcgtggctgccctgccttgagaagtgctgtcactgtcaactggacactggctttagtgtgaaaacaatatattttattaatcatttttatattgattacatgtcaaaatgacaatatttttgatatactgaattaaataaactatattactaaaatgagggcgggcacagtggctcatgcctataatcccagcactttgggaggctacggcggatagatcacttgaggtcagaagttcaaaaccagcctggccaacatggtgaaaccctgtctctactaaaaatgcaaaaattagctgggcatggtggtgcgcgcctagaatcccagctacttgggaggctgaggcaggagaattgcttgaatctgggaggtggaggttgcagtgagccaagatcatgccattgcactccagcctgggcaacaagagcaaaactctgtcttaaaataaataaataaataaataaataaacaaacaaacaaactatattactaaaatgaatcccacctgtttcttttttcctttttcagtgtggcatctagaaaactttcagtgacacgtgtggcttgtgcttgtggtttgcattctgtttctcttaagcagcactgctttagagcctgccaggctgcctgggttcaggtcccagctgtgtcgtgttagtgaaccccagagtggttgaacccctctggcctgtagtttcctcatctgtaaaatatgcacagggttgtgatagggctaaatgagatatgaaatgtattaagaggttctggctcattgttaagcactcaataaaaggtagctgctgttattatttttattataatccaaagatttggctatttggaagctaatttttcaggagtcttgtgtagggctgctgaggaggtataggacaggagaacgggagtctagctgccacagggaagctgtatttttagtccttcctagaaatggtgttgggataggcactctcagagcccttgagaagtgggtgagcaaggggacatggcagcagcctgtgctgagggtccttggacctcatgctaggattaccagcccagagggacgcttcataccgctacacctgggatcggagtctgtttctgatctaccgacgcaaggagctgcagagaatcatggaagagctggatttcagccagcaggttggtatggcctccatgccccagtcagaagccccttggggcgatgcctgtcttcagtcagctcatcttacctttctccatctctcggaggatattgatggcctggaggtggtgggcaaagggtggcccttctcggctgttactgtggaagactacacagtgtttgaaagaagtcagggaagctcctctgaagacacagcatacttgtgagtgcagcctgaaccctggggagagaggctgaagagttctccagcacctaccagtattaaagagcgggcttccctccctgagatcagggtgcctctagcctagcttctgtccagtggttgccacccactccttgaacccattccagcacctgtgctggctttcctattgccatctgctcctttccaataaccaactcctaatggggatttcccagacattcccttgctggtcaactgagggctctctagaccctcccactgctatgcatcttgaatgcctctggcatggagagtctgtgtatttctgtgtactgtgagtggctctggcaagagggcttaaagagtctgtgtgtttctaagaatctcccatctacagcaatgggtcaggaggaagctgcgtgggagtggagttgatcatactccattgcagggtagagctggttgtgtttctaggcttcctggtgaccgtttctgtggggttccacatggcatgactgtggcagcctaagagaaaataagtcattggcttttcttacagaggcacattggccagttcctctgatgtctccatgcctattctcggcccttctctgctgttctgtgggaagccagcttgctggatcagaggcagtaatccacaggacaaggtaaaacagcctccaccacacctgctgggagagcctccctcaggggtgcagccctgaggtgactggcagttaccagcagcctgcacagtctcctgtttgggtttttatctggtcgtgcattcagcacgtctgaaaatggtgacagcaacactgacttgagcaagaataaaatcacaaggctgcgagtgtcataagccacttggggcttatacccagcccccaagcatgtaaacaagcaaactcaagtaggtatggctctaagaaggttccaaaatattcttcagatgctaaggaatagaagtgttcattggatataaaatatattttatctggccaggcgcagaggctcacgcctgtaatcccagcactttgggaggctgacgtgggtggatcacctgacatcaggagttcaagaccagccctggccagcatggtgaaaccccatctctactaaaaatacaaaatagcagggcgtggtggtgggcacctgtaatccctgctacttggaaagctgaggcaggagaatcgcttgaacccgggaggcgggggttgcagtgagctgagatcacgccattgcactccaacctaggtgacaagagcgaaactctgtctcaaaaaaaaaaaaaaaatatatatatatatatttgttttatcttctcttcttgctattgagggtaacctcagagacaaccacgctggagtaggataccactctgtgtgacagtggccaagccctggaggcctgggacacgagacttgcagtgctaaagccagaaaagtcctgggcagaccagatgagttgttcactctaggccagggtttgcagcaaagacatttcttgtccctcctccttccagaggcaggttgggattgctgctcacttgacctttgaaaccctagaaggcgagaaaacctcctcagaactgactgtggtcaataatggcaccgtggccatttggtatgactggcgacggcagcaccagccggacactttccaagaccttaagaaaaacaggatgcagcgattttactttgacaaccgggaaggtactcgggagaagccaccctatgtgctagctcctgtctggggctggttttgtcctccgtgagacatcaaagtttagttatggcccagctcctgtaagtttgagccctgcttccctgccttgtccctctcattccttctgtgaaatgtgtggcctgactactcatgtctgttgagagactgatggaacttgagaacctggggaggtgagccaccagggagcagaagcgttctaggggctcagttatctaggtgcacaggcctggggctaggatggccagctgtctctgtttgcctgggactttagcactcaaattcccacattccaggaaacctctcagccctgggcaaactgggatggttggccagccacctggcctgggactcagttaactgcatgtaggagcatgtaggcctggggctcagccagctcctgcatgttgaaaacctcgggtctctgtccctctcaggtgtgattctgcctggagaaattaaaacatttaccttcttcttcaagtctttgactgctggggtcttcagggaattttgggagtttcgaacccatcctactctattaggaggtgctatactgcaggtcaatctccacgcggtctccctgacccaggacgtttttgaggatgagaggaaagtactggaggtaagggacccaggaccatggcccctgtggacatcaggtagggtatcctggtgttcttcctggcagtgactgaagggatcatatttctcccagcctaagaggagaattggatttttagcaaacaggtaactactcttgctccacaaacacttcccagggcttgtgatttaaaagatgggtgcgctggctaggcaggcatggagcagcttgcagcaatgccatgcatggccccactgagttagaaagaaattagactgagccttaagaggcagactgtaaagtacaatgtgtggccctatgtactggtctgtgttttgttcatcgctgtctggtactacacagtggagttgcatttaagcgacaagacttcaaaaccagggagaataattaattaatacatagcagcatgagtctgcccaccgtcccactcaatcagctgacaactcgagtgagtgtgaggtgggagcttggaatctgtcgtccgcagtcagtttcacagtgtggccatttgagccgtgcatcctgggatttggtggaaagctgtgcttttttattcattgtggcccccaatcacaaggccggctccttcatgtggggctcagccagtggtgatcaaaggtaattttgacaatgtcatgcttgctttactcattgactgtacaacccatgtctcacacaaggcgcccctcccgtgtttctgtgacactcactgaagcctgatgaaggttcaccaccatcctcagaagcacccccactatgtgccctgccccttcttcctaatctggtgacatgctaactgtgtgaccaccaggccccaggcagcagcagctgtcactggaactggccctcctctggatccttttcatccatttttagggaacaaggatgtctggagagactcagaggttttcaggtcttagaacaggcgtgtgtgtgtgtgtgtgtgtgtgtgtgagagagagagagagagagagacaatggcaggaactcagaccctaggaaggcacaaagtcctgggggctccaacttcctgaaggatgcattggttttgatagcctgggctgccatcctctgccaccttcccttttgcagagcaagctgactgcccatgaggcagtcaccgtcgttcgcgaagtgctgcaggagctgctgatgggggtcttgaccccggagcgcacaccatcacctgtggatgcctatctcaccgaggaagacttgttccggcacagaaatcctccggtgaggcccagcgccagcccctgccccctcatgtgtgccctgcgtcaagggtccccaacccgcaggccgcacagcggcaggtgagcagtgggtgagccagcattactgcctgagctctgcctcctgtcagatcagcggtggcattagattctcataggagcacgaatcccattgtgaactgcgcatgcgagggatggaaattgtacactccttatgagaatctaactaatgcctgatgatctgaggtggaagtttcatcctgaaaccattccccaactccctgccatccgtggaaaaattgtcttccacgaaaccagtccctggtgccaaaaaggttggggactgctgccctaggtgacagtaatagcaaactcttttatgtgccaagctctgttctgcgcatcttccatgagtaactcacctctcttcacagcagtcctatgagatgggtactatttatttttgtttatttttttaagaaatagcgtgtcatactgtcacactccaggccagagtacagtgtcccactcatagctcattgtgacctcaaactccccggctcaggtgatcctcccacctcagcctcctaagtagctaggactacaggcatacatcaccatgctcagctaatttctctttttttttttggtagagataggatcactctatgtcatacaggccggtcttgaactcctgagttcaagtgatcttcctaccgtggcttcccaaagcactgggattgcaggcttgagccactgtgcctggcccttgtactatttatgtccttatttacattgaagaaactggggcctgcaccccagcctccccctcacatgccttcccatcctctgctgcagctgcattatgagcaccaagtggtgcaaagcctgcaccaactgtggcgccagtacatgaccctgcccgccaaggctgaggaggccaggccaggggacaaggagcacgtcagccccatagccacagagaaggcctctgtgaatgctgagctgttaccacgctttaggagccccatctccgaaactcaagtgccccggcctgagaacgaggccctcagggaatccgggtcccagaaggccagagtggggaccaagagtcctcagcggaagagcatcatggaggagatcctggtggaggaaagcccagatgtggacagcaccaagagcccctgggagccggatggccttcccctgctggagtggaacctctgcttggaggacttcagaaaggtgcttccaagaccctggaaggcaatggtagagaatattcctgcctcgaaccaacaagggaggacccagcagcccctcttgctctatgggcaaagaaacaaaacctgagagcccagagaaagtgatctcttgggttatctatctatctatttatttatttatttatttatttttgagacgaagttttgctcttgttgcccaggtgggagtgcaatagcacaatctcggctcactgcaacctccacctcccaggttcaagcgattctcctgcctcagcctcccaagtagctgagattactggcatgtgccaccacacctggctaatttttttttttgatggaatcttgctgtgttgcccaggctggagtgcagtggtgcaattttggctcactgcaacctctgcctcccgggttcaagtgattctcctgcctcagccttcccaagcagctgggactacaggcatgcgccaccacatccagctagtttttgtatttttgtagagacggggtttcgctatgttggccaggctggtctcaaactcctgacctcgtgatccacccaccttggcctcccaaagtgctggtgttacaggcgtgagccaccacgccaggccaattttgtatttttagtagagacggggtttcaccatgttggtcaagctggtctcgaacacctgacctcaggtgatccgcccgcctcagcctcccaaagtgctgggattataggcgtgagccactgtgcccagctgggttacctgtttttgtctggggtgcccaagctgctatattccaggaggggggcctactctctgaccctggcaaatcttggagaaggggttcataggtacagatttctgaggggggtccctggctcccaccaaaggcacccagacagctctccatagctgcatcccctcctggttcctggtcccctgccacccatccccacatcaccatgcccttcactagaggacacagccttggtgtcctggtgcagaatggtgcccatgaccctgccaggcagtgatggtgctccctgatgagaaccacagagaggatgcgttgatgaggctcaacaaagcagccctggagctgtgccagaagccaaggccattgcagtccaacctcctgcaccagatgtggtaggtgccctgccaggagagctgccccatctccttccctttgtggcatctgcaggggtcctgggcaggcagtcctgggactccaggggtctgagcttccgttgagctcaggttgctagagcatgccgcaaacattccacgttctggaaccctgccagtgcctactgctcactggagagcagtcacagcagatcaaacaccttatcttttttttcttcccctttttgccttgttccttctcagtgagcaggggaatggaaaaaggagaagccagagggcaggaagaagacggggggcagattccaataaaagcttcatttctctgttgtcaccctcccctgtacctgtttggaacttgcttgtataggcgtggggtccttttcaaggccctcaggacaagccccaggagccttatgctggaagtctcatgcaaggttcagcccctccagtgcgactggacccaagtctggccctggcctcaagccctctgaagtaggactgaattcatgcaggcctcctaaccctagtcctgggccatttttttcttggttgccacccaaggcaagccagaaccccctccaagcacttgccctggcggggaacagtgaggatgctggctgttcaggggtgtggcatttccacagcagctcgtggcaccagggtctttgaagggagggacccaagcctctgcaggttcaaggacaaatgaggagtgatggcatttctccactgtgtcttgccctctagtttgcagctgtggcgagatgtgattgacagcctggtgggccattccatgtggctgaggtctgtgctgggcctgcctgagaaggagaccatctatttgaatgtgcctgaagagcaaggtcagatcttgtgcaaccaaccacacctctgcatagccctcctcatctctctgaatggacaagcagcagtgcctgggccagtcatactcctttggtggaagctctgctaggttgagcccatggagtaggccccttacccctttctgtccgctgccaggatgtggtacccagaagctaccttagtgaccaccttggtttagtaatcccagcaaagttaaatgacttatccatggccattcatggcatggcagagctgggaccagaacataggcaccacagtcctgtttcatgaagccacgcgcctaccagggctcaaggctattgccctttgcttttccacctcccctcaagcctcctcacgtacctgcagcatccactaggctgttgggggcctgccatattttcttccacccacctcccttagatcaaaaatcacctcctatcatggaagtgaaggtacctgtggggaaagctgggaaggaggagcggaaaggagcagcccaggaaaagaagcaactggggatcaaagacaaagaagacaagaaaggagccaagctgctcgggaaagaggcatgctggggcgtggtctgggccaggtggggctggggaggggattggaggggctgcggaggtgggggctgtggaggtgggcatgtgcccaggctctcccagtgagctactgttgaggacatccttggcctacctctggagctcctgaaggctatgtgtgtctccctcccccagcaggaccgtcccaacagcaagaagcacaaggcaaaggatgacaagaaagtcataaaatctgcaagtcaggacaggttttctttggaagaccctacccctgacatcatcctctcttctcaagaacccatagaccccctggtcatggggaaatacacccagagcctgcacagtgaggtgaagggaagcgcccagcagccattcccctgcctcccacctgccttattcattccgttcagtctgcagacaataagtgcccactccatcatggtggaagcagagctgcttcaggaagggcatcctcgtgtgtgagacaggcctcatgaataaggaatgcgcctagcatgttaggtgatgagtacgacgggagagaagatagaccaggcagggaatggaggcacagaggcctcagtgaggaggtgacaacccacaaagatttgaagggaggggaagggtggccaagtagacgtccagtaaagagtgctccaggcatggggagcaactgccataggagggaggggccagaagggagagggcagtagtggggagcaggtcataggggtgggggatggtttgcaggctattgtgaagacttgggatttttcggagtgaaatgagaagtcacgcaaggttttgaatagaaacgcaatagggtctgataggctttagaaggtggctctggccgccctttggagaacagactctaggggaacagagaggaaggaagcccttctctttcttactccccgttaggtgcatcctggcagatgcgttccttgggagaacaccatgcagggtgcattcccatcaactgtaagagtttgaaggactagagagacttcatcctaatccgttcttaagtagcaggtccttagaaattcacccaggttttccgttttgtttgttagtgttgttgtttgttttggaggggaggtccacaaagccattttcaatatgtcagtatgtctattggcgacgtcttgccttcctctaatgtggatagctggggagctgggattacatcatgtattgtggtcacactctggatctcatttgatcaaaagttccatttgccactggtgacatcactaagatatcagatggttgatggggtctagaaagtaattaaagggctctgaggacccatgggggtcaacgtcaacccttccatggctctttgatattaagaatcaacttgcagaccaggtgcggtggctcgtgcctgtaatcccagcactttgggaggccaaggtgggcagattgcctgagctcaggagttcaagaccagcctgggcaacatggtaagatcccgtttctactaaaaattcaaaaaattagccaggcatggtgacactcacctgtagtcccagctacttgggtggctgaggcacaataatcgcttgaacccgggaagtggaggttgcagtgagccgagatcacgccatttcactccagcttgggtgacaagagtgagactcttacctccaaaaaaaaagaatcaacttgctggccagtggctcacacctgtaatcctagcacgttggaaggctgaggcaggtggattgcttgagcccaggagttcgacatcagcctagacaacacagggagaccccatctctgcagaaaaaaaaaagaatcaacttgtctgggcttgtatgatccaaccccattggaggggtcagtcccagagacctttcagtctgtggatacaggaaggaaaattggcctccaggaggccagagtagaactggggctgagcccaggcccaccccaaacggctaaatgggcaccgctccatgggctccctggagttgccccttgaacaacttagctctagtatctccatatgtcaaaggtaccagcgcagggccacctccccagactggtttgaaaagtaaaactgcaaaagcaggtggattgcttgagcccaggagttcgagactagcctgggcaatgtggtgaaaccccatctctacaaaaaatagaaaaaagtagccaggtctggtggtgcacgcctgtagtcccagctacttgggaggctgagatgggagaatcacctgagccagggaagtcaaggctgcagtgagccatgatcacaccactggactccagcctgggtgacagagtgagatcctgtcaaaaaaaaaaaaaatctgcaaaaccaaaaattatttcacaagaactttgaacttgtgaaattctttcacaaacaactggtttctttcccctctccagctattctctcacagcatagttcatatataggtgcttcccacagagtaaactctgcctgtgatgttgtcccgttcttccaggtccgtgggctgctggacaccctggtgactgacctgatggtcctggctgatgagctcagccccataaagaatgtcgaggaggctttgcgcctctgcaggtgactctcgggcccaagcaaccttctggaaaacgggttaataaataaatcaataaagaaccttcaagtttctactac

SEQ ID NO: 7629 - DNA, 4225 bp, Homo sapiens
ggaggcaaacgcacgcgggaagagctgctacccattccagggaccctgccgctgcccctctgaggggtctgcacctcctgggagcaggtgggtctctgggacgagggtccatggtggatggctctggagacgctcccgaggctgtgccgtcccgctgctgcacaggtcggagggtcaccgcagaggctactcgggctggggctggggccgagggagcccgcactggaggtaagcttcctccctggccccctccctggcagtggcggcatggaaggcgggggttggtggggagcaaacagtggttctggggcttagtctcttttccaggtgcgagggagaaggctgagctgtagaggacctaaaggcttctttcctgccacccctccctccctgccgcccccaaaaagggactcagggccccctccccaaccatcctgggacttagcatctttggtggcatcttagcatctttggtggcattccccacagactccttctgcacatctctgctgtttcctcttcttcagcccctcatgcacacctctagcctcagggcagtcccccctcccccatcttctgtgctcccgggatgcagctattacagtggccagaagcttagagttcaagctcaccccctgtcccttacagcatcaagaagggcactgtcattccccactgctcaggctggatctgacttggaggcaggggctggagcccaccttagcagaggacgggaagagggtgtgggctgggctggtgggtgcacagactttacgcaaactcatgcacgtgtgactggacagatctgggttctctccatctctccgaaacccttgctggggatgagcgatctgcatttttcggtcctgacttttgggaaactctccagatccccccatcctgcaggccctgagaagagcagcccctccctactgcgcagttctccttgggaccctgtatgcaggagagagctgatactccgtgccccgtggcccatcccaccgcctgctggccctgctcccatcccctcagcttcctccctcctctgccctctcgtcatctctgaattctcaggccctgccctctctgtgcccttccctccacctgacagggtctggctcaaggtcactgcagtaattccatacccagctgcccagggctgctgctgctaccgccaccgccttatcggccgctgggtttctgttacactcccttttatttctgggcatatcgtgttcgataaaaccctttgcttgtaacactgctggcagcgctcccagctgctccctcccgcgttcccgcgttccttcctttcctcctcccttctctgcgcttgggcaggcttcttcctttcctcctcccttctctgcgcttgggcaggcttcttcctttcctcctcccttctctgtgcttgggcagcctcaccttgtcccctcaaactccagagaaggaaaatcaaggtgcctccccatgtttctggccccgcccttccccccagcccctgcaggggtgtgcagagaatgcccaccttctgtgagaaaggtccaggcagggccgctgggcccacaccgagagtcccctcccagaggctggtgcccccacacaggccaggccggagggccagggcagccaggtccaggtagggctctggtgcagtcacagtgcccgactggttctgctagttccagcggccagccggtaggggcgtgtgctgggcgggctttggtgcacattatttcccatcttgactctgccacccccagccacgggttggggaggtgaaggcaggtctgagtcactagcaagggggagggcaggagttaaacaagttgtggccgtggcattcccacagaaggcccacgacccgctggaaggaaagagatagcagacaaaaggtaggctgcgctgtgggccaggcactctccacctcgcccactcccacggtatcttattctctgggcccccaacaaaacctgccaaggcatgttttcaaagcgtggggctgctttgaactgagcccagcactggcggggctggggtggaaggagcgtggaatcgggtgcgagaggacagtctccttcagattcctgcttctggcagcctggggaccagttggggcacgggctgggatggagggtggagccgaaaggtgtttggtgggtgggggacagttcacgggtgaagtggaggctctgcaggcccagacagtgtgtgtgtgcatgcacacaccagtgctagtgtgggaggaatggtggtggtcagggaattcctcttttggtttctgaaagggcctttgggaggaccttgggcctggagttgtattcagcagatagcctggacctgtggctactggggggaattgggctggcccagctcttctccctgctggggtaccagaggtccactatgtgtccagcgttttggggctttggagaacccagactgttcctactctcagggagcttccattctagctgagaaggtgggactgagacagtaaagcaatccgatgaaataatgaccaaactgggtaacactgacaataagaattggattagtcttctggagtcctggatggtagtccaggctctgccacttacgtgccatatgatgcaggcaggtcccatcccctctctggcctcaacacttccatgtgtacgtgggggtggcatgcaggagtgttggcagtggccagaactctgaggggcagtcttcctcaaacgatacttgctctcttgccttctggcccaggtcatagcatttcttctgagccgccctcccctgacttgctggttcactcctccttactcttcccttgtgatcttggatctcagctctgtcaccacctcctctaggaagtctcccctgattttcctggcttgggtcttcctgtgcggctctgcactcccacactggactgtgattttctgtaccctctcaactgaacgtgggtggaccaaggcgtgtgttctgtgcctggcatggtgcctggctcagaaaaggcctccgggaaataggtgttgaatgcatcaaactacaaaaattaacaatatgagaaaagtgagctgaggagctaggaaggataggtcttaagctagatctcagcagaaacagaggcagtggccgagcagaagcaaggcaagcgggcattcctggaatcctgttagcgttcccccatgaggccatgcactcttaggtggggcttcctggggtcatcttggttccccatgcagcagctctgtgatctcggacaagtcacttaatattacagggtctcgctctgttgcccagtggcctgaccatggctcactgcagcctccaactactggcctcaagtgatcctcttgccttggcctcctgaagtcctggaattacaggcgtgagccactgcaccgggcccatttaatactctgagccccacctttcccatctgtggatggaggtaatgataatagcatctttggggtgtggctgtgaagatagatagatgagcatgcaaagctccaagtgcctgctgaattgtaagtgaaataagaacgtgtgccgctgaaggctgtccctggaggcagggacactctggccaggcctcatttagttggtcagtggctgagtgacccatgaggtaggcctctgcccctgagttcctggccctctcttcctcagccccatgtggaacccaaggatgcagctgctctgctaacacggcagcccatccttcaagactgtgacctcgccacagtggccctcagccctccacctccggcgggggcgagggccacccacctccaagtctccagccatgacgacctccgcactccggcgccaggtgaagaacatcgtgcacaactactccgaggcagaaatcaaggtgcgcgaggccaccagcaatgacccctggggcccccctagttcgctcatgtccgagatcgctgacctgaccttcaacacagtggccttcaccgaagtcatgggcatgctgtggcggcggctcaatgacagcggcaagaactggcggcacgtgtacaaggctctaacattgctggactacctgctcaagacgggctccgagcgggtggcccaccagtgccgcgagaacctctacaccatccagacactcaaggacttccagtacatcgaccgcgacggcaaggaccagggcgtcaacgtgcgcgagaaggtcaagcaggtgatggccctgctcaaggatgaggagcggctgcggcag

SEQ ID NO: 7630 - DNA, 1272 bp, Homo sapiens
atttatctatgccaacggagaaaatcgtcagtgttcttagaaatagcttattaaaataatgtgttatttttcatgggctttgttactgagttaacaaaaaggagtagggcatttaaattttgggatagttgctttagattgcatgtgtaaattaatatcttaagtattttttggtaaagagttaagcaaagattgaattatttttagatatttttaaaattacagaaacactacatttaagttagaaaattaggaaaacagtcatcatatggagagaacaaagaaataaaaatactgaagtctgaaagagttttagatgttttatgtgtaaatgaaattggtaccatacagtttttctaattttctaattaaatgtagtattgtgaatattttctcttgggaatgattacttttctttggagtttgatagtggtataaactgtttatattttgtattctatcaggaaagtattacagtaatggaataattataatttcattgagtgcgtctcctctttttaatatgaattttgagcaagtttttagattcatttatatgaagtgtccatttttgtaggtaaaagtagttgaaaaaggtaatgtatggttcaacctaataacagaaaatatctagccttaattagaaaaataagtcataaagacaactttgtttcaaataaggggaaatacgatagcagtcatgaaaaactgaaggatacaaagagaatattttaattggtagccatacaaagtggagatattttagaatctatttcattctctaatatatttgagtcattttattttgggtaaaataaattataggcggagcatggtggctcacgctggttatcccaacactttgggaggctgagggggcccaaatgcttgaggccaggaatttgagaccagcctgaccaatatggtgaaaccctgtgtttacaaaaaataaaaaaaaaaaattagccaggtgtggtgacgtgcacctgtaattccaactactcgggtgactggggctggaggatcacttaaacccaggaggccaaggttgcagtgagcagagataatgccactgcactccatcctgggcaacaaagtgacacctgtctcaaaaaataaaataaataaatagtagcagaatccttttagcaggctttaatgttaagcatgagattaccattatttgtaacattttttaaatagggacattttactgtttcttacattgctgcttatttatgttatttggcatttcctggctggtcacggtgg

SEQ ID NO: 7631 - DNA, 9731 bp, Homo sapiens
  SITE (5352): n equals a,t,g, or c
atttatctatgccaacggagaaaatcgtcagtgttcttagaaatagcttattaaattattgtgttatttttcatgggctttgttactgagttaacaaaaaggagtagggcatttaaattttgggatagttgctttagattgcatgtgtaaattaatatcttaagtattttttggtaaagagttaagcaaagattgaattatttttagatatttttaaaattacagaaacactacatttaagttagaaaattaggaaaacagtcatcatatggagagaacaaagaaataaaaatactgaagtctgaaagagttttagatgttttatgtgtaaatgaaattggtaccatacagtttttctaattttctaattaaatgtagtattgtgaatattttctcttgggaatgattacttttctttggagtttgatagtggtataaactgtttatattttgtattctatcaggaaagtattacagtaatggaataattataatttcattgagtgcgtctcctctttttaatatgaattttgagcaagtttttagattcatttatatgaagtgtccatttttgtaggtaaaagtagttgaaaaaggtaatgtatggttcaacctaataacagaaaatatctagccttaattagaaaaataagtcataaagacaactttgtttcaaataaggggaaatacgatagcagtcatgaaaaactgaaggatacaaagagaatattttaattggtagccatacaaagtggagatattttagaatctatttcattctctaatatatttgagtcattttattttgggtaaaataaattataggcggagcatggtggctcacgctggttatcccaacactttgggaggctgagggggcccaaatgcttgaggccaggaatttgagaccagcctgaccaatatggtgaaaccctgtgtttacaaaaaataaaaaaaaaaaattagccaggtgtggtgacgtgcacctgtaattccaactactcgggtgactggggctggaggatcacttaaacccaggaggccaaggttgcagtgagcagagataatgccactgcactccatcctgggcaacaaagtgacacctgtctcaaaaaataaaataaataaatagtagcagaatccttttagcaggctttaatgttaagcatgagattaccattatttgtaacattttttaaatagggacattttactgtttcttacattgctgcttatttatgttatttggcatttcctggctggtcacggtggctcacgcctgtaatccctgcactttgggaggcctaggcaggaggatcacctgagttcaggagttggagaccagcctggccaacatagtgaaaccccctctctagtaaaaataaacaaaaattagctgggcatggtggtgggtgcctgtaatcccagctactggagaggctgagacaggacagtcgctggaaaccgggaggcagaggttacagtgggctgagatcacgccacagcactctgctgggcaacacagcaagactccatctcaataaataaataaataaataaataaataaatagcagaatcctgttagctggcttaaattaagcatgacattaccattatttaacattttttttaatagaggcattttattgtttcttaaattgctttttagttatttggcatttccctttgtcttcatagcgtactccaaatagcgtcctaccaagaaacctcacggtgagatgtaataccaaagcaaccatcttgcatttaaatgtataaagtatcccataaaatgagaataatcctacagggtacacacacaagttagttttatgatattatactttttgtttaattgcttgacatatctctgaaatagtctgagagaaggctataacacatttataatctgtccttgtcacttggataaacacttgggttcctgtctggggaattgttaatgcgtgtggtgtagtgattcagagcacgggctctgggttgcttgggtttgaatgcttgcatagtcactagctgtgtattcttgatctaattatttaacttaaactgtgcctcagttttctcactgtgaattaggttatgaggttaagaaaaattaaaagtacttagagcagcatatatagcagttaatctataattgtaactattgctactgctactgtgcaaagacctacaggctgcgaatgaattgtggcaagaacaggttacctggggcttagggtaggagtgaaatagtctcccctctaaaaggctgagtaggtgggtcatagtatggagtacacagaaccaaggataagacatttagacttaatttgatagattttgaggaattaaacatttctgatcaggaaagcgatataattaggaagattaacttagtaataatacaggattaatgtgtacagggaaaccataatattgtgattttaaaattctaaattggaatataaacttaaatattctgttcaggatacagatgtatttaaattaaaaatactaatgattatatactataattcatattaatagtctttaacacttttattatacctttgctgttttggcttgactaaattctacattttaatttaagttttagagattaatacagtgtgctgagtggacttctcctaatctaccaaacaaatacttcttacttttttttttttttttttttcctttagacagagtcttgctctgttgcccaggctggagtgcagtgatgcaatcttggctcactgcaacctctgcctcccgggttcaaatgattctcctgcctcagccttctgagtagctgggattgcaggtgtatgccaccacacctggccaatttttgtatttttagtagagatggggtttcaccatgttggccaggttgatctcaaactcccaacctcaatcgatccgcccgcctcggcctcccaaagtgctgggattacaggcgtgagccactgggcctggcaacaaatgctttttaaataaacacaatattctcgccaattcactgcctgttagttagtggtgggaaagacatgcaatctggaaaacccaaaatagtacagagagcaagcacagaactgccaattgcttgccccaaagcattacaaatctctggtccagaaggagaagtatcagattcagcctagtatgtgcttaagaatgtttgtcgaatcagttaatgaaacgtattttatgaggttctaatgtagcgcagtattgcactcccggcagattgacttataataaatttgtgaaaatttttaatgatttgataatgcgaggatattgaagcctagttaaaataaagcatattatttctggttttaattcccaaggggatagaaatagccaatttttggggtatattttctaccacaaatatttagcactaaatatgcactgtctacaattttaaaatttatgttgtctctttttttgattattagacatataaattaaggatacatctgtacaactctaaaaatgattgtccctataacagtatcagaagtcttctgaattggttttattgtcagtgcaggggtagattggcagttattaccctttgttgtgaatttagagacataaatattgctttttctatttttaagagtgctgccacctgtgccaggaggtgtgggcgattgtaaaaacattagacataagagagcctggaaaaatggatctgttttctgacagtgaccacggtgtaagataatttaagatactagtactattgtttattgaactcattgcaagtgggcattttgtaggagtgtgggaaggctggatttttttagttttgtaatctgtatctatagattacagtctacaattccaaatggtgggattgataaaacctttgtttagataactccaagcaagaacctagcttctccactcctcctagctttttatttttaaatatatttacacacttatatgcatatgcctctttttccacctaaactatttgaggcaattttcagacttcacggacctttgcccctaaatacttcagcatttaagtcctgtgaatgagaatgtgaagcactcttttacgtaaccagagcacttttggcatgctcaagaaatttaatatcgatataattaaattatctaatatttagtccatattcaaatttcccaattgtcttagcaataccttttatagttttctctctctctgatccagaatgcaatcaggatcacacatttttagatggcttgtgtcctctcatttagaatattcctgaagttgtcttggggatcaatgatattgatgttatttgaagggagcagtttagttgtcctgtaaaatatcccacattttgaatttgtctaattgttttcttacagttagagtcaggataaacatatttggcaagaatactgagtaggtgatgttgtgtcctttccacggcatcacatcagaaacaggtcatgtcagtttgtctcaatattgatggtactgagcttgatcccttgattaaggtagtgtctgccagatttctccagtgtaaagatatcctttccttttgtaattgctaagtaaatttgggatgaaactttgagattgtgtgaatatctctttcctcaaaagagcctaattttgagcctgtttaaaccaaccgcagaattccggaatcacctgcttttagaaaatcagttgagatcacatgaagactgcatttttaagtcacagcagagttcaagaggagaagagaataaaatattgaagatctaccaaaggcaaattataatggcaatgtcacactatgaaaatgaatagcccctattgcttagcatacctaaaaagagaagtgttgacattgaattttccaaaatcatagacaataatgtatgtaggaatatattactgtgtatcttagagtctgtgaactttcaattgatttttgatggtttctggttatccttaactaaatggtaaaaataatttcatcggtattatacatgaatttattatcagttgaaattaaaaaattgctttctggaaaagtaatgactattttatatataaattgacaggaataagattatctcttgtcattttgaaaatttctttcaaggagaaaatctgatctttgactcattttcactctgtttttctatctttttttttagtggtattaaatttgtgagtcattgaaattaatccctgactgaattggaaaggaattgtatttgcagtatttggatttatttatttttcaggtatggaattctggtgattttgaaaacatgaatgataccattttgcagcagcattgtagatttgtagtattttagattggtatcacagtgcacctganaagtaagtttcattttacttttttttattgttgttgagacggagtctcgctcttttgcccaggctggagtgcaatggcacgatctcggctcactgcaacatctgcctcccaggttcaagcaattctcctgcctcagcctcccaagtagctaggactacaggcacctgccaccacacccagctaatttttgtatttttagtagagagggggtttcaccatgttggccaggctggtctcgaactcctgacctcaggtgatctgcctgcctcggcctcccaaagtcctgggattacaggcatgagccaccacgcccagctactttacctttcatatttgtcattattttgtggataataatgaagaatacatttgtatttcatgagaaacaagtactttcaggaaaaacacatatccagtgataaatggcagctaggtctaagtagtttataaagtatacttttatttttcttggatctgaattattcaagttttgatgtaaatttcctgattctttaaataattacattactgttctgtttttctgttttatttgaaagaatgagtttgccaaagctataaagtagtaagtttttcattgggtgattatctgaatgggtctagtgcatacttactaaatattagacttaatgtgtaattatatacttgaaaggaaaaataacatacttattaagactgataaataatacattcatattgtaaaattatggtaagatcataatctcagttctttcagatgaagaattgaaaaagatctagtgaattagataaaattattaaggtaaatatgcttgaaattgagagaacaagctaaagtctatcttttgagtgtaagtaaaatcgatgtgttaccacaggcaacttactgaaccatgtaattagtttttttctatgaaaaatgagacatactgagattgtgttaaagtagcatgtaaagggcttatgttctaatgatatgaaaattaaagaattggtaaaaaaaagttataattttcagtttgttggtaagtatagttattatggcctaatgttttgcgttgatatgaaatcacctacttatataaagtaaacctgagtaaaatcctcttaaatgagatgttagagtcaccattggaacaaatagtgttgaaaattgtcttaacactagattaactgttatttggtatattgttttttaaaatgtgagtaatttttatgattaatacattgtgactggtagataagtgtttagtctaacatttttaagtgtagccatgtttgatgcccccctcaccatttgtgtatattttatttcaaaagcttgtactttcatagaaaactttaagatttagaagaggctgttgtggcctggtgtgatggctcatgcctgtaatcccagcactatgggaggctgaggagggaggatcgcttgagcccagaactttgagaccagcctgggaaacatagtgcgataccatctctgttaaaaaaaaatttaaaaaagaggttgttgatcattaagatggcatagtgatataggtaaagggtttttttgtttgcttagcaaaatattttcttagttttatttcttagggaggctgaggtaagaatctgaatgtggaaaattgaagaaaaggtttaaatattggtagaatttagggcctaaataattcgagaaagaattatatattagaacattaacattgaatggagtagagctacacatttatagggaataacaccttctgcttataagcaaattcattgctgacgtgtataaatggcattaggttggttgtactgttcacattattttatataggagatgaaataaaaattccctaaaataaaactagggttttcttaggaaagaggaagtggggaatggatcttagtgggtcatgaacgagtgtcctcttctgcagtgggaccctgtctctgcagaaaagaaaagcagtagttgggcatggttggtgttcgccttgtagtttcaactacttgggaggctaaggtgggaggattacttgagcccaagagttcagggttgcagtgagctatgattgtgccactgcagtccagcctgagtgacacagtaagaccctatctctagaaaagaaaaaaataaaacctgttgtttagtgtagccacctcattaatgatcttagcaagatcttctgaatagagaagctgcagcttcttcatcagcacttgctgcttctccttgtgtctttatgtaagggagatggaatctttccctaatcttcatgaaccaacctctgctagctcccaggtttgcttcctcacctctctccgtcttggtagaattgaagagagtttgtgccttgttctggattcggctttgacttaagggagtatggtggctggtgtgatctttcagaccacccagactttctccatatcaacaataagcctgtttcactttcttatcattcatgtgtttgctggagtagcacttgtaatttccttcaagatttttttaaattttttatttatttattttttttgcattcacagcttggcttcttggctcaaaagcactagttttcagcctatcttggctttcgacatgacttcttcactaagcttaatcatttctcacttttgatataaagtaagagatgggcagttcttccttttcacttgaacatttaatggccattgtagggttattaattggcctaactttaatattgtttctagcaactaggcttgaggagaataagagagatggggaggagccagtcctggagcagtcagaacacatacaatagtgatcaattggttcagtctgctgttttatatgggtgtggtttgtggtgcccctgaacaatataatagtaacatcaaagatcactgatcacagatccaccataacagatattataataatgaaaatgtttgaaatattgcaagaattaccaaaatgtgacacagacacaagaattgagcacatgctttttgaaaaatggcgctgataggcttgctcgacacagggttgctacacaccttaaatttgtaaaaaatgcagcatctgtgaagcgaaacaatgtgaaatgcaataaaatgagatattcctatatcttattgaggtagttgataagctggaattacatatctgctatcgttagagatcttctttaccccttattttttcttcgtagagatctgttgtcatagcccagatattgaaaaatcagagataaatagcgaaagaatgggaaaactattggtgaagcagaaggctacctttgagttgttttatggtctctggatctgcttaaagtataatagactaaactgatgtatagatctctctgcttaactttctgtgaattagtgtttgaaaatgtaattacagatggtttccacttggtattgttttatgatggctgagcaaatggaaattaaaacttgatatactcagctataagtatcattgggcctaaggttaaaaaaaaaaaaccttaatggtagaaataacacgtaaatatttttttcctcttaaaaaacccagatagtgtaggcatctgtggtgtttttttttttttttttgagatggagtctcactctgttgcccaggctggagtatggtggtgcagtctctgctcactgcaacctccacgtccggagttcgagcagttcccctgcctcagcctcccaagtagctgggattaaaggtgtgtgccaccacacctggctagtttttgtatttttagtagagatggggtttcaccatgttggccaggctggtctcaaacttctgacctcaagtgatctgccctcctgggcctcccaaagcgctgggattataggcgtgagccgccactcctggccgaaatctgttttaagtatagaacatcatgaaattggattctgttgctttaagcatttcatgactgagctgctgtctggatgctacctgaagagattctcattgaatatcattatggccagtaagtgttccataattttctttaagctccatctatgtaaatatttttgaacaattttgcacaagtacagggccacatacctatttgttataaacccgacgttgataaaatgcactcttagtataattgggtcttgttttgatcctggcagtttcatattgggatttggcagtgagttcaacagaataagcattatcctcttgaggcccatctaggattgaactaaagggcttctacaatatccacatgatcatacaattagttctctctctccctctcttttttttgtgctgtgatagtgtaactgaatatgagctggttgccagggtattgtggtagaataataccctgcagtaaacagttaatcatgcagcagaactggcttgatttaaaaaaaaaaaaaaaaaa

SEQ ID NO: 7632 - DNA, 547 bp, Homo sapiens
gaaatagtctgagagaaggctataacacatttataatctgtccttgtcacttggataaacacttgggttcctgtctggggaattgttaatgcgtgtggtgtagtgattcagagcacgggctctgggttgcttgggtttgaatgcttgcatagtcactagctgtgtattcttgatctaattatttaacttaaactgtgcctcagttttctcactgtgaattaggttatgaggttaagaaaaattaaaagtacttagagcagcatatatagcagttaatctataattgtaactattgctactgctactgtgcaaagacctacaggctgcgaatgaattgtggcaagaacaggttacctggggcttagggtaggagtgaaatagtctcccctctaaaaggctgagtaggtgggtcatagtatggagtacacagaaccaaggataagacatttagacttaatttgatagattttgaggaattaaacatttctgatcaggaaagcgatataattaggaagattaacttagtaataatacaggattaatgtgt

SEQ ID NO: 7633 - DNA, 424 bp, Homo sapiens
attgcttgcttagctgggtaatcagcaaagtcccagaacttaacattcatctcaaagcctgttctatgtagttagcagttaacttaggtaaaattagagtttcagaacatctggattctgtttatcagaattttaaaaataagatgtcacctagaagataattacaacatttttgtttgtccattaaaatatgaaaacatatttttactttttttccctatgtagtagagaggtataaagctttttaaaaagtgtctttcttatctttcatgattgtttctgactgtcatcttctgtttctctgtattaatctcttacgttttagctttttggtctgctctttgttagtgtggtacatataattttgtaatgatgaggaaaccaaacccaactgctaatgagggttatttagttgataatatag

SEQ ID NO: 7634 - DNA, 424 bp, Homo sapiens; identical to SEQ ID NO: 7633

SEQ ID NO: 7635 - DNA, 248 bp, Homo sapiens
ctttttagattttttttattttatattattattaccatgttcaaaatgtgacatatccccaaagatattttggtggtaattcatccaacatactgtaaatgttaaagtgcttcctatatcattcatcccctaaatggaaacagatggccctaggagcttttgttaaactttaattatttatgaagcttgcttttcttcttaatattttatgaaatgctttgtatatgtaactgaagcagatgttgtca

SEQ ID NO: 7636 - DNA, 248 bp, Homo sapiens; identical to SEQ ID NO: 7635

SEQ ID NO: 7637 - DNA, 248 bp, Homo sapiens; identical to SEQ ID NO: 7635

SEQ ID NO: 7638 - DNA, 339 bp, Homo sapiens
gctctcaattctgtgtttataaaagtgttaaaaatgctaggttgatacggaaatacaaaaatcactagcctggtgctttgaagtcctgtcatgtatctgttttcctatattgtcatcccccaaaatctaagagaaaaggaaaatgtagtaaaacattaattgaggaatctatgtagtatgtatataagtatttactgtataatttgtttgattttaatgtatatatatttgaatttttcagaaaagaatgttgggggaaaagtctatgaaaaaatcttatctttgttccttctatgaagtggttgatttttgagtgaacaattttgttgttgttgttgt

SEQ ID NO: 7639 - DNA, 339 bp, Homo sapiens; identical to SEQ ID NO: 7638

SEQ ID NO: 7640 - DNA, 339 bp, Homo sapiens; identical to SEQ ID NO: 7638

SEQ ID NO: 7641 - DNA, 1735 bp, Homo sapiens
aagctggccactcagagacagcagtagctatgtctgtctcagtatgtggtagaccatgctgttgggcccatatatatatagcctccatgcctgccactggggctacttcattcacgtacccactgtgtcagttctgggatgactaaaatcaactgggtgagtcattttgtctacttatctgttgagtacttttttcatggtagttgctatttgctgaacattaagggacaatacaaaaaatcttcacacttcatgccccctcccatgtttgttcacagattcagcaatttgtcttttactttggaggtaatggccagtggactcctaaatatttcactgtactagcaggtcctgagtctttgtagagttcatcttccaccctttggagcatgtatctaaccaaggcttctagcatactggccacctcttcctcttttgtccagtcatcatgattttattgatgtgatgaatcagggtggtgttctgagggactcataggtgattcagaccttttcagacaaaattatggcaaagggtaagagtgttaccatagccccaagacaaaatcggagatcaatattattgtctatttcatctgaattcaaaccttttctgatcttctttcctaattggaatggaaaagaatatgttgtccaaatcaatggctaaaaactaggtacctgaagttttattaatctgcttagcacagtatcacatctggcacagtaactataatcatcaggtttactacttgattaagtctgtaatagtacacagttattctccaggacccagctggtttctgcacggaccacattggtgagttaaacagaaatggagtgattactactcctgcatcatttaagtttttaattgtagcaatcatttctaccatctcatgggatatgatagtatttgtttgtttgtttgcttgcttgtttgtttgttttgagacagagtctcgttctgtcacccaggctggtgtgcagtggcgccatctcagctcactgcaacctctgcctcccgggttcaagcagttctcctgcctcagcctcctgagtacctgggattacaggcacgtgccaccacgcctggctaatttttgtatttttagtagagaagaggtttctccatgttggtcaggctggtcttgaactcccgacctcaggtgatccgcctgcctcggcctcccaaactgctgggattacaggcatgggacactgtgcctggcgatactgtttttttaatttattatcttggctagggtttggggacagtttcagaggtttccacttaacctcttcccctatgatagcccaaggaccgaatgtgggagttattccaaatgctaagccaattccaatgatattctcaggaacttgggaaatgaccactgagtcgattcctgaatccagtgggtgaaattttagccaactcgtttattacctggccctgtagaccaccacactagtggaggtggaggggaccataaccatgctttgaatctctagatatcagtattatctctgcttctgactaataatcctaaaaatgtttatttgtaggcaccatccaccctccccatgcattttaaatgcctgcatcatcatatttgctacagcattttacttcaccaggatatttttccaggtcatcatgagtgaagtcttgagccactgagccactaccaccttgtgccaaatactatctgtgccctgcctgccaaccaggatga

SEQ ID NO: 7642 - DNA, 13123 bp, Homo sapiens
atcccacaggccctggattattgtcacagcatgggaattatgcacagagatgtcaagccccataatgtcatgattgatcatgagcacagaaaggtaaagtgataggctgacaagtgttatttatctacatgatgtagctaattgcccatcttcaacactttatcccttgtgttgtcacaggccctagtacctattcggcagttgagaaatatttggtgaatgaatgtacgaatttacaagtcaacatgtttgaaccattatttatattcctaagaatattcccaagaaggaaacatgagtaaagtgggcaaaatgttcatcttctaagcccggaaacgtggcttctcgccttatttattgagtaactggtttcctgagaaactactttctctccatttgccttctttttcttacgtgtacagtgtgggtaataatagccctgcaggcgactaggtattcgtgagaattaaatgtgcacagttaagtggacgagatatacagaaaatgctgtttctgtttattggatgtcataagggccctgttgtctgcaaatgcttttacatgagagctgtaatggccacatgctttagcatttcagttttttaaggtgacaagctgtgatgacttgcctgttgtggtctctggggaggcaggtgatttatttatgcaactgaattacttttagacacacaccatgtcagaggcaccaccctagggctggggatatgtaagtgaactcaacatacaataaatgcttgtcttttaggagctacatttagggaggctggtgggatagaaagttattttgatgtagaagaaaaaacgaatagggaatggcaagagggtatttgcagttttaaaccagttataagggaaggtttcattggaaaggtgacattttagagagcactgggagggacccagccatgcagtcttatgaagaaacatgtcccaaggcagagtaaatagcaagtacaaaagcccttcaggtaaggatatgtttggcatgttggaagagcagcagcaaggataaagctgggacagaatgaatgcggggaaagaaggaggaaatgaaatcaaagaggtaaaaccaaatcatgtaaaaccttattggtcattgttaggccttttctctgaagatagagagcttttgcatattctaagctttagcatgttctcacttgaaatttaaaagttaactacacatttattagaacagctaaaataaaaaatagtgatggtaccaagtgctggcaaaaatgtgaagaaacttgatctctcatacattgctggtaggaatgcaaagtttggcattttggaaaatgcttaactattgttttatagttggttggtttcttgaaaagctaaacatatgcttaccatacaatcctgcagtggcatttatctcagagcaacaaaatcttaggtccacacaaaagcctatatatgaatgcaactatatttgtaatagcttaaaattggggggaaaagctgggtgcagtggctcacacctgtaatcattttgggaggccaaggcaggcagatgacgagttcaggagttcaagaccagcctggccaacatggtgaaaccctgtctctactaaaaaaatacaaaaattagccgggcctggtggcatgcacctgtaatcccagctactcaggaggctgaggcaggagaattgcttgaaccccggaggcggaggttgcagtgagccgagatcgtgccactgtgctccagcctgggtgacagagcgagactgcgtctcaaaaaaaaaaaaaaaaaaaaatggggaaaagtgcccttcaatgagggaatggttaaacaaactggcatatccataccatataatattattatgaagtagtatttctcagcaataaaaaggaaagaagtatgacacatgcaacaacttggatggatctcatgcttagtgaaaaaaggcagtctcaaaaaaagttatatgccaatgactccatttttgtagcattctcaaaatgatagagataaagagcagaggggttgccaggggttgggctaacacacaggacatgtgtgtggtgatggaacagttctatatcttgttgaggagattatatcaacttacatatgtgatgaaattgcatagaaacacacacacaaacacatgcgtgcatgtaaaactggtgaaacctgaataagatctttctgaattgtgccagtgtcagtttcttgattttgatattgtactgtagttatgtaagatgttactattaggggaaactgggtaaagggtgcagagaatctctactactttggcaatttcctgtgaatctataatctctccatagcaacctgaacaatccttttaaaaagctgtttatatttatttttaaatatttaattatttttaaaataactattaaactatttagtatttattaaactgtttagactagagggcaagagtgaaagcagtgagaccagttaggagaaggggctatggcaatatatcaaacaagaggtggtggtggcttggatcggggcagtggcagtggaggtgatgataatggtcacaatatgatagaaccttcagaattttttgacagattaaatgtgaggtctgagggaaacaagaatccagggtgaatcttaagttttggcttgtatgacaggatgagtatcacctttaaccgaacagggggagactgagtggaggtgcttttgcagggagtaatcaaaggtttagttttgagatacaggcagtaaacttagtgccagagcagtccgatgtttttcctcagggcctactgctggcacttcagatcatggtcatgctatgcacagtgggcagataagcttgcctcttacccctttttccatgtttaggatgcattttggtaaaagctgtattgtatgacttttctgttatttcatctatccagcaaatatttattcatttttctcctgtataccaggcattatgttgaattctgaaaattacaaaggtgaataaaacagtccctacccctaaggagcttgtcgtccatattgaaaaagaaaggtagaaaacataaagagtttaggttctgttaaagaaatatatctaaaattcagggggctgaaggcaatgatcagacttcattgagaagctgacttaaatattccaaaagttaaggaaatgcttaccaataggattataggctgggtagtagggacattttagtcattgagcagtttaagaaatttgtaaaagcacaggtgagattgtgtcttccaggaacaaaatcatggagaaagaggtttgtcaagctaagaagttttattttcattctaaaggctataagtagtcagtggaggggtttcagtaaagagtgacgtgtctggtatattttatcaagagtatgctaatggcacagtgtgggtagcttagagaaagataagattgctcatggtttattctttttcagctacgactaatagactggggtttggctgagttttatcatcctggccaagaatataatgtccgagttgcttcccgatacttcaaaggtcctgagctacttgtagactatcaggtaagaacagaagggcaggcacagttttgatcctgtgtttatttcgcacataatttaccaaaaaaaaaaaagtatcattttgtgcatttaggtaggccacttaatgcacattcacagctgtcctttttatatgaaatgtaaaatataaatcaccttaattcatgtaccatgacttacattacttttattgtcataatgtcggtagaatatgaataggtttgcatttgatcctgacttgagggaaagtagccaaagatatgttctataatcagcagttccagaactgttttgaattgtaagctgttttgtttttgtttttgtttttgttttgagacggagtctcactctgtcgcccaggctgcagtgcagtggcatgatctcggctcactgcaagctccgcctcccaggttcacacctttctcctgcctcagcctcccaagtagctgggactacaggcacccaccaccaccccagctaatttttcttgtatttttagtagagactgggtttcactgtgttagccaggatggtctcgatctcctgccctcgtgagccaccacgcccggccttttgtttgttttctgaggcagggttttgctctgttgcccaggctggagtgcaatgccatgatcatagctgactgcagccccgaacttctgggctcaagtgatccttccagcttagcctcctgagtagctgggactacaggcgtgcactaccacacccagctaatttttaatttttttgtgtgtagagagaaagtctcactatgttgcccaggctgatctcaaactcctgggcacaacccatcctcacaccttggctccccaaagtgctgagattacaggcatgagccaccatgcccatcctgtaactaagtttaaccaatcttcagagtaaattcaagaatgttttcttgttcttctgaattgtatactaaataaaaaggtcttctccccagctcccccaaaaagccttctttctcctcacagaaaaaggagaaaggaaccaaattaataatagatttgccaagtgtttaaaaatctgaagttttcttgggagtatcttttatgcccagtctttccaggttattatcagttgattttaaaagtttcagactttttgttcttgtaggaatttctttcttggggtcttaaggctatagccctgagttcaaaaagcattttatgcataaaaatagtttttacagtattactaataattgtgaaaaacagaacactgtcctattataggaaaattaaagattgaattctgaaacatttatgtaataaaatactaatgatacacattagatggtctccatgggctaacaatttggaggttttttttttttttttttcatgtaagtgaagaaaacaattcaaaatagtatgtatattagctgagcatagtggtgtatgcctgtaatcctacctactcaggaggcctaagcccaggagttggaggctgcagtgagctatgatcacgccactacactccagcctgggcaacagagcaagaccctgtgtctttaaaaaaaaaaaaaaaagagccaggcacagtggctcacgcctataatcccagcacttggaaaggccaaggcaagtggatcacaaggtcaggagctcaagaccagcctggccaagatggtgaaaccctgtctctactaaaaatacaaaaaaattagccaggcgcggtggtgggcgcttgtaatcccagctactcaggaggctgaggcagagaattgcttgaacctgggaagctgagttgcaatgagccaagatcacacccctgcagcctgggcgacagagcaagactctgtctcaaaaaaaaaaaaaaaaagtaaaaattgttttaaaaccgagtgaaagatgcataaaagaaaaaactaaaaaaaaaactaaaaaaaaaaaaaaaagaaaaaactagccaggcacggtgggtcatgcctgtaatcctagcactttgggaacctgaggcgagcagatcatgaggtcaggagtttgagaccactggccaacgtagtgaaaccccgtctctactaaaaatacaaaattagccaggcatggtggcacgcgcctgtagtcccagctagtcaggaggctgaggcaggagaattgcttgaacccgggaggcggaggttgtggtgagccaagattgcgccactgcactccagcatgggcagcagagtgagactctgtctccaaaaaaaaaaaaaagaaagactaaaaagaaatatatgaagatgttattagtgttttgattttgagtcagtggagtgatttttttttaattttaaaaattaattttttattttgaagtgacaagcctgaggattcacagataataacagtgagtttacttttatgcagatgtacgattatagtttggatatgtggagtttgggttgtatgctggcaagtatgatctttcggaaggagccatttttccatggacatgacaattatgatcaggtaatatatgttatacccattgaaaaatgtactggcctaatgcaatgatagccagcactgcctgtaactttcagttcactgtttattcagccaccccgatattgatccttagattgatgtttcgggagctaccagcttagccttttgaaatcagacattcccccctagtctttgtcatttgcattgcttattttattgtgaagaatacatataaattgtcatccagatttttaaaataggacattaccttagaattctcctaataaacccttatctccaatatggtgttttctccaatatgtgagcccatatgtggtatttctgtgatccttttggctctttatatgggttgagttacagatgtttcttaaactaactccacttcccccttgaagatcaaagggctctttcattcacaagaacctggaatgattctaggaccttgtggaaggtaccattgtcttgttccctttgagcaccatgtccaattttaatgagtcaaagaatacaacctgaattccattaaagtcaataactctgtatcaagtgcatgcagtactgaggaatacagaaaaaagaaagaatagttttcttcccctcagatagttcatagctgatcttgtaagggagtcaaacatacaacaaaataggttacagtcataacttcagagtagaaatgtggacaaggcacaaaaggcagtagtggtgagtagtttgagtgtgcaatgggagcttcccaaaagaagtgacatcttcaattgggttttgaggggagaaaaataagggttcaccagggtgacatttcaagaggaagaaaccagtttataaagtagtttgctttttctaacactatcacattgagttgaagtctaaactgttaggaggtagcattcatacctgtagacatgatgacccgtttatgtaaattcaatcattgttaattgttgatttgttaatataatatgcttgtgatatgggtttttgtctttctttaatactagttggtgaggatagccaaggttctggggacagaagatttatatgactatattgacaaatacaacattgaattagatccacgtttcaatgatatcttgggcaggtaagtcatgaaacaaaatatgtgcatctgtggcttaagcactttgagagtgaactggcacttaggatcttcaaaatagttatgttttctttgccagcactgtcaggatgtcagtggtccagtgccacaggatgctgcattgagcaggcctctgataaaggcattggattgaatggccctttattcaaattaacttacaggagtctgatggaggggttatagctagaggattcctacaaaatgaatgtagattctagtagaagggttacagttgaggcaaaaatcaaaatttaccttgcttctttaagtgaaaaacctctctccaagagaaagaaattgaagtagaaaatgcatgctttaagactgatgtgcaggctgggcacggtggctcatatctgtaatcccagaactttaggaggatcacttgagcccaggagttggagaccagcctggacaacataatgagaccctcgactccatgcatggtgatgtgtggcagtagtccagactactaggaagctgaggcaggagcttcccttgagcccaggagggaatgctacagagagcaatgaacatgtggctgcgctccagtctgggcaacagagtgagaccctgtctccaaaaaaaaaaaaaaaaaggctatatgcagacaaccgactcttaacagtagtgactagatatagtacttatacacttaaccactcaacaggaggagatggactttcctgatgcaaaggcttttgctggccaattggcagagatgccaggaatatgtgtggggatgggaaataggcctggtgagctcagccacctgaccctccttgctacacagaagcggtcacgtcctgtcaagtaacctgaattatgtttcttaaaattgagaggactcagatgtcttttttcactctagctatgttgtttccagtctccagttagctttgttgtcccactcagtggcagagcggtgcaagactaccctcttgagtttggatccctctttgcttttgtctgggctgttagccactaagaaaaatgtaggaatgaaatgttgggcttctgtgcccacgtggcccatttctcatgccctcttttggtcctgcagacactctcgaaagcgatgggaacgctttgtccacagtgaaaatcagcaccttgtcagccctgaggccttggatttcctggacaaactgctgcgatatgaccaccagtcacggcttactgcaagagaggcaatggagcacccctatttctgtgagtccagatatctagcccacagagtttgtgcaggcgcagagtcctatagaacagagtcgtaatcccagctcctgtcagcttgctgcaaagttaattcacccacactgagcctcagattcttccagtggggatagtgatggcaactacattgcagaattactggaagaattcttctgtaacagaatacatgacacaagagcattcctaaataaactcttttcatactgtgaggatgacacttctcagtgcctcagtctggaatggttgaattagaatacacagccctgtatctttcctgtccctagtaatcattcgttggaaagagctaatgaggcttacaaatcttaaaattgtatgaacaccttgacttagatttgtgagtatagccacctgtgccatcctaagtgaaaataccactgagacccaccccatctgcactgtgatgttagctgcaacatgacatttttccttcggtgtgatggttttgtactgaatcatttatacttttgcccaatacctgaagcagatagataggctgattgggatagagaatgtggtcatagccctaagctacatggacctatagctttggcctacttggtactgggctgtggacacactggtaatatattaccgtctttgccgagttacagtgtcttgtctccattaaacctcaacaggaccagggcttcattaaattcgctctgctataaataattacctcatctttctaccatttgattgaaaggttagcttttaccccagtttgataggaaagctatttctgctttttaccacttgtctaattcatggtgaaggcaattgccaccttaagttctttggggaataatgtagagtatatataaattgcaaagaatgaagctggctgctttcaggcttccagaccattagtttaatctttcaagcaaaacagaacctagcctttttgtctcttttctagacactgttgtgaaggaccaggctcgaatgggttcatctagcatgccagggggcagtacgcccgtcagcagcgccaatatgatgtcaggtcagttcattggtaaattttctttaaaaaaatgtggaagtcaattactgttcttagctttgtggtctgatttcttgtataccttctcttctccgtactggtggccttgtgacttttttttaaccaggtttcagcatgcttgacatttggtatactttagtgatactgtcttgagtagggtatccccttctaggctagaatctcagcattcctggctgaaaatttttggcataggggcttgaaagtgccaagccatgaaaaggaaaaatacaccatttcatcttatagtttgaaatgacagtagttacatggcccttagaaacaatgttaagaaatggggtatagaggtggggtttatacataggtgtgtatgtgtacaaggacagttccgtgacatgtgccagagcaactatagagtgcctatcagttgtaaaaacataagtaaaatggttttccattattggatcattgtgacgcacagtgaatttttatagagtacccagttattccaaaggaactacaggcacatagcataagaattatacatataggcaacatccaagtgggtgcatatctggtagtgaaggcatttacttacatatcctcaaataattgctgttgccctcctcttttttaagaaaagaactaactgccttctagaatttaccccttgagtatcctacctctgtacagagtaatgtatatccaaacttacttgtagccttatttgtaataacaaaacattgagaatagctatcagtaggaaactggttaaatcagttatggtatatccatttaatggaatgtggtgcagccagtagaataagagtttcatgttctgttagatctccaactccaatataataatgtgaaatttaaaacgcaagatgcagggccaggtgcagtggctcatgcctgtaatcccagcactttgggaggctgaggcgggtgggtcacttgaggtcaggagttcgagaccagcctggccagcatggcgaaaccctgtctctactggaaatacaaaaaattagctgggcgtggcggcggcgcctttaatcccagctacttggaggctaaggcaagataatcgcttgaacttgggaggcagaggttgcagtgagccgagatcgcaccgttgccctccagcctgggtgagagtgagactctgtctcaaaagaaaaagtgagatgcagagccatgtctaagaggagtggagaagaatgtataataatgttctcatatatatatatatatatatatatatattttttttttttttttttttttttttttttttttttttttttttggagacaaggtcttgctctgtggccaaggctggagtgcagtggcacaatctcagctgctgcagcctccgcctcccgggttcaagcgattctcccacctcaacctcccaggtagctgggactacaggcgcccgccatgacgcccagctaatttttgtatttttagtagagatggggtttcaccatgttggccaggctggtcttgaactcctgacctcaggtgatccgcccaacttggcctcccaaagtgctggcattacaggcgtgagacactgcacctggcctttgtatacttttttgaaccttttgtattttgaaccatgtgaatgtattacctgtgtgtacacacacacacacacacacacacacacacaaaaacatgattagagaggtggaagaaatcaaatggaaataaattccaaaacacaattttatcttagaaaatgctctttccccattcaaattgactttcagtaattttgaaagctgccagctatcaagacagcatggtgtaagagcacatgagctttgactgcagtcatgtgctgttcagtatggtagtgactagccacgtgaggctatttaattacaattgaataaaatttaaaatgtagttcctcagttgcactagccatatttcaagtgctcagcagccacatgtggttggctactggtcaccagggtggacatctctgccctagacaggcctgggttagaatccaaccatggttgccacttgcttaatcgtgtactttggacaaactccttaaattgtccaagcctagatttctttacctgtctcttaaattgattaggacttgccactttaacttgaatttgtgagggtcagacttgaagtatatgtaaaaatccagctaagaggaagtcttcagtaaagaattattgtgttccttttgcagtgagtgctatgagaaactggtaagattgccatggttggtgtctttggctcactgacagctcttttctttcagggatttcttcagtgccaaccccttcaccccttggacctctggcaggctcaccagtgattgctgctgccaacccccttgggatgcctgttccagctgccgctggcgctcagcagtaacggccctatctgtctcctgatgcctgagcagaggtgggggagtccaccctctccttgatgcagcttgcgcctggcggggaggggtgaaacacttcagaagcaccgtgtctgaaccgttgcttgtggatttatagtagttcagtcataaaaaaaaaattataataggctgattttcttttttctttttttttttaactcgaacttttcataactcaggggattccctgaaaaattacctgcaggtggaatatttcatggacaaatttttttttctcccctcccaaatttagttcctcatcacaaaagaacaaagataaaccagcctcaatcccggctgctgcatttaggtggagacttcttcccattcccaccattgttcctccaccgtcccacactttagggggttggtatctcgtgctcttctccagagattacaaaaatgtagcttctcaggggaggcaggaagaaaggaaggaaggaaagaaggaagggaggacccaatctataggagcagtggactgcttgctggtcgcttacatcactttactccataagcgcttcagtggggttatcctagtggctcttgtggaagtgtgtcttagttacatcaagatgttgaaaatctacccaaaatgcagacagatactaaaaacttctgttcagtaagaatcatgtcttactgatctaaccctaaatccaactcatttatacttttatttttagttcagtttaaaatgttgataccttccctcccaggctccttaccttggtcttttccctgttcatctcccaacatgctgtgctccatagctggtaggagagggaaggcaaaatctttcttagttttctttgtcttggccattttgaattcatttagttactgggcataacttactgctttttacaaaagaaacaaacattgtctgtacaggtttcatgctagagctaatgggagatgtggccacactgacttccattttaagctttctaccttcttttcctccgaccgtccccttccctcacatgccatccagtgagaagacctgctcctcagtcttgtaaatgtatcttgagaggtaggagcagagccactatctccattgaagctgaaatggtagacctgtaattgtgggaaaactataaactctcttgttacagccccgccaccccttgctgtgtgtatatatataatactttgtccttcatatgtgaaagatccagtgttggaattctttggtgtaaataaacgtttggttttatttatcaaggtta

SEQ ID NO: 7643 - DNA, 25975 bp, Homo sapiens
cagtttgaagaaaacaggtctgaaacaaggtcttacccccagctgcttctgaacacagtgactgccagatctccaaacatcaagtccagctttgtccgccaacctgtctgacatgtcgggacccgtgccaagcagggccagagtttacacagatgttaatacacacagacctcgagaatactgggattacgagtcacatgtggtggaatgggggtaattgtttttgttgacttcattatactcactcaaagggctgaatcttgtggatctgttgagtagtttttgtcagaaaacctccgtgactctgtatgtgtatacctcaggatcaaagcccaatttgtgttttcttttgagctgaaaatttggttttgcagtgaggaagcagagttgctttggcaagtgaacaattttaatgggcttaccatttaaaaatcattttagtttcttatccttttctatgatgtatatgcagtcgtgcaccacataacaaagtttgaattaatgacagaccacatgtaggacagtggttccataagattataagagagctgaaaaatgtctgtggcctagtgatgtcatcgtaacatcaacagtgcattcattaccttttctacgtttagatacacaaataccattgtgttacaattgcctaaagtatttattacggtacacatttgtatcctaggagccgtaggccataccctaggtatgtaatatgccataccatgtaggtttgtgtaaacactctgatgtttaacacatttctcagaatgtcattaaataacgcatgacggtattctgtatgggcacctggcaacaaaaagttacctatcagcttgcttatcaagccaagggcattgcagatcagtgagaagtgatacttgagagactttgaaaacaccaaagtcttatataaagtatttttgaggtagagaatgttgtttcgtgttaatacaggaggacgaaacagttctccaaagaggtaacttctttctgatgagaaacaattaaattcttaaacatttgcccttatcctgagactaggcatgtcttagcatggaattcagcccaaattctatcttgaacagttgtagtctgcctgaacagctgtgtttgccctcctaattctctgtgcagactcatttggatgtttgcatttcctgtcccaatgtggtagacatttaattgttcagatcatacttttgtgataaaagcattttgacattcaagtgcaaaagaaagcaatttgaaaactaaagctacagctcctgtatgctgtattttatatctgactgcatgtgatttctgtaacctgtaagtggttagtggatggcttccctaaattgtcatagggcgtatttttaatcttgagtatgccatgaatttgtgtatgtgtgtgtgtggaaatgagtcttgctctgttgccctggctgcagtgcagtggtgtgatctcggctcactgcagcctccgcctcctgggttcacgtgattctcccacctcagcctctcgagtagctgggattacaggcaccttccaccctacccagctaatttgagtatgccatgattcttaacagtaaatacattgcctctgaatacagaggcactgtatgctgtaaagacaccattaaatgccagtgtggtttagtaccaataaatgttgttattactgataatctaacaattctcctcttatgtcacaggctttggactctaggtgacactgtgtttactataggaatttcagccgctatcttcaaattgagtgctttgcacttggttctgcttaaatggcactaaagagcccttttgggcttttggcatggttctgtttgcttgctggcatttgttttgtatgccctcccataggaagagaactcaaccagaagtaggagcattcttcccctacacctgccatgattattatgttgtccattgtttttagtaccttttgtcttttcattcactttctttttagctacttgaggaaaatgaatggttgaggtggttgatttggttcatattggatacttagtaggtccagaggattctatccagtaggatagaatttaggccttattggaactgtgtttgtcattcttcagagcaaagcgctctacattggaagcaggcaggggcaggaggaaaatgttggcatttcccttattctacctctgtttattacctctgatgttgcttattggtcacagaatatgggtatatgtagaggaggggatcgctgattatagtttacaatctataatgtgcttcgtactacgcatggactatccccagagcttgccctggagggcaaatagattaagcctatacatttgaaagccatttaccttcaaagaggcctgttaaaaatcagctgctgccaaagtgtggctagattgaaacagtcttgcaaaatgtttttagttcctgctaagtgccaacactggaccaagcactaagggacaagaatatataaaaattattctccggccgggtgcggtggctcacgcctgtaatcccagcactttgggaggccaaggcgggcggatcacaaggtcaggagatcgagaccatcctggctaacacggtgaaaccccgtctttactaaaaatacaaaaaaattagccgggcgtggtggtgggcgcctgtagtcccagctactaggggaggctgaggcaggagaatggcgtgaacctgggaggcggggcttgcagcgagccgagatcacgccactgcactccagcctgggcgacagagcaagactccgtctcaaaaaaaaaaaaaaaaaaaaaaattattctcttggggaaagctgtctcttgttggagacaaacgtatttagaacaaaccttaatacaagccagctccatgtcatgtgccaataaagatgtaaacagtttgggattagaaagaataattgaaaggtataagtttttctaattctaggatttgaaacacacgtattttaattggcctaatttaaaaaaaaaaaaaatacaatgggccaggcgcggtggctcacgcctgtaatcccagcactttgggaggccgaggcggacgaatcacgaggtcaggagatcgagaccatcctggttaacacggtgaggacccgccgtctctactaaaaattcaaaaaattagccgggcatggtggcaggcgcctgtggtcccagctgctcgggaggctgaggcaggagaatggtgtgaacccgggaggtggagctggcagtcagcagagatcgcgccactgcactctagcctgggcgacagagtgagactccatctccaaaaaaaaaaaaaaaaaaaaaaaaacctatttgggaattgtttgaaatacttcttatttctattacagctgctggtaatagattcctgtaatttgaattgatgctgataatttgaccgtttataagtcattttgtttgtgtccacagaaatcaagatgactaccagctggttcgaaaattaggccgaggtaaatacagtgaagtatttgaagccatcaacatcacaaataatgaaaaagttgttgttaaaattctcaaggtgagtacaagagataatttcagaggtatttggaatatagatttttaaaagtagttttgaagacttttttaaaacagcatttaaaaggtttttggtgccaaagcaaataaataaaattttattgtatcctatgaactcaatagaacaagttctgcttatttgacagatcgggaaactgaagcaagagaagtgatttgagttgactcatatagctaggttgtggcagagtaagggagcaaaggtacagtctcttctctcccagttattgcctaatacttatttcctttacttttcattatataatgaggcttttgttttcaataaataaatcattgcctctactttgtaaagatgaggagtcacaggactcgagggggacagacagatgatattagtgcagctagtcgggtgtaattgcccttgcttaggtgatgtgagtggtagggactgaaacaaactgggaaacacatgcctcttcaaaaggagttagctgcttctcagctgaagctgatgattgccctgcagtaatgcaagtccattgttgcttgatactctgttttgcaaataaaagccagaaatttatatttgtatatgaattttcctgacttttaagtgttggctcaagattttaaaaaaacaatgcacaggccagatttggcctctgggagaccaatatacaacttttaatttagttataactatgctgtgcactgtcatatattgggaacttagcatatagttccttaccacaggaactttttcatatttgacactgaaaagtagaagtttccaaactttctcaatttataacacttatactgtctttaatttttcacggtactcctaagtcaagaaatacctcatagttctctgtattaagtagcaaggtccaaatagctaagtaagttttgttttttttattgtttttgtttttgttttgagaaggagtctcgctctgtcgcccaggctggagtgcagtggcgcgatctcggctcactgcaacctccgcctcctgggttcaagcgattctcctgccttagcctcccaagtagctgggactacagatgcacgccagcaatgcccggctaatttttgtaattttaatagagacggggtttcaccatattggtcaggctggtctcaaactcctgacctcaggtgatccgcccgcctcggcctcccaaagtgctgggattacaggcgtgagccactgcgcctgcccgctaagtatttatatcttagcaacttggtagccatttaaaaagttattcacataaattaaaagaaaaaagttaaatttgttcttatataactataatttgttactgttgggttatgtagacctgttgctgcatagcttttcaaatgttgtcattggttggacaccaccaccctcatttcctgtcattgatttttgtgcagtacttgctttttaccacagcaactactgcaaacccagcttcacaaaaatatgccatcgcgaggagtataacacaatccatcacgaggagtgtaacacaatctaatgttgaaactacgaaccacctcaagctggcagtgcacccagtgtctggcagattcaacgatgggttgatgtgtcttcctcaaaaatgtaaagtgttccacagtattcctgtgcattgctggggtgcttcacatgccctttgagaaccagagagtttaagtatttatatctgtcttgaaatatgtagaaagagaactaggttggaaatcaaaacatgtgggtgactagccatagtagtccttttaacctaggacatgtttatccatctattaaaaagaatgttggctgagcatggtggcatgtgcctttagtcgcaggtcctcgaggggctaaagtgggaggatcgcttgagcctggaagttgaaggttgcacggatctatgatcaaaccactgcactccagcctgggcgatgagaatgagaccctgtctcaaaaaacaaaaaggatcaaacacaaaattgtgtgtatatatacatacgttggagactggagttctttgtgattgtatggtgatattcatatggaaaggtatatgatagaatgaggtgatatattattatttagagccacatgaaaagcatgcatagtgggtctacagttcagaagagggtagtagttaggaaaagctcccaggagctgtcttcaggctgaatgggaggaggatttggataggtgttgggtggaagtggtgaagggaagcaggctgtagagtgcaccaagataagaaaagaggaggagggaaaagtgagagaaatatttcatgtgaaagatgttatgtgaccatacataggagttgaacttggaaagagagattaagttggcgaaggcctggaaaaaataatctctgcatttccttgcagtcttaaaattatatgactatctcttctaggtaattgtgagcccttgatgattttgaatgaagggtgatttagaaagatttttttcagctcagtctttctaactgtattgtatattttactgtaactgtgggtaggtggtgtaagtatagatgaatttcctttgtaaaccatatttaaaatttttaatctcccctatttaataagacaaaagttgcattgatcgcattaaattcgggcctgagtcagctgcctggtctgtcacaaaccagctttttaagtttatagatttgaagcattctgtagagtagttttgtcaaccagaagctttttttttccactaaaaaaccagcagttgggttaatggaaaacaggaggtaagttgttgggttagtctctgcagggtggaaagatctcccagataatataacagtttataaagatctgaatagttgaagcaggaagagaagacttatattatcttgtttcttaggtagatattgtattgggtaagaggtcgtgggttgaattcaatggactacatggaagtcattagtaaaatagcttctgtttattgggtaccactttgcattggacctgttctaactgtggtatgtaaatcactaacaggcgagtatagtccctttcagcagtgagaaacatttaaatgcttttctgaacactgcacaaccacaaagccaggttttgagaactgtcaatgtttccaaaatctgcttgctttctgctatcatgtgcttgaggcttaagacaaagttaaaagaatttatagtattatttggtagtttctggacctggatcatcagcctggaaagtatctaaaaataaatcccccgtttccctctcaagattttgatttagtgaatcttggtgggttctgtgagtctgtatattaaaaaaatccaggtgattgttggtcatcaaactttagtaaccaccaatcttgttaatgaagagatgagatgtacttaacttctaagagttatatgcagtgcatctagtctgaggtgaccaacaccctaggaaaagacctgcacagtccagtacagcaggcacgcaggccacatgaggctgttaagcacttgaaatatggctgggctgaattgagatatgctgtaagagtaaaatacattagatttcaagggtttaatacaaaaaaaggtaaaatagattaataatttttatattgatttatatgttaagattttagattaataaagtacattaattttgtcctttttaaaattttcttgatgtggctactaacacatttaaaattacacatgtggtttgtattatatttcctttgggccagcactgttttagactattcaggagaaggctttataatataagcccaggcacagtggctcatgcctataatcccagcactttggaaggccaaggcaggcggatcatgaggtcaggagttcgagacgatcctgaccaacatgatgaaaccctgtctctactaaaaatacaaaaattagctgggcatggtggctggcgcctgtaatcccagctactcgggaggctgaggcaggagaattgcttgaacccgggaggcggaagttgcagtgagctgagatcatgctactacactccagcctgggcgacagagcaagactctgtctcaaaaaaaaaaaaaggctttataaaggaggtgcagtgggaccaaggccctcctcagaaaaaaatgaaaaggattccatactagaacagatgtggaaagaatgggtaaggacaaaggaatgtttaagatatgctctgcagaatactctttagaatggaggggttcatttataagagtattggcactttgggaggccgaggcaggcagatcacgaggtcaggagatcgagaccatcctggctaacacggtgaaaccccgtctctactaaaaatacaaaaattagcctggcctggtggcgggtgcctgtagtcccagctactcgggaggctgaggcaagagaatggcgtgaacccaggaggcggaggttgcagtgagccaagattgcaccactgcactccagcctgggtgacagagcaagactctgtctcaaaaaaaaaaaaaaaaaaaaaagagcattggtgatcaggctagacagttattattatgttatgtttcagccatattccgaaatctttcgaatacctcatttgattcttgcaacaatcttatgagatgggtactcttgttactcattttacacttaatgaaaggcttagagaggttatgtagtttgccattaacagccagcaggtagtaaaggtaggtttcacattgggcattgtgactccaagactcaccctttaccctcagggttgtgctacacaaagatgttttggccatccttgttgttggccctaattagaggaagaaatggaaagggcccatgtttcatcctaattgataaaaagtttgatatactttagtattactaacgatttaaattgctactttgtaaggttttaagacattaacatgtttaacatgttttaaaacattaacatcaagactgatgattgaaatgctaattctgcagaagtgtctggtctttggaatagaaatctttttttctttcaattcaacatttgtaagtacctgcagaatacctggcacagtgctaggagaaggattcagagacgaatgtgacacattttcttccttcaaggtgtgctcataagtaagccatttatcatttatgtattacactacgtgttgaaatactctgaaaaaattttttttttttttttttgctgatgtacttttcccctttcagccagtaaaaaagaagaaaattaagcgtgaaataaagattttggagaatttgagaggaggtcccaacatcatcacactggcagacattgtaaaagaccctgtggtgagtatagtaggtgttagcaaggcccgccagagctgagatggtgtttgacctggagcacaactggcctctttttgttccctcccccaaccctcatcattaagtcctgctttgaaagtgcttaatcagatataccatttaactagcttgggtctttctttcaaagagacctccacccacagactatttcttattcttctaggctaagagactgatagcactggaaactgaaatgtgttaatccattttgcaaactcaggtccgatgccgatgggcgatgggcgcattgtcgggctgcctagagcctggtgagacttcagctccatgtcttctgtttgaaatccatcccaaaaatgacctaagtgcggtgatgatcagagcggggagggcttgtagcaatagagggtttcttactactgaggcgaggactgccaaatttcaccacgcagcatccgcaaacattgtccccattaaagctgtcagggctattgctaatgtgtgtttttgtttttgttcttttcccctagtcacgaacccccgccttggtttttgaacacgtaaacaacacagacttcaaggtataatatataaccaactgtttcgggctagtgggtttttagaccacatagcctttggggatgatgctgttagaagagcttgcttcgcatttgtttttaaaaagcttttcatccttacagtgcaaattttaagatagaagaactcctatataagcagtgcccactttctgcatcttgatattttgcccatttgtttaatgttctttttaatgaccaacacattgacttctcactacttagttgacagtttctgctgatgtccaacctaatgaaggcagtaacacacgttcacttaggatctggccatatggcaattcgctttaaacaatagtgttcaggaagaaatatattgtatgtataaaagtagggactgcttatttcttaggattcctcataaactgtgggctatagatcttaaaaggcagggatcgaggaaggataatgtcaaattctgccataacacaaacctctataagagatatctcagaattccagtctatccagtggcctacttatttcacacagttccaattttacagaagaatatagctactcttttggagtaaaagtaaaaatcttcgatttgcctttccaccagtccagtatccagaatgttatatattaataaattagtgaattctgttgcagagatagggagaaaggaagaggaactgctttagagtcagaatgataatttcaagaaaaactttgtcagaagacgttgctaaccattaaagagacgtacctgtggctgggcatggtggctttcgcctgtagtcctagctactggggaagctgaggtaggaggatcgcttgagcccaggagtttgaggttgcagtgagttatgattgcagcacggcactccagcctgggcagcagagtgaggaccctgtctcaaaaaaaaaaaaaaaaaaaaaagatatgtccatgtaaaaaacattctgcaactctttggaaactggaaaggatacataacagttgttcagagtttactttccaattggaacaagaatagttttgttaaattgactcaacaggtttggtatcatgccatctgcatacccactggtgatctgcagggccaactatgtaaggcaaagatgagttagttccctactaaggaggcagtatatttgccaaaatgcctcttttgagaaggtctgaagatacatgaaaagcaaactaaattataggtgggtgtcagtgcatattaacgtatctagatcagtatgtttctgacagtggattatagcttccgcaatatatgtttaagtaattcttcatttttaagagttgaagacccaaagtatctctttaaagttaatgtaatgttggagaaatagagggcagtgaatggacagatcttggaacaacggtaaatgagccaagtcttggtttgaattactgtgagtgagggtgaaaaatgcctttctgtcagcattatttcatggctcaaacatttgtctttaacagcaattgtaccagacgttaacagactatgatattcgattttacatgtatgagattctgaaggtaagtgaaccttgaatactaaatattttttaaattggtcttctttttgttaaatagtcaattgatggtagaaaagccagcagattaactttgtaaagtatgttgaaagaagggacctctatataagtttttaataagttaatagtatcatacctgtaatcccagcactttggaaggctgaggcaggaggattgcttgaggccaggagatcaaaagaccagcctgggtgacatagtgagatccccatctctacaaaaaaaaattgtttaattacctgggcatggtggtgtgcacctgtaagtcccagctacttgggaggccaaggcaggaggattgcttgaggccaggagatcaagaccagcctgagcaacatagtgagaccctgtctctacaaaaaatttaaaaattagctgggtatggtggcttatgcttgtaattccagctacttgggaggctgtgacaggaggatctcaggaatttgaggcagcagtgagctatgattgttgcacaggctggagtgcagtagcacagagtaagaccctgtctctaaatacataaataaataaaaattaataataatagtatcagaacccttgtgctaagggttatggaatggggtctagtgggagtataatttagaacaatttgaaaaagggtatttgtaagatagctgggactgaccccttaacaaatatttgtaatttctgtggcccctatgtaagttaatattaaattttcaaaactcgtgaaaacacctgacgtgctagcttctggtatactttatctcacttaagagtcagcaaataaaacagtaaactttaactcagttctcaaagggtaattgtcctaaggattgtgtaaatttctgcttatagatgctaattgaaaatttacttacatttctaaagtggggtcaccaaatatcttgttcccagtagccacaagatcagcttcctagaagagagaattgctaaaagttggctaagctttcttactaaacaagagttgacataaagcctgctgttggagccttagaaatcccctgaggagattgtgccagcagagatacttgatctttccattggctcatgcagtttgtggcaagcaaggctttagaaagttacagatatgattgcccagccctgggaactgtaggaacccaagttgcccttcaggaaggacaagaatttggccaacaacgtcggctgactgaaaggctgggattaacaaaccccaaagattatactactcagttccctttagtttgaggttggaaacatttcagattggatttgatgacctaaatcaggcattggcaaacttctttaaagggccaaatagtaaatattttaggctttgtgggccatgtagtgtttgtcacactattcaagtctgctgttgttgcacaagagcaaccataaacaatatgcaaacaaataggcatggctatgttgcaataaaacattatttacaaaagcagacatcaggccaaatttggcctgtggtctgccaacctctgttacagactcttaatggctaaagaattactgttcttagaataagaggtttgtagtaaagatctgttttctttctttgaggggtctgtggaaataatctaggatctggacaagacagaaaaatttgaagtggtgcaatttgggtatactttgggtcttttaggacagaaaacatgttgaaacaactgtgtcagaaaaagatctctaagctcagagagctgagtttgcttgactgtgagatcatgaacaagtctctgaagcattgctgtggaagtgactgtgtcctcagcttgaatcccaggggtattgtgaggctaaaaggaaaatttacatggagggaaaagtaaaggactcttacgtattattcaggctaactcctttctgacccgttcatcccacaggccctggattattgtcacagcatgggaattatgcacagagatgtcaagccccataatgtcatgattgatcatgagcacagaaaggtaaagtgataggctgacaagtgttatttatctacatgatgtagctaattgcccatcttcaacactttatcccttgtgttgtcacaggccctagtacctattcggcagttgagaaatatttggtgaatgaatgtacgaatttacaagtcaacatgtttgaaccattatttatattcctaagaatattcccaagaaggaaacatgagtaaagtgggcaaaatgttcatcttctaagcccggaaacgtggcttctcgccttatttattgagtaactggtttcctgagaaactactttctctccatttgccttctttttcttacgtgtacagtgtgggtaataatagccctgcaggcgactaggtattcgtgagaattaaatgtgcacagttaagtggacgagatatacagaaaatgctgtttctgtttattggatgtcataagggccctgttgtctgcaaatgcttttacatgagagctgtaatggccacatgctttagcatttcagttttttaaggtgacaagctgtgatgacttgcctgttgtggtctctggggaggcaggtgatttatttatgcaactgaattacttttagacacacaccatgtcagaggcaccaccctagggctggggatatgtaagtgaactcaacatacaataaatgcttgtcttttaggagctacatttagggaggctggtgggatagaaagttattttgatgtagaagaaaaaacgaatagggaatggcaagagggtatttgcagttttaaaccagttataagggaaggtttcattggaaaggtgacattttagagagcactgggagggacccagccatgcagtcttatgaagaaacatgtcccaaggcagagtaaatagcaagtacaaaagcccttcaggtaaggatatgtttggcatgttggaagagcagcagcaaggataaagctgggacagaatgaatgcggggaaagaaggaggaaatgaaatcaaagaggtaaaaccaaatcatgtaaaaccttattggtcattgttaggccttttctctgaagatagagagcttttgcatattctaagctttagcatgttctcacttgaaatttaaaagttaactacacatttattagaacagctaaaataaaaaatagtgatggtaccaagtgctggcaaaaatgtgaagaaacttgatctctcatacattgctggtaggaatgcaaagtttggcattttggaaaatgcttaactattgttttatagttggttggtttcttgaaaagctaaacatatgcttaccatacaatcctgcagtggcatttatctcagagcaacaaaatcttaggtccacacaaaagcctatatatgaatgcaactatatttgtaatagcttaaaattggggggaaaagctgggtgcagtggctcacacctgtaatcattttgggaggccaaggcaggcagatgacgagttcaggagttcaagaccagcctggccaacatggtgaaaccctgtctctactaaaaaaatacaaaaattagccgggcctggtggcatgcacctgtaatcccagctactcaggaggctgaggcaggagaattgcttgaaccccggaggcggaggttgcagtgagccgagatcgtgccactgtgctccagcctgggtgacagagcgagactgcgtctcaaaaaaaaaaaaaaaaaaaaatggggaaaagtgcccttcaatgagggaatggttaaacaaactggcatatccataccatataatattattatgaagtagtatttctcagcaataaaaaggaaagaagtatgacacatgcaacaacttggatggatctcatgcttagtgaaaaaaggcagtctcaaaaaaagttatatgccaatgactccatttttgtagcattctcaaaatgatagagataaagagcagaggggttgccaggggttgggctaacacacaggacatgtgtgtggtgatggaacagttctatatcttgttgaggagattatatcaacttacatatgtgatgaaattgcatagaaacacacacacaaacacatgcgtgcatgtaaaactggtgaaacctgaataagatctttctgaattgtgccagtgtcagtttcttgattttgatattgtactgtagttatgtaagatgttactattaggggaaactgggtaaagggtgcagagaatctctactactttggcaatttcctgtgaatctataatctctccatagcaacctgaacaatccttttaaaaagctgtttatatttatttttaaatatttaattatttttaaaataactattaaactatttagtatttattaaactgtttagactagagggcaagagtgaaagcagtgagaccagttaggagaaggggctatggcaatatatcaaacaagaggtggtggtggcttggatcggggcagtggcagtggaggtgatgataatggtcacaatatgatagaaccttcagaattttttgacagattaaatgtgaggtctgagggaatcaagaatccagggtgaatcttaagttttggcttgtatgacaggatgagtatcacctttaaccgaacagggggagactgagtggaggtgcttttgcagggagtaatcaaaggtttagttttgagatacaggcagtaaacttagtgccagagcagtccgatgtttttcctcagggcctactgctggcacttcagatcatggtcatgctatgcacagtgggcagataagcttgcctcttacccctttttccatgtttaggatgcattttggtaaaagctgtattgtatgacttttctgttatttcatctatccagcaaatatttattcatttttctcctgtataccaggcattatgttgaattctgaaaattacaaaggtgaataaaacagtccctacccctaaggagcttgtcgtccatattgaaaaagaaaggtagaaaacataaagagtttaggttctgttaaagaaatatatctaaaattcagggggctgaaggcaatgatcagacttcattgagaagctgacttaaatattccaaaagttaaggaaatgcttaccaataggattataggctgggtagtagggacattttagtcattgagcagtttaagaaatttgtaaaagcacaggtgagattgtgtcttccaggaacaaaatcatggagaaagaggtttgtcaagctaagaagttttattttcattctaaaggctataagtagtcagtggaggggtttcagtaaagagtgacgtgtctggtatattttatcaagagtatgctaatggcacagtgtgggtagcttagagaaagataagattgctcatggtttattctttttcagctacgactaatagactggggtttggctgagttttatcatcctggccaagaatataatgtccgagttgcttcccgatacttcaaaggtcctgagctacttgtagactatcaggtaagaacagaagggcaggcacagttttgatcctgtgtttatttcgcacataatttaccaaaaaaaaaaaagtatcattttgtgcatttaggtaggccacttaatgcacattcacagctgtcctttttatatgaaatgtaaaatataaatcaccttaattcatgtaccatgacttacattacttttattgtcataatgtcggtagaatatgaataggtttgcatttgatcctgacttgagggaaagtagccaaagatatgttctataatcagcagttccagaactgttttgaattgtaagctgttttgtttttgtttttgtttttgttttgagacggagtctcactctgtcgcccaggctgcagtgcagtggcatgatctcggctcactgcaagctccgcctcccaggttcacacctttctcctgcctcagcctcccaagtagctgggactacaggcacccaccaccaccccagctaatttttcttgtatttttagtagagactgggtttcactgtgttagccaggatggtctcgatctcctgccctcgtgagccaccacgcccggccttttgtttgttttctgaggcagggttttgctctgttgcccaggctggagtgcaatgccatgatcatagctgactgcagccccgaacttctgggctcaagtgatccttccagcttagcctcctgagtagctgggactacaggcgtgcactaccacacccagctaatttttaatttttttgtgtgtagagagaaagtctcactatgttgcccaggctgatctcaaactcctgggcacaacccatcctcacaccttggctccccaaagtgctgagattacaggcatgagccaccatgcccatcctgtaactaagtttaaccaatcttcagagtaaattcaagaatgttttcttgttcttctgaattgtatactaaataaaaaggtcttctccccagctcccccaaaaagccttctttctcctcacagaaaaaggagaaaggaaccaaattaataatagatttgccaagtgtttaaaaatctgaagttttcttgggagtatcttttatgcccagtctttccaggttattatcagttgattttaaaagtttcagactttttgttcttgtaggaatttctttcttggggtcttaaggctatagccctgagttcaaaaagcattttatgcataaaaatagtttttacagtattactaataattgtgaaaaacagaacactgtcctattataggaaaattaaagattgaattctgaaacatttatgtaataaaatactaatgatacacattagatggtctccatgggctaacaatttggaggttttttttttttttttttcatgtaagtgaagaaaacaattcaaaatagtatgtatattagctgagcatagtggtgtatgcctgtaatcctacctactcaggaggcctaagcccaggagttggaggctgcagtgagctatgatcacgccactacactccagcctgggcaacagagcaagaccctgtgtctttaaaaaaaaaaaaaaaagagccaggcacagtggctcacgcctataatcccagcacttggaaaggccaaggcaagtggatcacaaggtcaggagctcaagaccagcctggccaagatggtgaaaccctgtctctactaaaaatacaaaaaaattagccaggcgcggtggtgggcgcttgtaatcccagctactcaggaggctgaggcagagaattgcttgaacctgggaagctgagttgcaatgagccaagatcacacccctgcagcctgggcgacagagcaagactctgtctcaaaaaaaaaaaaaaaaagtaaaaattgttttaaaaccgagtgaaagatgcataaaagaaaaaactaaaaaaaaaactaaaaaaaaaaaaaaaagaaaaaactagccaggcacggtgggtcatgcctgtaatcctagcactttgggaacctgaggcgagcagatcatgaggtcaggagtttgagaccactggccaacgtagtgaaaccccgtctctactaaaaatacaaaattagccaggcatggtggcacgcgcctgtagtcccagctagtcaggaggctgaggcaggagaattgcttgaacccgggaggcggaggttgtggtgagccaagattgcgccactgcactccagcatgggcagcagagtgagactctgtctccaaaaaaaaaaaaaagaaagactaaaaagaaatatatgaagatgttattagtgttttgattttgagtcagtggagtgatttttttttaattttaaaaattaattttttattttgaagtgacaagcctgaggattcacagataataacagtgagtttacttttatgcagatgtacgattatagtttggatatgtggagtttgggttgtatgctggcaagtatgatctttcggaaggagccatttttccatggacatgacaattatgatcaggtaatatatgttatacccattgaaaaatgtactggcctaatgcaatgatagccagcactgcctgtaactttcagttcactgtttattcagccaccccgatattgatccttagattgatgtttcgggagctaccagcttagccttttgaaatcagacattcccccctagtctttgtcatttgcattgcttattttattgtgaagaatacatataaattgtcatccagatttttaaaataggacattaccttagaattctcctaataaacccttatctccaatatggtgttttctccaatatgtgagcccatatgtggtatttctgtgatccttttggctctttatatgggttgagttacagatgtttcttaaactaactccacttcccccttgaagatcaaagggctctttcattcacaagaacctggaatgattctaggaccttgtggaaggtaccattgtcttgttccctttgagcaccatgtccaattttaatgagtcaaagaatacaacctgaattccattaaagtcaataactctgtatcaagtgcatgcagtactgaggaatacagaaaaaagaaagaatagttttcttcccctcagatagttcatagctgatcttgtaagggagtcaaacatacaacaaaataggttacagtcataacttcagagtagaaatgtggacaaggcacaaaaggcagtagtggtgagtagtttgagtgtgcaatgggagcttcccaaaagaagtgacatcttcaattgggttttgaggggagaaaaataagggttcaccagggtgacatttcaagaggaagaaaccagtttataaagtagtttgctttttctaacactatcacattgagttgaagtctaaactgttaggaggtagcattcatacctgtagacatgatgacccgtttatgtaaattcaatcattgttaattgttgatttgttaatataatatgcttgtgatatgggtttttgtctttctttaatactagttggtgaggatagccaaggttctggggacagaagatttatatgactatattgacaaatacaacattgaattagatccacgtttcaatgatatcttgggcaggtaagtcatgaaacaaaatatgtgcatctgtggcttaagcactttgagagtgaactggcacttaggatcttcaaaatagttatgttttctttgccagcactgtcaggatgtcagtggtccagtgccacaggatgctgcattgagcaggcctctgataaaggcattggattgaatggccctttattcaaattaacttacaggagtctgatggaggggttatagctagaggattcctacaaaatgaatgtagattctagtagaagggttacagttgaggcaaaaatcaaaatttaccttgcttctttaagtgaaaaacctctctccaagagaaagaaattgaagtagaaaatgcatgctttaagactgatgtgcaggctgggcacggtggctcatatctgtaatcccagaactttaggaggatcacttgagcccaggagttggagaccagcctggacaacataatgagaccctcgactccatgcatggtgatgtgtggcagtagtccagactactaggaagctgaggcaggagcttcccttgagcccaggagggaatgctacagagagcaatgaacatgtggctgcgctccagtctgggcaacagagtgagaccctgtctccaaaaaaaaaaaaaaaaaggctatatgcagacaaccgactcttaacagtagtgactagatatagtacttatacacttaaccactcaacaggaggagatggactttcctgatgcaaaggcttttgctggccaattggcagagatgccaggaatatgtgtggggatgggaaataggcctggtgagctcagccacctgaccctccttgctacacagaagcggtcacgtcctgtcaagtaacctgaattatgtttcttaaaattgagaggactcagatgtcttttttcactctagctatgttgtttccagtctccagttagctttgttgtcccactcagtggcagagcggtgcaagactaccctcttgagtttggatccctctttgcttttgtctgggctgttagccactaagaaaaatgtaggaatgaaatgttgggcttctgtgcccacgtggcccatttctcatgccctcttttggtcctgcagacactctcgaaagcgatgggaacgctttgtccacagtgaaaatcagcaccttgtcagccctgaggccttggatttcctggacaaactgctgcgatatgaccaccagtcacggcttactgcaagagaggcaatggagcacccctatttctgtgagtccagatatctagcccacagagtttgtgcaggcgcagagtcctatagaacagagtcgtaatcccagctcctgtcagcttgctgcaaagttaattcacccacactgagcctcagattcttccagtggggatagtgatggcaactacattgcagaattactggaagaattcttctgtaacagaatacatgacacaagagcattcctaaataaactcttttcatactgtgaggatgacacttctcagtgcctcagtctggaatggttgaattagaatacacagccctgtatctttcctgtccctagtaatcattcgttggaaagagctaatgaggcttacaaatcttaaaattgtatgaacaccttgacttagatttgtgagtatagccacctgtgccatcctaagtgaaaataccactgagacccaccccatctgcactgtgatgttagctgcaacatgacatttttccttcggtgtgatggttttgtactgaatcatttatacttttgcccaatacctgaagcagatagataggctgattgggatagagaatgtggtcatagccctaagctacatggacctatagctttggcctacttggtactgggctgtggacacactggtaatatattaccgtctttgccgagttacagtgtcttgtctccattaaacctcaacaggaccagggcttcattaaattcgctctgctataaataattacctcatctttctaccatttgattgaaaggttagcttttaccacagtttgataggaaagctatttctgctttttaccacttgtctaattcatggtgaaggcaattgccaccttaagttctttggggaataatgtagagtatatataaattgcaaagaatgaagctggctgctttcaggcttccagaccattagtttaatctttcaagcaaaacagaacctagcctttttgtctcttttctagacactgttgtgaaggaccaggctcgaatgggttcatctagcatgccagggggcagtacgcccgtcagcagcgccaatatgatgtcaggtcagttcattggtaaattttctttaaaaaaatgtggaagtcaattactgttcttagctttgtggtctgatttcttgtataccttctcttctccgtactggtggccttgtgacttttttttaaccaggtttcagcatgcttgacatttggtatactttagtgatactgtcttgagtagggtatccccttctaggctagaatctcagcattcctggctgaaaatttttggcataggggcttgaaagtgccaagccatgaaaaggaaaaatacaccatttcatcttatagtttgaaatgacagtagttacatggcccttagaaacaatgttaagaaatggggtatagaggtggggtttatacataggtgtgtatgtgtacaaggacagttccgtgacatgtgccagagcaactatagagtgcctatcagttgtaaaaacataagtaaaatggttttccattattggatcattgtgacgcacagtgaatttttatagagtacccagttattccaaaggaactacaggcacatagcataagaattatacatataggcaacatccaagtgggtgcatatctggtagtgaaggcatttacttacatatcctcaaataattgctgttgccctcctcttttttaagaaaagaactaactgccttctagaatttaccccttgagtatcctacctctgtacagagtaatgtatatccaaacttacttgtagccttatttgtaataacaaaacattgagaatagctatcagtaggaaactggttaaatcagttatggtatatccatttaatggaatgtggtgcagccagtagaataagagtttcatgttctgttagatctccaactccaatataataatgtgaaatttaaaacgcaagatgcagggccaggtgcagtggctcatgcctgtaatcccagcactttgggaggctgaggcgggtgggtcacttgaggtcaggagttcgagaccagcctggccagcatggcgaaaccctgtctctactggaaatacaaaaaattagctgggcgtggcggcggcgcctttaatcccagctacttggaggctaaggcaagataatcgcttgaacttgggaggcagaggttgcagtgagccgagatcgcaccgttgccctccagcctgggtgagagtgagactctgtctcaaaagaaaaagtgagatgcagagccatgtctaagaggagtggagaagaatgtataataatgttctcatatatatatatatatatatatatatattttttttttttttttttttttttttttttttttttttttttttggagacaaggtcttgctctgtggccaaggctggagtgcagtggcacaatctcagctgctgcagcctccgcctcccgggttcaagcgattctcccacctcaacctcccaggtagctgggactacaggcgcccgccatgacgcccagctaatttttgtatttttagtagagatggggtttcaccatgttggccaggctggtcttgaactcctgacctcaggtgatccgcccaacttggcctcccaaagtgctggcattacaggcgtgagacactgcacctggcctttgtatacttttttgaaccttttgtattttgaaccatgtgaatgtattacctgtgtgtacacacacacacacacacacacacacacacaaaaacatgattagagaggtggaagaaatcaaatggaaataaattccaaaacacaattttatcttagaaaatgctctttccccattcaaattgactttcagtaattttgaaagctgccagctatcaagacagcatggtgtaagagcacatgagctttgactgcagtcatgtgctgttcagtatggtagtgactagccacgtgaggctatttaattacaattgaataaaatttaaaatgtagttcctcagttgcactagccatatttcaagtgctcagcagccacatgtggttggctactggtcaccagggtggacatctctgccctagacaggcctgggttagaatccaaccatggttgccacttgcttaatcgtgtactttggacaaactccttaaattgtccaagcctagatttctttacctgtctcttaaattgattaggacttgccactttaacttgaatttgtgagggtcagacttgaagtatatgtaaaaatccagctaagaggaagtcttcagtaaagaattattgtgttccttttgcagtgagtgctatgagaaactggtaagattgccatggttggtgtctttggctcactgacagctcttttctttcagggatttcttcagtgccaaccccttcaccccttggacctctggcaggctcaccagtgattgctgctgccaacccccttgggatgcctgttccagctgccgctggcgctcagcagtaacggccctatctgtctcctgatgcctgagcagaggtgggggagtccaccctctccttgatgcagcttgcgcctggcggggaggggtgaaacacttcagaagcaccgtgtctgaaccgttgcttgtggatttatagtagttcagtcataaaaaaaaaattataataggctgattttcttttttctttttttttttaactcgaacttttcataactcaggggattccctgaaaaattacctgcaggtggaatatttcatggacaaatttttttttctcccctcccaaatttagttcctcatcacaaaagaacaaagataaaccagcctcaatcccggctgctgcatttaggtggagacttcttcccattcccaccattgttcctccaccgtcccacactttagggggttggtatctcgtgctcttctccagagattacaaaaatgtagcttctcaggggaggcaggaagaaaggaaggaaggaaagaaggaagggaggacccaatctataggagcagtggactgcttgctggtcgcttacatcactttactccataagcgcttcagtggggttatcctagtggctcttgtggaagtgtgtcttagttacatcaagatgttgaaaatctacccaaaatgcagacagatactaaaaacttctgttcagtaagaatcatgtcttactgatctaaccctaaatccaactcatttatacttttatttttagttcagtttaaaatgttgataccttccctcccaggctccttaccttggtcttttccctgttcatctcccaacatgctgtgctccatagctggtaggagagggaaggcaaaatctttcttagttttctttgtcttggccattttgaattcatttagttactgggcataacttactgctttttacaaaagaaacaaacattgtctgtacaggtttcatgctagagctaatgggagatgtggccacactgacttccattttaagctttctaccttcttttcctccgaccgtccccttccctcacatgccatccagtgagaagacctgctcctcagtcttgtaaatgtatcttgagaggtaggagcagagccactatctccattgaagctgaaatggtagacctgtaattgtgggaaaactataaactctcttgttacagccccgccaccccttgctgtgtgtatatatataatactttgtccttcatatgtgaaagatccagtgttggaattctttggtgtaaataaacgtttggttttatttatcaaggtta

SEQ ID NO: 7644 - DNA, 1738 bp, Homo sapiens
gagaggccttaaaaaaaaagcaccacaagccaaagcgtctctggggattaaggatcctttgccataaaactcattttgtgtctcagcagtgcagggattggggatggaaaaagtcgccagtttttgtgtgtttgtgtgtgtgtgtaaagtggactttccactgtaatccaaccacctaagtttatcaggtgcttcactgaggaagcctagttttttaagcacaatagcaaaaccatcagctctgtattttctcctgttatttcattacagtagctgcttgtgggaactaggaaaaattcttccaacatattttaaggcctaaaatcttagttccccattctcctaccttatagattcacaggcctttctcgcctaggcatcatagataaacgtaattgtttggggagttgaatttaatgaacttatctaactttgtaacccatcttggctttagtaactttatcaaggtggtggctttagtgaatataatggtaaactttagaggacgctaaagcctccttttatagcgcttctcaacggtagggagagctgaagggaaaacattctgactgtgtggcagggtgattttcttccttatgaccacttacagtggatatttattgtacttgacccttttatgccctagaatgctgtgagggttaccatgttgaatttgtgcagaagctaaaagcaccagatgtgccagagatgcaatttgtgattatgtttgcactggattgtgatttgaacaggacacttataactaatgagttctttcttttgaggtggggagagggttgtaaatcaagacttcataccctatccttgtagctcggaaattgaggtgtagcttaggctgatgcggagagctgcagacagctggacctccttacacccatcagaccttggaataaaccgaaggtgaatgcagaggactctgaggtgccacccaagagccttttaaaataaatagaagtttttaaaaatgctacttaagagtcactgcagaagcatggagagagagaaaaaaaaaaaagacccaattgggtggggggtgggggggaggcaagggtttacagagtaacaacttacgtgttgttgtaaattacctcatctgtataccttgtattgggacactatttctcagcactacctgtgtctgcattgcttagatggcaggaaatggaatggccaacatgaaaggttatgttggcaattactctgaaagattttttaaagtatttttaaactttgtttgaagtggtccctcccctcttcctctgcttttttttaagtttgaagccagaaggccctccccaccttgctttattggttgtaattgtattgtaattggtatgactaaaccataactgtgctgggaagaagttgtgccatgaaggtctttaattttttttaataaaaacatttaaataaatgaaatgtccctgcagcctgagcaatatgcttctccaaccgacaccgtgtgtgatagatggctccgttttcacgttttgaattctgtttcttgtacttgaaatgcctgtccagcttacataagatagattaaattgttagagtgggactgtcagaggaatatatcttgtaaagtagatcctcagggtatggctaattactatagtcctaaagtagcagagaaaattagagattggttgacagatttgggaattttaatttcttcttagtttttaactttcatctttgcttcaccttttgacaa

SEQ ID NO: 7645 - DNA, 1738 bp, Homo sapiens; identical to SEQ ID NO: 7644

SEQ ID NO: 7646 - DNA, 267 bp, Homo sapiens
acgcctgtaatcctagcactttgggaggccgaggagggcggatcacctgaggtcgggagtttgagaccagcctgaccaacatagagaaaccctatctctactaaaaatacaaaattagccaggcatggtggcgcatgcctgtaatcccagctactcgggaggctgaggcaggagaatcacatgaacctgggaggcggcagaggttgtggtgagccaagatcacgccattgcactccagcctgagcaacaagagcgaaactccatctc

SEQ ID NO: 7647 - DNA, 4388 bp, Homo sapiens
gtggcgtctgggtccgttggggcagaaccatggaggaaaagccttcgaaagtaagacgtctccctaggccccttaccctgtccgctccaacccacccttggtccgactcgggcccctggcgctatttcttactcagccttggctgcccgcagcccccacccaaccccacgttctacgggatccccaacccggcccggctcagttccccagcccgctcttccttcccgctccagccatccgcgacccttggctccctccttgtatgtggcccacaggtgtcgctcaagtcttccgaccgccaaggctcggacgaggagagcgtgcatagcgacactcgggacctgtggaccacgaccacgctgtcccaggcacagctgaacatgccgctgtccgaggtctgcgagggcttcgacgatgagggccgcaacattagcaagacccgcgggtggcacagcccggggcggggctcgttggacgaggggtacaaggccagccacaagccggaggaactggacgagcacgcgctggtggagctggagttgcaccgcggcagctccatggaaatcaatctgggggagaaggacactgcatcccagatcgaggccggtcagtgtggcctcgccaggccgtgggcacccgcagggcaataagctggccagggactcaatttctggagctgtaaaatggggggaagctgatgggatccaagtttctaggattctctgggagaggcgcccgcgccaatctttcgccctttaaatccgccaggcattcttggagcgccccctcccgggcaggcgttgtaacaggcctttcggtcgtgacgcgcagagtccggggaaggacgcaccaaataaattgcgcaaagaccccgtggtaggacctgcggggtttttttgtttcgtttgttttgttttgttttgtttttgagacaggatctcactctgtcgcccaggctggatggagtgcagtggtgcgattatagctcactgcagttcaagtgatcctcccgcctcccactttttttttttttttttttttttgagacggagtctcgctgtgtcgcccagactggagtgcaatggcacgatctctgctcgctgcaacctccgcctcccgagtagctgggattacaggcgcgcgccaccacgtgcggctaatttttgtatttttagtagagacggagtttcaccatgttggccaggctggtctcgaactcctgacctcaagtgatccgccggcctcggcctcccaaagtgctggaattacaggcttgagtcactgcgcccggcctttgttttttagagatgacgtcctgctttgtcacccaggctggagtgcagtgttgtgatcatagctcactacagcctcaaactcctaggctcaaggtatcctccaacctcagccacccccaccaccccgagctgggaggacaggccggcaccatcctgctcagctaattttttattttttgtagagaaaatttcgacatgttgccccagctggtctcaaactcctgggctcaagtgatcctcctgcttcggcttcccaaagtattgggattacaagtgtgagccaccatgcccggcgagacctgtgtttttaatggaatcatcccaccagttgcaagagttaactccttgtcttatgatttgcgctggttgaggaggtgtacgtctttccattagtcagttgctggttacaatttctaagcccctactacgtgctgggcactgtctggcaccccctcaaactacttcatcagagagtaagaaccaataacagtataacaatggttacatattgagcacttgctgtgtgccaggcacggggcttcccctggattgtcaccttcaaacttcacaacctccataaagagctatttattttttatttatttatttttattatattttttgagacggggtctcactctgtcgcccaggctggagtgcagtggtgccatctcggctcactgcaagctctgcctcccaggttcacaccattctcctgcctcagcctctggagtggctgggactacaggcgcctgccagcacgcccggctaattttttgtatttttagtagagacagcgtttcaccttgttagccaggatggtctcaatctcctgacctcgtgatccgcccacctcggcctcccaaagtgctgggattacaggcgtgagccaaccgcgctcggctatttatttttgagtcagattctcactctgttgcccatgctggagtgcaatggtgcgatcttggctcactgcaacttccgcctccctggttcaagcaattctcctgcctcagcctcctgagtagctgggattacaggtgcctgccactatgcctggctaatttttgtatttttagtagagacggtgtttcaccatattggccaggctggtcttgaactcctgatcttgtgatctgcccaccttggcctcccgaagtgcctggattacaggcgtgagccaccacttggccaagagccaagagctgttcttttttttttttttttttagtttttttttgagacagagtctcacttcttcacccaggctggagtgcagatgtacgatctcggctcagtgcaagctccgcctccctggttcaagtgattctcctgcctcagcctcccgagtagctgggattacaggcacttgccagcaagcccggctaatttttgtatttttagtagagacgggggtttcaccatgttggccaggttggtctcgaactcctgaccttgtgatccgcccacattggcctcccaaagtgctaggattacaggcatgagccaccgtgcccggccaagagctgttcttattaccccattttactgatgaagaacttgagggtcagagagtgtcagtcactggtcctaagtgtcacactgtggggcagtcattactggaaccatgtgggtggggctctaaagcccagggttgtaacctctgtcccatgctgaccccaaggctgcaccaggagctggtctctgaaggccattccctctcacaaggtgcctacccatctcctgtgctccagggaaggcccaggagtctgcggatgactaacccttttttctcttctcccagaaaagtcttcctcaatgtcatcactcaatattgcgaagcacatgccccatcgagcctactgggcagagcagcagagcagggttggaggggctggggagactgggcgtttcggtggggtaggggataggcaaattgggggttgataggatatgaaagttgggggtggttggcagggtggaggggcaggcaggctggttgggggtttgggggccacagggaggaggtgggggcatttcagctgtgggcagagatgaagtacctggacgcctaagcctcttgctgcttctccagctgccactgcccctgatggaactcatggagaatgaagctctggaaatcctcaccaaagccctccggagtaagctccccgccaacccccaagaactcccacgacagattctggtggattttgcagggctggggcccaggggggtggggtttcagggtgccttatgtcttgtcagatgcccttggcactcacaagtattccaagggccccataaaagttaaaagctgagggactgggcacaggaagacccagtgggggacatgtggtgatgggcagaggcctgggctccaggctgagtgcagcccctctccagctgagggaggcttttctgtggctgtttctccacctgcacagtgggatgaccgccttggtgtggcctcgactgcctctggttggggagttgtgaggagcctttggacagtggattatgtgggtgaacttttgctgctggggtaggaaagcccagcggtgataaagggccagctgatggcttagagtgggtggctggtccagaaggtgggcaaactgctcgctaccaccgccgtagttcaggcctgcaacctcttccctagccttgacctcatccatcctccaccttaacactcagcacccttagagatgcaaagttccccaggctaacacagacctgagtgccctgcgctactgctacctcgaatcatctgcggttcctcgaatcacacatgcggcgccccctggtggggagacctttcggttgctcactgccctgagccgagctctgccctcctcctaggctaccagttagggatcggcagggaccacttcctgactaaggagctgcagcgatacatcgaagggctcaagaagcgccggagcaagaggctgtacgtgaattaaaaacgccaccttgggctcgagcagcgacccgaaccagccccgtgccagcccggtccccagacccaagcctgaccccatccgagtggaatttgagtcctaaagaaataaaagagtcgatgcatgg

SEQ ID NO: 7648 - DNA, 1542 bp, Homo sapiens
caccagaggattcacactggagagagaccctatcagtgtgaggagtgtgggcgagcctttaatgataatgcaaatctgatcaggcatcagagaatccacagtggggacagaccctattactgtacagagtgtgggaatagtttcacgagtagttccgagtttgttatacatcagagaatccacactggggagaaaccctatgagtgtaatgagtgtggcaaagcttttgttggtaattcacccctacttcggcatcagaaaatccacactggagagaaaccctatgagtgtaatgagtgtggcaaaagctttggaaggacttcccatctaagccaacatcagcgtattcacacaggggaaaagccttattcttgtaaagtatgtggacaagccttcaattttcatacaaaactaactcggcaccagagaattcacagtgaggagaaaccctttgactgtgtagattgtggaaaagccttcagtgctcaggaacaattaaaaaggcatctgagaattcatactcaggagtcttcctatgtatgtgatgagtgtggaaaagccttgactagcaaaagaaatcttcatcagcatcaaagaatccatactggagagaaaccctatgagtgtagcaagtatgagaaggcctttgggacttcttcccagctaggtcaccttgagcatgtctactctggagagaagcctgtgctggacatttgtcgttttggcctcccagaattttttacccccttttactggtaatagtacactccagtgaaatgtactgagtggattccgtcttctactcaggaatggaatgtgtgacacaggcctgactcagcctctgatccatccctcaagccacagttaatgattcagatgtcagtagatgaccaaagatggttcaattagagtcccaggattgcaagagctaataggaacaaatactctccccccgcccacccccattggttttaatgctgagaagaagaactagactcttacagaggtgagaatgaagtccacacagcaaaaatgcatctgagaattggagagcagtaaaagactgaagataatgtttgaacagccacatacaccatgcctgaagctaaaaatatatacgggtttttgaattgcagcagccaataaattccatttttgtttggttggttttggctttggcacacctgagttaggttttcttgccttggaacagaattttgacttaaacagtgttgtcattgtagcagttgtttgaagttttcagggataacatacctgatggagaaatgttttgtgtgtatgatatatgggaaagtctttagttatagtcatggcagctcctcaaccccatgattgtgatgagattgggaagcccactgtaacactggagagcccaggttatatcagacaccactagtagatagaagttctaacaacttgagctctgtaacaaaaatctcattgtactacaaaattatgtctgcaccagtgaatccattctcaagaaaagtcttaactaggaaactaaaagctttcactctt

SEQ ID NO: 7649 - DNA, 18981 bp, Homo sapiens
tccagcccagggctgtctgtcttcaaagcccaaccataactcacatccccattccagctcctctgggtgagtctgttccccctcagcctcactttccttatcctgtcaaatgaaggatttggaatgacttaagttattcaagcaacaaacacttactgaattgtcttgccacttccagggtgacattatggagttctgtgattctgcaaggtcagttgcctagagtcacatcggtggcattctcttatttagcttgaagactaaatcgacaggtagactggcaggtgtgttacccagtgtctttctctccccctcctttctcactctgccccttcaccctgcagaggccagaggggacaaggtcaagtgggtgttcacctggcccctcatcttcctcctgtgcgtcaccattcccaactgcagcaagccccgctgggagaagttcttcatggtcaccttcatcaccgccacgctgtggatcgctgtgttctcctacatcatggtgtggctggtgagtggggggagcagggggtggactgtgtgcacagccagggagaggtggagagctgggttcaaggctaaccacaggtactgctgtgccacctttgggcgagtcactggcctcactgaccacagcgtatttctcagtagaaaagggtttgaatgaggtgcatgactctgtgtcaggtacccggaatgcagagacacagcacagtgcctgccttcgagtgtgagggaaggggaccaacctttgcacaggcagcctaaatcacactgttctggtgttacaggcagagcaatatgacaggtggatgatcaccaagcccccttggtttccagggtcccaagggaatgtgaaggaaggagactggagtcaagggagatgaggttgaacacaaggcagcttgttccttgctcctgcccaggaatgctcctccccccactgatgtgctggtgctggtttaagcccttcatataaactctttcttatcctcataacagccccatgggatgggtgctattatctccatctaacgaatgggggaaatcgaggcatagagaaattgagtaatttccccaaggttacacagttagtgagtgccagagttaggattaggacccaggtattgatctcctaagcccatgatctcaactactaccataagctgcctctcagtttgctactggacttttcagatttcgttggatgggagttttgcaggcagagaggcattggtgtagctcctcataagctcctatggccatacaggacaagtccccatgtaaacctttcatcggctgggctgggctgggtcaggccacacaggagcctccttccccactctctgtataccacctaatggggtcccttcttctcctcctcattcccaggagcaaagagaggggaagcagttccagcatggctgcagttctgttgattgtgaaactcactctcagccccttacaccctagtggttaacatcgagtccctttattctcctcctaatgcctgacaccagcagcagagaaggcaagcgatcttgacatgagagacagcagggccagtaaacgttccatgctggcccaggggccacctttcccttaactccagagaaaccgtgtcgtttggtggggaacaaaggatcctggatcacatgagaacagcgctgaatcctagtcctacctcttgcaaaccacagaagctggtgactccctctatgaagtgggggtgatcatcactctcttacaaggccattgggagaatgaaaagagagcccagcacattctaggcacttggccaatcctgtctcttccctccccccaacccaatcacgccttcccccatctctcccagagcattactggaattctaaacagtgtatgggagccattttgcctatgctttcctgaaatcccaccctttggccggctccctcacctcagatgcttcctcaggctgatcagagacctgccgcaacctctgtgagtgtccttactcatgcagcagccctcctgtccctgtggcagagcctccccaagacaccagctggtggaaggtgctgcccccagcctgttccctttctccctttcttctggtacctgcttagagctctgtatcccaaaaggaagctcaggacggactctgtgactcctggtaccggcttagagctctgtatcccaaaaagaagctcaggatggactctgtgattgtgttttagtgaatgaaacaagtcatgtaactcaggagaggcagaaccactccaagcctccaggaccccagcatctgccccagccccaggcactcacacttggaacaccctggccttggttcagctaaatgggggacatggggacacttgaacattcaagtcccccagaacctcattcatgtccctcctgaccactccctttcacaccctactcccagcccaaaacagtttggttagactgtgtcagaagcatccagtcgttagccgcttattgaaaccaacagccaattaagggtgattacctggtaacagtcagatgatcatgagcgttgctgaataatacacagtttggccactgagtagtgtgatttcttatagtgcccttcttgtgtcgagttagtgttgtgtacattatacccaatttcaacctaatcttacttcatcttgttcaagcattgtgatttgagtttgcagcatggttggttgctcatgacagtaaatattagccattttcaccatgagatgcagcagtgctgtttccatgcttccatgatgaagattaaagtccccacagcccactccatatgggggatggggaagaagatttggaattagttactatctaaactccctagagactgggtgtggtggctcacacctgtaatcccagcacttcgggaggccaaggcaggaggatcacttgagcccaggagttcaagaccagcctgggcaacatagtgagaccctgtgtctacaaaaaattaaaaaaattagccaggtgtggtggcatgcacctgtagttgcagctactcaggaggctgaagtgggaggattgcttaaacccgagaggttgaggccacagtgagccatggtcaatccactgcactccagcctgggctatggagcagagcaagatcctgtctcagaaaaaagaaaagaaaaaaaaaaactccctagaaaaagatgacaatcagagataaagaaaactgtgccttaagtgaattggatttgcaatttttaatttttctgaataaaattaaaggccagttcatcttacattttaaagaaaggatccagcgatttctcttactgaagtgtatttccaaaacaacattacaagtaaaaaaaaaaagtatttcatgacatttgagtgggtgagagaatcaggaagatcaaattaatgaatatgtgaaattcttctctagttacagaaaataaccatatgattaaatcagttctgctaattttcagtgagacaggatactccaacccccaccaccttgaggtataaaccccacccttgtttcttaaaccagggtcatggggtcacaggaaccactttactggggcactcttacctatgggtttgaacttcaaatagcctcattctgggggagtagaatggccttgacagtaaaagtctataaagaaggcagtgtccacgttagccttgatctctgcctatgcaagatgtgcccacctcagcaccctgcgcttactttcactatgtcctggtgaggctccagcaagcagtgaagccccacctgtccatcccctgtacctccaccttttattaatacatctctcacccccaaggctttggaagaatgattcttgaatatcagtgtcaaaagggagaggccttggaaatggattgtccatttccccagaacacttgtgcagttggggaaactgaggaccaaagagaagaaatgacttctgtaaagtcacacagacaggcagggcagagccaagaccagccgccagggtcctggacttgaatctgcttcctggtctgaagcctgagtgttggagggctcagagggcctgggcatggagtccagggtaaagcagggttcatgtggcatccctggtcctgagcactctggatggtatgtgcacactcaagaccttccttccatccttccatcctttggcttcttagcctcgtagttcagtgggggttttttttgttttgttttgttttgttttaaaagaggcagccccagtaattctaaaataactgtttcctacgcttacagtgtctctaatactaggaatatttctttagtccacacactgttggttgagagttcatgtctccaccccacattctgcaggtgactattatcggatacacacttgggatcccggatgtcatcatgggcattactttcctggcagcagggacaagtgttccagactgcatggccagcctaattgtggcgagacaaggtatggattatgccccagccctcatagtcatgcagtgcaggccactgtgtcctcgtccctgcctgacttacagttgaccaagttgtggctcttatgactggcagttgtcaagtcctgctgtggagaaaaactgcgacatctagaaagcatcatttattagattccatccacagagagaatgctaccaagatgaactcctccagacctctatctagaagcttttgctagtgtggttgtataaaaacaaaaatgttctgaggtcagcagtcaatgtgagattgaacagaggccaagcccagactttatacagcaaatgagctaataacaagaaacattctggtcccagaaaggcaaagcactggcatcctatacatccaactcccccattcttcttctgacctctagaacgtgtataatgttttggtttgtttggtggttttcgttttgggcttactacgtggcatgggctgagcaacacaaggagtgagtgtatgagctttgatggtggaacaaaagagctgtaacaagtgcaggttttactgacttcttttctgctagccaggtagcatcccagcatggacatccacagatcttcctcacagcacagagtttgaaagtatagggatggggatgggtgaataatggcgtaaaatctcacaggagacagaagagaacagtgcccaaagagagaggttggctttgggaagagagacaggacgtgttattcctccaagataaagggttgattggttggttagtgagttgagcctgagaaaccacgagatgaggggaaaggaagagtggaagtacgtttgctggtcggcagggccctgacagcgaatggggacagttagggacagcagctgagggaggaatggaatttaactgagtgatctttgatgtgagcgtgttagtttcctaggggagtcataacaaagtgccacaatggggtgccttaaaatgacagaagttcattgtctcacagctctggcagctaaaagtctgaaagtcaggtgtcagcagggccatggtcccttgaaggctctaggggaggaaccttccttgccccttcctagcttccagtggtcacgcaatccttgggtctccctggcttgtagctgcatcactccaatctctgcctctgccttcacaccgcattcttcccttggtatgtctgtgtcgacttcctcctcctgctcctcctcctcctcctcctctcgctcctcctccttttcctcctcctccccttccttccttccttccatccttctcctcctcctcctccttcttcctctttttttttttttttgtgatggagtctcactctgtcacccaggctggagtacaatggcgtgatctcggcttactgcagcctctgccccctgggttcaagcggttctcctgcctcacccttccgagtagccaggactacgggcacatgccaccacacccagctaatttttgtatttttagtagagacaagtttcaccatgttggccaggctagtctcaaactcctgacctcaagtgatccacctgtctcagcctcccaaagtgctgggattaccagcatgagccactgcacccagcagacttcctccttcctataaggagaccagtcatcagattagaactcactctaatttagtatgaccttaccttaatttgagtacatcctcagagaccctatttccaaataaagtcacattcacaggttccagatggacatgaatgggggcagggtactcagcccagtacagtgagtacaaggaaagctggtgagcaccgggtctaatttagtatgaccttaccttaatttgagtacatcctcagagaccctatttccaaataaagtcacattcacaggttccagatggacatgaatgggggcagggtactcagcccagtacagtgagtacaaggaaagctggtgagcaccggggccctggccgatgttcagcgacatgaacttggtgggattcagtcatgccagcgccactggtgcacagatgacaagttcatccctagccagagtcagctgggtggacacagtggaaggtcaagggacaaggaaatgtgcagtttaaacaactggccctggagttcaggctagggaggggtgttaggatgctggaagtttaagggcttgcaggagtggggagtgtcccagtaagatcaacaaagggtctctgttaggaccaagggacagatggggctctgaagcagcacatcatctcagagtggctacagcgaaatgtggaagtacagaaactgaggaagggtgaggccaggggcgggggttgcgtaatagtcctcagggtaacattgatatgattgacagggactccaacaaacatggttaaaaatagcttcctggctgggcgcggtgggtcatacctgtaatcccagcactttgggaggtcgaggtgggcggatcacctgaggtcaggagtttgagaccagcctggccaacatggtgaaaccccgtctctactaaaaataaaaaaaattagccaggcgtggtggtgcacacctgtaattgcagctactcgggaggctgaggcaggagaattgcttgaacccaggaggcagatgttacagtgaaccactgcactccagcctaggcgacagagggagacttcgtctcaaaaagaaaaaaaaaatagcttcctgatgacaaaagatccaggaacccctgttcagagcctgctgtacaaaccaggaggctgtgcagcacgtgctctaacccgaggcaccatatcctggcctccctccaggcccgcagcacatagcatggtcctagccccgagcatcggcttgacctgggagctgatgagaaatgcagactcccaagctgtgccccagacccactgaatcagaatctgcattttcacaagacccccaggtgattcctgttctcactaaaatttgagtcgcactgccctagaagtcctcaaaggctcacacagctgccggcagccccgtttgtgcagagcgggaagtccaccaaacctgagacccgctcatcccctcctctgcaaactcaggcaccttcctaccctcctgacctgccggagtgcctgcctcttcaccaggtgcaactaactgggccacaacagttgctgcatgttcccgcatcttaccggacactgacagaccagaagtccaggttcccagagacgccactcctaacaggactaagctaagagattttgaagtcactcagaaaagtgcctggggcaggctgggaggaggagtgtaaggggccaacagatgacagcaacaagcaggggaggaggaggtgacctagctatgcaacatgggcgggctggcagtcgaacagagatgggccacctgtgtgggtgccgatctgagttgcctgccgtatgtgccagctaccaaagcaatgttgtggttctaggcatgtgcgtttcaggtttgttcattccaaaaacatgtgtatgtgtgccaggttaggacagtggtgtggaagtatggctcagtggccgggttagggcagattccagccagtacgagtcttacttacaaaagtttgctttcttaattatatgcctctccagttactaacttcctgattgtgtggctagctggatactggacagctggacaggaaggggaaggacgaggacatgggccccagcctctgatgtgcttctagcctggttggggaaagagagctcacccttcagaaactaccagagcatacaatccgatatcctgtgattcccaggcagggtcgtgggtgctgttgcctgggtcccaaatatgcttcaaggcttggtaaaaaggatgctgtaccaggggaccttgggccgcctgcaaactgtgcccttgggcacatcccaagcctcagtttcatcttctgtcacgcgaggttatgccccactccggcctccagcccagggtagctgggaacatgaagtgaggcgcagtggccgggagtcctcatagaacatcagctgacaagcctggcaggagagatcatgaagggcccgcatgcatctgctaggcttcgttcccacaaacggggtgccgtaaacaacggaagtgtattgtcttgtggttccggaggccagaagcctgaaggagagtctgtcccaggcccctcttgcctctctgcccttggctgtcttcatctttgcccaggttctccctgcatgtccagttttctcctttttataaggattcttgtgtcctgaaagaacctccttaaaaacaactaaaaccaagaacttctggggctgttcacacattgttcgagtcaccccaagatcgttctggcatgctgagctgaacaccaccatctttgttcattctctctctaatgggcaaagcaggatcatcgagttgaaaagttgtaaataatgagtatatttatcccgctatttattttttcaataactgtgacctcctgcactgtgaatgctctgtgacatgagattcttagtttaataaaactgtcattaaatttgaatgaattgatattattggttactgaacactggcatgagtttatttttattgtgaagaaaaaatccagtcatattggattaagaccctaacgacctcattttaacctgttacttctataaagaccctatctccaaataaagccacattcttaggtactgagggttagaacttcaacatatgaatttggagggtcacagtcaacccataatagtcccctttaggcttcaggaagggcatggatctgaggccttatgaaaaggtttagaaatgtaaggtccttgcagaaggaattgctttccaaggaatggcactgatagaacagttaggagaaagaatacaggcttctggtgacctgctcttataaaataaatgtgttgttgtcccctgcaggccttggggacatggcagtctccaacaccataggaagcaacgtgtttgacatcctggtaggacttggtgtaccgtggggcctgcagaccatggttgttaattatggatcaacagtaagttcctctcacctttaacagatgtgttttacccagaaggctagtggtgttggcccagttccagccagaggctctaggagacgacctcctcctctccttggcactcagacacccattttccatggcggcttctagagcaccttagggatgtctacacttccactcctcacctcagcccgctggcgtgcctctccccatcccaggctgtctcctcagatgagcagggtcgtgacttgaatccgtattttcctgaccctccacgaccatgtggtcacctgtaaacacctgtgttttcctgatgagggaatgcattgggcccaggcatgctgggatttctggatggattggctctgagcagtcaagagactcagggcacgtgtgtttgattttccaggtgaagatcaacagccgggggctggtctattccgtggtcctgttgctgggctctgtcgctctcaccgtgagtctttacaattccaaaacagatgcctcatgcatacttgatttcatctgattccgcctcgtcacttacgtgactctgtacacccctgtcacttcccttggtagtgaaggataaaggcaagaaaatgtagacgttcatagacacacccaagtccagtctttgccaagagcattggcactctcgctgtgcttttgctgagtacataagaagtccccagaggaagcgaattgcatttcctttcttgctgcctggtccagttcctctctagtgccagtaggagagagatcctcccctgcgcatctgagctgacaaatgggaggcatgacatccctcaggatggcacgtcggaataattgaggcctccctaccctacatgtccaggtctgtgctgagcacttgacttcagcgtcactttattctatccttacaaccacctgatgagggaggtgctatcattcccattgcagaagaaatcggggctcaggggttaactttcccaaggtcacagaattgggcaatggcaaagctaggatttgaacccaggttggtctgtccttagggaactctgactttttactcgcagtgctccagtgaggttcctgggatccagccccaggaagccttgatcgagggacaaggaggaaggcagtggaaggaaagatagaaggatcagggaggaatgtaagataattccgtgctttaaccctctaccccaaacacacacacacacacacacacacacacacacacacacacacacacacacacacacacagagaaagatttgcccagccaggggtccataggagccttggaaattgtgctaaggagacaagggaaaagaccatggttccacgctctgaagcacaggggtcatccagctaaagcccccatttgtctctagagaaggcctgggcaaggaggaccacatgcctacgaccagccgggaggaagtgacgtgcctgcctggggagggccggtcccatgagggcggctgctgtgtatccctgagtcaatgcggctaggacagagactcgccctttcatggggcaagtctaagccctctagggcttattctggtcaaactgaggatcagactgcagcaccccgctacacttgcccacattctgcagaatgttctaggtttccccacataggtgtcgctttccagtagaaatgcctcttgtatttctttgccctgcaagcccagttcccacactctgtcctcccaggtcctcggcatccacctaaacaagtggcgactggaccggaagctgggtgtctacgtgctggttctctacgccatcttcttgtgcttctccataatgatagagtttaacgtctttaccttcgtcaacttgccgatgtgccgggaagacgattagcgctgagtcgcggcccctgggagctgatctggacaccctgtgacactggcgtcctcctctcccctccttcccccaccacaggtctctcctgcataggcagccactgtccgttctttcacacactggaaggaagagccatcgtggtctttgtctggccacaggccaggctgctgggcatcctcctcctccttggagttccgcccctgcaaggctggatttgggggccattatctgagcagcttcaaagacccctgagctgccaaccacggagatgtgccaagcatctcatctctcctgcacactttagtcagaaggacttctgcatgcagtttgtctttctgttctgcaggcagcttcagaattgaggtcatttgtgagcacaagatctcatagggcaggtgcaaaataggaatgttgttctcaagtgtcacctccagcccagaggtggttccttaggcagcatgtgctcctgggagcctctgacttttgctggaagcagccacagtttggaaggggcaagacctcaacctgttggggtttagggcccatgatggcagacattctaccccttttcctggaaaaactggaagaatgaaaataatttttttctgtggaagagagaaaatgagtgaatattcttctcacttttattgatgcattcagagaataagcaatgaaatattaaaaaatgaaacatcatataggtcatcatacttgaaaattatcattccatatgaaaggatcatgatacacaccaaaaaagtaatgatcgtaaagacacaaatcctctgtatgccatcttgcattggcactgaggtgtttggtttggaatagggaaaaaggtaagagactaacgtggaaaggtgctaactcagagactggagattatagtttacagctgtactttccagatcttctatgtgacacaatgcactgtccttgtgggtttgtcatttattggttaatgctctagtttcaaaaccaccctgttgaaagttccagttatttatatgcccaacaaatttcatagcctgctgaactgaactgagtgtgtcagaagtgctggttaatgacgagaagagattgcctgaaaaacaacaaactgctttctggttagctgaaggcaagtgtgaaaatcagaatttagaatatttagagctaagcttctggaaccacgtagtttctacacgtggcaggccaagaatgggaggctgactcaaaactagatagaaaaatataaaataatcttcgaccacttgatagctctcaaatatatatttaaaagatttatgaatacaaaccatttatggtttatgatttctaaaaagaaagcacaattaattttatagagaggttttttatttttttaatatttctattgcaaaagtctatccgatttgatgcactttgaatattgagatattttgcacggatgaatgtatgggaactacccatgatgatgtaagaggaaagaacatttttttgtgattcaccagacatcactttaaacttggtgatgagtttaaatccagtagctaatcccttcctgagactcaaagatcgtgacgctggttggaatttctgactgtgccctttagggcctcctgagtttcaaaaggaggaagtgttcgtgcttgtgtccctgaagttccctgttgcatgagcctgcgacaggacctcacccccaccaccaggcttctatttgggattcacatcagtattagtatcgtagctacaccaagttcaggcttctctttttgtttttttacctagaaattgggctcagtggtcttcaacttgaggacgagggtgattttcctaagaaatcagcaaagagggaaggcagggcccctgtagattcaccagtataaacttcagctgcagggattccagagccctcgggaccactctgtcaccttaatagccaagttctcctggttcctccgatcttacaggctcatccaggttccaaagtgcttctgtctctgttttgattctccaaactgctctgtgatgtatgtagggattattctccccacttaacagaaagtagtgtcttggagaggtcaagggtctctagttcaatggccagtcatagcagaagggaggccaagcaccagtccatcacccctcccaggccagcctctgtaagttggccacacttggggagtgagtgtgggtatgactttaccctcctggttggttcttactgtttgagtcaaaacctcatcaatatatcattgactcctgggttcctcaggtcatttcctaatatctgtccctatccaatgcctctattttatcttgaaaaaaggaccaaaaattatttttagctatggcaaggcacaggccacatggcccctgatggcgtccctgctggttttcaattctctgaagccttgtgtagctttcagagcacacgtatcctaattaccctcctcttcctcagcagaacccatttgagattctaaatgaatactcttagtctctaaagttgcagttagaaactaaaataatgttttttaatatgtaatatgctcctcttggctaattttcttttgactttaatgtgccaatgtaacttcctttaaaggatctatgcatttattaaatctggaaaactatatgtacactgtaggtggaaaattctcttttttaactaaatatttttccatcacaaatttaaagaattgcatgattaattaggctttcatttttaaattacgctttcatcactacgcaggattactttattttattcccaaagctcattagcatgggataattactctgctacagaaataggcaatttaaaaaaatgaatttagctcttctcattgggggcagaaaagaaaaaaaaaaccattgcactcagatggaaaatgcctatagacacaggagcaggtggttcctgtggacttctggtttggaattttgcctcaccaggtcaagcgtggttagggtggaaggtgtccagtatcttgaaaacctggccctggaggaaggttctgggtcagctgcaatgagagactggtgattaagggcaccgtgggcaggacacagtcctcgccttacccaccccatccttcctgttacccacagtctgctggcctccatgcctcttccccttgtcacttgtgtctcctccttatgcacagagctgcctgcctttatgaattttcttttcttttttttttgagacagcgtcttgctgtgtcacccaggctggagtgcagtggtgccatcttggctcactgcaacctccgcctcccaggttcaagcaattcttgtgcctcagcctcctgaggattacaggcgtgcgccaccacacccagctaatttttgtatttttagtagagacgggttttcaccatgttggccaggctggtctcaaactcctgacctcaggtgatccacccacctcggtttcccaaagtgctgggattacaggtgtgagccaccacgcccagcctgcccttgtgaattttcacctgctccttacccctcacctgttaggactgtttcttgcttttgcccctgtcggtcccctgccttaacagacctaagcagctgataatgcaccaagcttccctgaccaggtggggtgtgtctatcacccaagggcagtcctacagaccctgaccaaaggccgttcctgggcggcccaaggtccaggtttcttccacctgctcttccctgtttatggggatttgcaagcctaattgcatcagcaggagcccatctctcagagaacccggactccccaagcagactgggattttgggaagggtgtggggggtgtcattgctggatacccgtctttctgcctgtcctttctcctctctgaatcctggggcccctctccctccttaaagctggagtggacagagggacaggagaggatcagagttcatcccccctgggaaagagcaagagcgaatgaatcccagcgccagcggctgaggctgccttccgtgccttccctccatgggcgacgggtgagtggggcttaggaaactggaacagggaaggttctgttaccacactttggaactttccccctgggattcagcagttgagaagcagagacctttctgccctgggtgaatgggtccttgggggaggggttggtcttttgtctcgcatccccatctttcctttccttctgggccatgctcctccctggctggaaaaaggtggctgtgctgtccctgtgatccactctcagcaaatgcgtgtggctcaaataaacaaagaacttacctgttagagtgaaaatcctcaggagattgtacccaaatgccatgctctaaatattcatggtctctctaatgccctcaagacgtgatttccatgggaaccatcctcccctgggggcagttagcaggagtacgtggggcacgtgaggtggtcctcctttcagcacaccgtgcccatagaaacttctagaaatttctgaaaatgctctgtgggcagctcttgggtggcagtaagtccatcaacccccatctaccccgggcctgaagcgctgcgcttgctctctttatgtgtgtgcacccgaaggatttcctggtctctgtagctgatcctgtgagcccctcaagcatgaagcctcccttggggcttctcaaagcatggagaggggcccttcctgtcctttgggaaaatcttccccactgtgtcagttatatgggaacaagagtgatggggtctttctctaggcctgtgccacaggacagagaacacgggattctgctgttcgctttgagccacagcctttaccagcccggcttgtgtggggggccccttcgccttgctgcaaagagctgttccccaaagggcatatccacagggtacaggttttaaaaaggcttttttttttttttttgagacagggtctcgctctgtcgcctagactcagtgcagtggcgccatgttggctggttgcaacctccacctcctgggttcaagtgattctcccacctcagcctctctggtagctgggactacaggcacgcgccaccatgcccagctaatttttggatttttagtagagaaggagtttcaccatgctgaccaggctggtttcgaactcctgacctcaagtgatccgcccgcctgggcctcccagagtgctgagattacaggcgtgagccaccgcacctggccaaaaaaaggcattttgatttaggttgctgtgtttgcttgttgataaagaaaactcaatcgggacactagttttgtgctcagctttaggccgggtagctaatgggaggatgtccagcctgtcactgtgctcccagcgcaaggaaatgggtgcccacctggaatcaggagaagaggcttttccctcctgttctgcaaccagggtggagctatctttccagggaagccagctgagaggttttagggctttggttattttatgggggttttaaacctcctaacttttcaatgacaaatggctcccaggtgccatagtctctgttaaatcctcaaacattcacaagcacacactgccaggggcacgggttgtctttcacctgcatgtttctaaggctctttattcaatctcacggtgtcagtgtccagttgtcaaagttatgaatcttcctcctgcttctaaacagggctgacagtatactctcgtctagtctaggaacatgtctgctgctgggataccctggtaccaggatttgagggccacgggtggcatctctgagagctgaaaatccacagagtgcctgtgggaaagccaagcccttggctgtgtggcttttctatcccttggatttacaggtctgggaattggctgcttcttagttataaccccagtgacaaatgctggcttaagccacacctgttcccactgttgctagaattcaaacagttgctttttttttttctttttgagaaagggcctcactctgttgcccaggctggagtgcagtggcttgatcacagctcacgaaagcctcaaactcctaggctcaagtgatcctcctgaaaagtaggtaggactacaggcacatgccaccacatacagctaatttgttttcattttttttttttttagagacaggatctcgctgtgttccccaggtaggtcttgaactcctggcctcaagtgatcctcctgccttgacctcccaaagtgctggattacaagcgtgagcccctgcacccggcccaagcagttgcttctttttttctctttttttttttttttgagatggagcctcactctgttgcccaggctggagtgcagtggcgcgatctccactcactgcaagctccgcctcccgggttcatgccattctcctgcctcagcctcccgagtagctgggactacaggcgcctgccaccacacccagctaattttttgtatttttggtacagacagggtttcaccgtgttagccaggatggtcttgatctcctgatctcgtgatccgcccaccccggcctcccaaagtgctggattacaagcgtgagccaccgcgccccgccaagcagttgcttcttatgcaacatgttggttgggacttgtccacgggccaggccaataaaattcttaatcctgcagagagtcagtaccctcatcaccccatcactggaaaacaaatgttttaagctatcaagagagggaatgtgcagcttttggtttctagatgcatggtttggtgtgatctacctttgtgcctaaagggaatgtcccaaacaacagagccttctttgctgtcactccagaattctctacacagaatttcccaagtccattcaggacagacgcgcagtcctctttcaatggaagaagagaggacttttcccctcctgaaaaatgactggagtgtgaacaaggcagctctgtttttctaaataagttgttcttgtgagttttttctggccactgggcatctctgccctcacttttcatccctgccctctaagctgcagaccccatgaccacactgtctgcttccttgagcttcccgcacgaggcttggacctgggggacctggagaccctgcggacagaactgtggctgagccactgtggccaactcttggggagctccacagtgggggttgctggtctgtgaggctgagtctccatttcagagcacacactccctggcagggcgcctctgcctgtgtctcctgcccagcagccgccagcagggaatagttgctggtgtctgagcacaaagagagctttgattacctagagaggaaaaaggctgtcagccagatgcagccaggcccaggggtagatacaggagttgctaaggaaggggccgagccaggagaggccaggcagatccacaaagcccaaggggatgcaggctgggtgtggtttctgagggaacctaccaaatagcaggtagatggaatcagaggactcttgtgtcctgaaagaacctccttaaaaacaactaaaacgaagaacttctggggctgttcacacattgttcaagtcaccccaagatcgttctggcacgctgagctgaacaccaccatctttgttcattctctctctaatgggcaaagcaggatcatcgagttgaaaagttgtaaataatgaggatatttatcccgctatttattttttcaataactgtgacctcctgcactgtgaatgctctgtgacatgagattcttagtttaataaaactgtcattaaatttgaa

SEQ ID NO: 7650 - DNA, 369 bp, Homo sapiens
tgtgattcaccagacatcactttaaacttggtgatgagtttaaatccagtagctaatcccttcctgagactcaaagatcgtgacgctggttggaatttctgactgtgccctttagggcctcctgagtttcaaaaggaggaagtgttcgtgcttgtgtccctgaagttccctgttgcatgagcctgcgacaggacctcacccccaccaccaggcttctatttgggattcacatcagtattagtatcgtagctacaccaagttcaggcttctctttttgtttttttacctagaaattgggctcagtggtcttcaacttgaggacgagggtgattttcctaagaaatcagcaaagagggaaggcagggcccc

SEQ ID NO: 7651 - DNA, 318 bp, Homo sapiens
cccttttttttttttttttttgagatggagtcttgctctgtcgcccaggccgaactgcggactgcagtggcacaatctcagctcactgcaagctccacttcccgggttcacgccattctcctgcctcagcctcccgagtagctgggactacaggcgcccgccaccacgcccggctaattttttgtatttttagtagagacggggtttcaccttgttagccaggatggtctcgatctcctgacctcatgatccacccgcctcggcctcccaaagtgctgggattacaggcgtgagccaccacgcccggcctttcccttt

SEQ ID NO: 7652 - DNA, 416 bp, Homo sapiens
actgtttgagtcaaaacctcatcaatatatcattgactcctgggttcctcaggtcatttcctaatatctgtccctatccaatgcctctattttatcttgaaaaaaggaccaaaaattatttttagctatggcaaggcacaggccacatggcccctgatggcgtccctgctggttttcaattctctgaagccttgtgtagctttcagagcacacgtatcctaattaccctcctcttcctcagcagaacccatttgagattctaaatgaatactcttagtctctaaagttgcagttagaaactaaaataatgttttttaatatgtaatatgctcctcttggctaattttcttttgactttaatgtgccaatgtaacttcctttaaaggatctatgcatttattaaatctggaaaacta

SEQ ID NO: 7653 - DNA, 231 bp, Homo sapiens
ctgaggtgtttggtttggaatagggaaaaaggtaagagactaacgtggaaaggtgctaactcagagactggagattatagtttacagctgtactttccagatcttctatgtgacacaatgcactgtccttgtgggtttgtcatttattggttaatgctctagtttcaaaaccaccctgttgaaagttccagttatttatatgcccaacaaatttcatagcctgctgaactg

SEQ ID NO: 7654 - DNA, 851 bp, Homo sapiens
ggcggcatggctttacacccaaaccatcttggtgcttcatgacagccagatccctcacctcactgcccgagatggcagccacatgagacaggccctggaaataacaggtaccgtgatgtccttgacctttaattagctccacattttctatttgctactcaccgaagagctgacctgctgacctgtttatgcagcccacagggcggaaaaagttctaaaatctaaaagtgaagctcagaggctaattttgtatatgcaaaatgtacaagatatgaataaagtgttatattaataaaatgccctagaactcgtactctttccagagggaatgggaaggcctggggccgcatccatgtcctggctgtgctgtgctgcgtgcccctggggaaatccctaccaaatcactctgggtcgaacctcatgaggggttacttctcctctcgactcttctgttgccagctagtgtcattatttaatcaggctgtcaggtcatctcgggatagatggtttctgcttttctgccatgcttgcctggagactcagtttaagctaaaagctagaaactgtatctccaacagaggactgtctcaaagccagggtggaaagagccggattggacactcagcaaatgacaccatgaggacatggctggtggtgcaggcatcttcgcaccagacaacgttacatgtgagactgcgcccaggagccgagtgaggtttctaggactctcaggagggagcagaaggaagcaactccccatgactccatggctggctggggcacaagctcacattcgggaagccacagaggggagcgtcttgtcactttgtgccttagcactgcggtgccct

SEQ ID NO: 7655 - DNA, 202 bp, Homo sapiens
aagccgtcatatcccctgtgacctgcacgtatacatccagatggcctgaagcaactgaagatccacaaaagaagtgaaaatagccttaactgatgacattccaccattgtaatttgtttctgccccaccctaactgatcaatgtactttgtaatctcccccacccttaagaaggttctttataatctcccccacccttaaga

SEQ ID NO: 7656 - DNA, 490 bp, Homo sapiens
ctcggacatggctaattcatgaagcctctggtttgtattagacacccaacatgcctttcagaaagaaatgacacaacaattaatgtgtcaaataataatgtgccactcggagaaagataattgtacccatcgtcaggtagttattaggtcgaacgaatgctcatcctttcaaaggcaacagcgtctattcattctggcatcctactgtaagtacagtattgtgttcataatcacacagactgaagccaggaacactgggttttatctgatttttctccatttggaattgtactccgatgattccctaaacagcaaactcagtcatgtgaaacacaaatgagtgtgatgaaagacagattgttatactgcaggagaggctttctgtgcttttcacataatatagagcatgaggactgttcccaagaaggtttaagcatatgtaacaaaaactaccagacctgaatttgctcatgtgtaaatgatagtcttt

SEQ ID NO: 7657 - DNA, 2867 bp, Homo sapiens
aagaccacggggttttctctcttagaggggaggtgagtataattgtcatacatatctataccagagggagactgcactgaatatttggagaaacaaaagggtaaattgtggcagatactaccagtccttagcaatatttccagttctcctttttcactcctctagtcagtaggccgtagctagatgactggtcccgtagcccggctgtgtctatcaggaggcaatgcatgatttcccagcccaaagtacatgagagatgatggacccatttcccacattctcctcctcttccacagtgaacccagagctttgagttgagatgggggtgccataagattgaagtactctgaaaaacagagcttaaaggcttttaacaggtgaaagtgcggtccaaattcttaatttgtttttgttgttgttgttgttgttgttgtggagggcatctatccaaaagctttcaggacacacatgaactttacacgagcaaggaaaaaaatgtgtgctcagatactgagatgttagtgtttttgataatatagcctgatctcatacatacatttatcttagaccattctatgctaaatacatacattcacacagacaaacatatgtgcatacatatctaatggattagttaaaagaaaatacatttcaacttttaaacccagaaaatgtaagtaaatatttaacttatctcaagtgaagactttacacataatgtcgtgaaaacaacacaagtgaaaaagtagatctgactacttgcaaataacacttttgaacatcagaaatatcaacaacttaatgaaaattaatgacatgctgggggaaaacatttttgcaatagagggtttatgtcctaatatataagaggctcttaaaaatgagtatcttaaaatatcagcatcacacacacacacacacacacacacacacacacacagacaaagaatataaacataattcttccaatttataaaaacagaaatacagacagatatcttccaaagccatcagaatttgaaccagtgatgaggagcacatttgctttcctgcccaattaacagtcatagaagatcacctgaactgcccctggggtgtggatatgcaccctgaaaatatttggcataccagagcatagttggatgtgtatatacataattgtgaaaataaattgttttagattttaatatttttccttgtgtctaactttctttaagcaccaacaatttttaaaaatataaaaatattataaatatttgtgtgaggcaagaggaatattgttgggtcttctagttacaaaccataggatcttagagataacaatgaacattcccaaaagctcccatttaggaagtttttggttgatggcatgacccttgaagggatctgacttcctgagagagtgactcataaataattactcctttttatgatacaaatatttttgaagaacagctaaagtcttcattaaaaaagcattatgctcctatgagatttccccatgcctaagattaatatcacagttgaggagacctgagtattttttgttaccttacaattgtacataaataattattttatgcagtgccataggttaaatgcatatcatgaaattcactttcctcccgattgccatttatgtcacttaattcaatgaaagtccacaaaaatacagtatgactcagaatattggagctgtggctaagcaagaaaagttcattcaaaattgattttctttcaggaatccttgatattcttcattccaattgttcacctctactgtagggctcagtaaacacttaaggaagttgccgtgcactgcagcctgccggagacatgaaggaatgtacgggaggataatcgcaacatcatcaacccaattctccaaggtagctggccaataatgctgttctaattgaataacttatccacagctatttcccctgggaaagccgaaggctcagcctcggcaaagaggcagatggtgccgcatatacaatgaaacctgtaattttttcttgccattggacatgttaacagtgggctgtttctgcttattccttagtattttattttaatagtcccttcccaaattacaatgtacaataaagcagccaaagacggattcagtgatacatatcatatttaatttatcattcctctagctcactgaacaactcacttggtagtcagcagcagtatatgtcagggacaggtgcaagctgaaaagaaagcaacagaaaaggacccaatgaaaaccaaaaggggagatgagtcttcagggtggcatggcattcactagcagcaaagtgtgcaatgtcaaacacattctaattctgattttttttaacagtaatttgccatgggacaggcacaccccatgtgtttgggaagacaatgggaaggttctgttttctgctccaagactgattcaaccagttggatctggaaggggataaagggctgtgtggctgcttgattttcattgtctagtggcagccaaaattggaaaagagagaagtgcagactttaaagacaagcagcgacagctcatcagcagtctaacaacacgacagatgacaggcccagaggcacacccagggccgccagcccatcaccctgtgcaggatgtcaaagagcagctgcagcaaaggaagaagatcatccagacttaaatgtttgggccttgctaagaccatagagtctttgtgctttggaaacagtcctccatacaaagaccccttcctagaaaagagtggaaagaaaccaaggtggaatggatacaacagaaaggagaccatgctaatattcttgtgcaatgcttcctgggcagaaattatgtcataaaggatgttccattctgcaaa

SEQ ID NO: 7658 - DNA, 550 bp, Homo sapiens
acttcactgcaattctgtttccctcatttgaaaaatagaaatagaaaagcctgctgtatatttaggtccacatctgttggggaggtcaaagaagaaagaatatgaaaagttgtttgtaaatataaagaaccatgtaaatataagacattgttttattaatgctccagatcaattaactttcagtgaatgataaaatgtgacatcttttcaacagagacagttttacttaagaaaaactaggcaatggcttctgtccttacaaatgaaaaacttcataataaatgggggctctcaagaccacctggccaaaactgaactaaatactcacttcattcaaccaagaatgaggaactgaaatacatgattattatatatgcatatgcttctgtttcatctacttgggcatgcttgtgatgagatatgaaaaattagccatctttagaaggaaagaaatattgtatttgggggtatttcttctgtacagacaattggcctggttattgtctaaaggtatttaaaattaataaaatgcaattttatgctacataaa

SEQ ID NO: 7659 - DNA, 4625 bp, Homo sapiens
ggaaattctcagtgagttattttatctttggtaggtggcctgaacacctgagggactggacatcccatgttcagcaatgtcaatggcatcaggagggcgccccaagggccccatcgcttcccttcatgcatccattgttctgttcattcattcatccatacatccacctgcctctgagctttcacctctgactccctaactccatcagacctctacgcaccataagactctgccagaactgagaagccaacatttctacatagactcaacctcaccctctcctagttttccaacaagacactccaaagccaactggatttctcccctgtgctccaaatgactttgtacaagtgctggagttagcacctccctctgcccttaactggctggaactggttcattctccattactgcaagagaatggaagtcttaatagaaggaagcaggagtgattagttcgggttaaagcaaaagtgtgtcatgaacttggattccctgaagtcagttttgtcaggttcatggcccactttgctacagcatcagagtgaagcacgcctgtctaggttctccagtgacagaaagatcctgaagcatggactaacatgctctctggagcttagtactccagagctagatcctgatgggtctctaaggttccctccaagaagacaaggacaggagacttgggaaggaccaatggtaatttaagtggctcttaaaaagtcatgcaacatgtttctggacacgttcctgatcctattgcgataatgtatgtgtgccctccctgtgggcacaccacctgggcattaggactgaaattcctgagttcttcctctcaaaatttctgtgcaccagtattattcctcattttacatacaggaggcaactaagactcatacagggctcaactgaataagaggcttaagaggataaactggagcagaaataagccttaggtgctgcccagtttacacttcctgggatggatgtttttgtttgttttgttttttgttttttttgtttgagatggagtctcactctgtcacctaggctagagtgcagtggtgtgatctcggctcactgcaacctctgcctcttgggttcaagcaattctcatgcctcggcctctccagtagctgggattacaggtgtgcaccaccacgcctggctaaattttgtatttttagtacagacagggtttgactatgttggccaggctagtcttgaactcctgacctcaaatgacccacccacctcagcctcccaaagtgctgagattacaggcgtgaggcactgcgcccggtggataactttgtttctgaaaagactgacattgaacttgtctatggcaatgcttctttcacaagcacggactgggctgaggtcaactctgatagattcagatgactagaaattggccaaaaaagcagggagaagaacatgaggtagacttaaagaacttcctttatgtaaagatctgtgactctgaaatatcctccaaaaggagagtgcatctgagactgatatttaaactaagaaaaatgtttagtctgagatggatcataagtaaatgagcagtgtgagaggggagggatgggtaggtgctttccaaatacttcgcctatgaatgcataattttcagatttttttcccctagattttgagggagcagagaaactggaaaaaactttagtcaatatctcgtgtttcattttaattaagtgacaggtccaagtgtgacatccttcagcacccagggacaagagaggggaaagatgctttatggaatgtaagaagatgaaggtgactgggattcagcgagagagaggtccctcagacctgggacctccctttatagggaaagaccatattccataggtttagggctttaccttaaaagctcatttttttcattcttccatccctaggaaagtacttaaaaccagacttttaaatttttatttatttattattatttttttgagacagattctcactctgtctcccaggctagagtgcagtggtgcaatctcagctcactgcagcctcaactgccccaggtttaagcaatcctcccacctcagcccccaggtaactgggactacaggcatgcaccaccatgcctggctaatttttgtattttatgtagagacaggggtcttgccatgtcgcccaggctgatcttgaactcctgggctcaagcaatctgccagcctcagcctctcaaagtgctgggattacaggcctgagcaactgtgcctggcccaaaaccagaccgttaacacattaaagagtctgattttgttgaagaaaatatttgcaataaattcaagactcttcttattggtaattttccacacaatccctctgaaataagggagaggatatagacctttttaactttatagttagaaaaattggcctcagtgtgaaatttttccagtcccatagctcatggatgccaccagcttgcggtagtagcaagatgcttactaccacaccgttttcctcggtggcccaatagctcgtgtatctaagttgaacccggcagtatgcatgattgcctttttctcttctttttaaaaaaacccaactcagatgctgcttgcgtggcttttaatgaagctgaatggtatctatcacttatttatccttgacaggttatcttccccactcttcctttttctaacttctccattcttctcattcttgacactttcattagaactatatggtttacgaagtattttcacttaactattttatttcttctctataactggtcctgtgaggtcacattacaaaagaagaaactgagggtctctgaggttaagtagctttactaaattataaggaaacctagctggtaggtagacagcaagaatccaggtcttctgactcctctttcagttctctttccacttagaccatagctgcttccttttcttattttttagcttccatctaaccattgcctatcttgcctgtcctaatgttctccatcttctctcacccctaatcccactcactgcttctctaccactttgctttttggtggatgctagcaatgtgctttgagagtcagtcctattttggttctctttctagttggtttgtacatcattatttctcctgaattgcaattaaactccttcctgggagatttgataatgactgtaaatcaataaggtactgtgatcaccagcctacttccaatctccacccacctcccctgtctcttcccataatcctacgaaagacccagactagatgtctgtttctctggaagctttatctggcatgatgttgcttattaaagggcttagaagagttctcaagggctattaatatcactttagaaaccccatctgttgtcttggtgctggatatttcccatgtctgatcctcaataacacaattcactaaaggccaagcttggctcaatctgattttcccattcttactacttcacagccatgaatgtgattgctcaatccagttggccctgagagcaccttgccctgctgaccttcactgtcacctcggtcttgaatcagagccccaacccaaacactccctgcctgtccctaccccagcctttattctcaccacttgtttaacggcatgaccttttagtttctccattcccagacacccacacacccagacttccttctgagttgcaggtttctccttagatgtccaactagaaatattactaggaaagttacttttcaaagcaggaatgtgctgggaagtaggagacagcaactccctcctctctccccaaaattattggatcaaaaaagaaattccatccatctcagaatctgtgagtcctcctcacataaatctgagggaaaaggctgtgtcactgcatctttgcaggaagaaagagaagcaagagctagacacacttcagaatatatcttagtttcccctttcccagtttaacatgaaaatgaaaaaagaaaaaaatgaaaaacaaaaacaaaagaagccttcctctcacctcattttgtaaatgaaaaatccctaattcagtgaattcacctagtcactgcaaatgtatctgaatagtgcttggtgtgcttgccagtctgatcatccactcattctactaacatctttttgcacccactctgtcaagctctagcctagacctttagtgtgccatgcagtcacaggtctgaaaagcagcatcatccaaaccttacttaatctctaaaatctcagctggtggacagctcatgattagttcagcccacttcctcccccttagttgagtttgcagcaggacgcaggagataagcacttccaagcaagtctgatttatatatcaaactcggtctccatcccaggccagctgaccctcagagccagcaatgctctgtgcttcctccctgcgtcacggcttggcaagagctgcctctgctgagcagtgtgtgtgatggagacggaggccgctgaaggccgagtgcttgcaggcttgtgaactgccatcgaacacaatccaaactctggaaatgttcctgaccacctaagccctcaacaacgtaatgcctgtatgtgctgtttttcagtaaactccttgttcatgtcaataaagtatccctgaaaaccac

SEQ ID NO: 7660 - DNA, 416 bp, Homo sapiens
caagaggttggtaggatttgtcttatcggagatgaaggtttcctttgttttctttttttttttttgagacagagtctcgctctgttgcccaggctggagtgcagtggcgcgatctcggctcactccaagctctgcctcccaggttcacgccattctcctgcctcagcctcccgagtagctgggactacaggcacctgccaccacgcctggctaattttttgtatttttttagtagagacgggatttcaccatgttagccaggatggtctcaatctcctgacctcgtgatgcacccgccttggcctctcaaagtgctgggattacaggtgtgagccactgcgcccagccagatgaaggtttcttacagagctatcagaatacagagtttgtgatactgcacaggcatacgaaatgga

SEQ ID NO: 7661 - DNA, 129 bp, Homo sapiens
ggtgcggtggctcacacctataatcccagcactttgggaggccgaggcaggtggatcacctgaggtcaggagttcaagaccagcctggccaacatgatgaaaccccatctctactaaaaatacaaaaat

SEQ ID NO: 7662 - DNA, 752 bp, Homo sapiens
tatgtttccactttagtgagtggaaacctaatcattcataggtatcctgtacacacagaacaactatgatgaagagtgaggcctaaatcagaggagacgaggacaataatagtagtagtggtcatgatgataataataactaccagacatgaagattaaccatgcctaacattgtgttaaacgtctcacttctttcatttaatccttacaataatccaatgatgtagctgctattatttttattatacagatgaagaaactgagggcttgaggggtatactgctttgccaaagtcgtacaaatggtaagtgcagaaccaggatctgaattccgtcagtctgactgcagagtccacgccgacaccgtggaagctggtgatgcccattaggccctgtctgggcatgaagaggatgccctccctcatgagctggaacacagcatcccctgttgtgggtgtggctctcttaaagaccatctggtgaattttgcttgtgctggtttcttattaaacaaccttcagatttggcttcacgtgcaactcacatagagggaaaggagaccatgatccgccaacatgacagctgtatttttcattagtaaattagcaaactggctgcctgggtcaccatgcatacctgttaaggtgagcccgccccagagctaaaggctaccatgtgccaacttaactgagattctgagtgtgcaaggataacccccgtcatggccccgggtgccaaggaaatcccttttag

SEQ ID NO: 7663 - DNA, 252 bp, Homo sapiens
atcccagcactttgggaggctgaggcgggtggatcacgaggtcaggagatcgagaccatcctggctaacacagtgaaactccgcctctactaaaaatacaaaaaattagccgggtgtggtggcatgcacctgtagtcccaactactcgggaggctgaggcaggagaatcgcttgaacccaggaggcagaggttgcagtgagccaagatcgcaccactgcactccagtctgggcgacagagtgagactctgtc

SEQ ID NO: 7664 - DNA, 716 bp, Homo sapiens
tgcagacagaaaaattcgctgcaagtacagcactttctagattgctcctggagtgtgggaacaacagtctctcctgtccacgttactgaatccagaaaaaaggtgaacttacgaacatgggaaaagaaatccagctaaagcctaaggcaaatgtctcttcttacgttcactttttgctgaattacagaaacaaattcaaggagcagcagccaaatacctatgttggctttaaagagttctctagaaagtgttcggaaaaatggagatccatctcaaagcatgaaaaggccaaatatgaagccctggccaaactcgacaaagcccgataccaggaagaaatgatgaattatgttggcaagaggaagaaacggagaaagcgggatccccaggaacccagacggcctccatcatccttcctactcttctgccaagaccactatgctcagctgaagagggagaacccgaactggtcggtggtgcaggtggccaaggccacagggaagatgtggtcaacagcgacagacctggagaagcacccttatgagcaaagagtggctctcctgagagctaagtacttcgaggaacttgaactctaccgtaaacaatgtaatgccaggaagaagtaccgaatgtcagctagaaaccggtgcagagggaaaagagtcaggcagagctgatggatccagtttgaaaaaacaaaatgccattcaaccgta

SEQ ID NO: 7665 - DNA, 573 bp, Homo sapiens
ctgggaatgaacctggaaaaattcaaaatatggtctagtcttaggcaagtttccttgtccggctcagctgctgagaccacatatctggaccctcagtgccctggcaacagctctgtgcaggcaggatgaagcacaggcttaggtcaagcaatcagccgtcaaaatccacactctcacctgtgagtggctgttcaaccttgaacatgttactttttatgttaatgaaactcagttttctagtcctataaatttggggctatcatcaaccattaagtgatattaaacccagtgccacacaggcaagtacctagcagtgtccaaaggcccccagaatgacactttttcatcttttctcttccctccaattgaaagactagtggaatatctgcaattactttgaccaaaagccagaagccggccagtttgagtgtagctgttacagctttgtgttctaaacctaagaaatggggacccctcacatgagagtggggaggcttctggatgtgctacaaattccatttcattttcatgaactccagtgttaattaataaaatctcaaggttctcccccct

SEQ ID NO: 7666 - DNA, 1768 bp, Homo sapiens
cggggccgggctgctgggtccgagctctgggcacgatgtcctccctgacgccgccaggacagcgcctgggcccaggcctgggcctggtgaacgcgggtttcttcctctgaggttcaacactccgcacttgggttggctcctttcatcctgattggtttattcgccacgtgccaagcactgaagagggcgtgcaggatggatacttttggagcaaaaatagccctgcttctttcctggggagggatcgcactttctagaggggcggttttcaaagtatggtctcaggactagcagcatcgaaaatgctgggaactcgttagaaaagcaagttttcaatcctcgccccagaatcagaaactcggggtggagcccagcaatgtgtgtcctgacaagtccacgcgcgaccccagtgctggctagggttgcaaagccactgctctacggagcgagcgagatccatcatagtgggacaagcgagaggatgaggccatacagaccagggcaagttttgagcgcgcagatccaccagctgcttgaagccaggggcaccaggatgtctggtcccccagctcagggatcctgtctccccacaaaaagcagcagcagaagacccctctttgagttctgaacatgttcctagattttcccagtatctatggggattgagagattgataaaggctgcttggagctgaaagcacagtcagtgactcatcttttcagggacatttaggggcttctggggggactctggagcagtctgcagcccagcaatgtagtcccagtgaggatcccagctgtgccaggctctgcctaaggccggtgtagtgggtgggaagaccacatccacaacaggaactccattggagctgggggtgggagtgaggaggagctcccaagatggaaggagcagggatccctgaatcttcgctggtagaatagtgtcccaacttgcaatatccacagtgggctttgcacaagggaggaagaatgttgtattgtgttaagccacatatgtgatttgtgcatgtgtgcatgtgcacatgtgtgcacatgtagtgtgtgtgtgtgcatgtgtgcacgtgtgtgttcgttacagctgctattgtcaaatgtgctgaaagacaagttgtccctttacccttaggagagaggctccttacactgacattcaaagtcctcaatgacccggccccagcctacctctgcagccttatctccctacaaaccatcaaagcagaacaaaaacctgtccctccgatttaggttttagcaaaccacaagaagcacttcataaactggtgactcaagtagaaaagtaagtgtttttgtaatggtttatctaaatacaaggtgctctaatgagacttttaggaagctagaacataagtgacccaaagagaacaaaggtacccaggctcctgcccattcattgtcatcaacagatcagtttatgaacagtcgtgaatctccccatgaaccttacagagtgttttctatgtgccaggtactgttccacgcacttgacaccaatccacccatttcacctgcatgatcaccctgcctttgcatgagttgccggtgtggacagagcagggacacagtgagacagcggattccagctttgctcttacctagaacacactgcctctcaccaggaatcgtccttccattttatgcagttatcccagacaatgatgcacaagctttgggaaaaaaaccccacaagtccaaaggtgtacttcataataaaggcaagttatctgtca

SEQ ID NO: 7667 - DNA, 1768 bp, Homo sapiens
  SITE (362): n equals a,t,g, or c
cggggccgggctgctgggtccgagctctgggcacgatgtcctccctgacgccgccaggacagcgcctggcccaggcctgggcctggtgaacgcgggtttcttcctctgaggttcaacactccgcacttgggttggctcctttcatcctgattggtttattcgccacgtgccaagcactgaagagggcgtgcaggatggatacttttggagcaaaaatagccctgcttctttcctggggagggatcgcactttctagaggggcggttttcaaagtatggtctcaggactagcagcatcgaaaatgctgggaactcgttagaaaagcaagttttcaatcctcgccccagaatcagaaactcggngctggagcccagcaatgtgtgtcctgacaagtccacgcgcgaccccagtgctggctagggttgcaaagccactgctctacggagcgagcgagatccatcatagtgggacaagcgagaggatgaggccatacagaccagggcaagttttgagcgcgcagatccaccagctgcttgaagccaggggcaccaggatgtctggtcccccagctcagggatcctgtctccccacaaaaagcagcagcagaagacccctctttgagttctgaacatgttcctagattttcccagtatctatggggattgagagattgataaaggctgcttggagctgaaagcacagtcagtgactcatcttttcagggacatttaggggcttctggggggactctggagcagtctgcagcccagcaatgtagtcccagtgaggatcccagctgtgccaggctctgcctaaggccggtgtagtgggtgggaagaccacatccacaacaggaactccattggagctgggggtgggagtgaggaggagctcccaagatggaaggagcagggatccctgaatcttcgctggtagaatagtgtcccaacttgcaatatccacagtgggctttgcacaagggaggaagaatgttgtattgtgttaagccacatatgtgatttgtgcatgtgtgcatgtgcacatgtgtgcacatgtagtgtgtgtgtgtgcatgtgtgcacgtgtgtgttcgttacagctgctattgtcaaatgtgctgaaagacaagttgtccctttacccttaggagagaggctccttacactgacattcaaagtcctcaatgacccggccccagcctacctctgcagccttatctccctacaaaccatcaaagcagaacaaaaacctgtccctccgatttaggttttagcaaaccacaagaagcacttcataaactggtgactcaagtagaaaagtaagtgtttttgtaatggtttatctaaatacaaggtgctctaatgagacttttaggaagctagaacataagtgacccaaagagaacaaaggtacccaggctcctgcccattcattgtcatcaacagatcagtttatgaacagtcgtgaatctccccatgaaccttacagagtgttttctatgtgccaggtactgttccacgcacttgacaccaatccacccatttcacctgcatgatcaccctgcctttgcatgagttgccggtgtggacagagcagggacacagtgagacagcggattccagctttgctcttacctagaacacactgcctctcaccaggaatcgtccttccattttatgcagttatcccagacaatgatgcacaagctttgggaaaaaaaccccacaagtccaaaggtgtacttcataataaaggcaagttatctgtca

SEQ ID NO: 7668 - DNA, 12436 bp, Homo sapiens
gcgctcggtggcggtagccgcggttgttggccgaccgagtgccggtcataagccccccccggtggggggcagctggtgtgcggatcgcggcgggagagaggcgcggtaggaacgggtccccggagccgtgaaccgcgggtacaggtgtcctgtctgcgctctctgccaagccggcttgcttcctgatctgttgctagggccgctggaccccgttgctaaggacccttgagatcgtgagcgcttggagtgtacccctcctttcctggggtagagggtcagtcgagagtagccttcgttaaccttaattgaaactggtaaactcctccctcggcccctttaaaaaatctctgttttttctttattttttttctgtgtcttcctcttttgctgactttgatagcatcctggctctggactggtctttaagtatctagaagtgagtgtaggaggggtggctgggaaggtggaaaatagattctaagacccctaagcagattgtgcgaccctaatactggccctttgaatttactttctggtaaaaaagggactgggataagtgactattgggctctgggtcttttagaatttgacagagctttacaaatggaacatggtttctttagtggggctcttacttacacgtttggaactttctagacctggattagaaagcagggctctgctgactgagaattgttttagttcagtggtcttaaagctgagtacgggagaaagtacatacagggaaagaaataggctatatcagctgcccaaacaatgatagaaagtacactttcctaccattgacacagataccggcagtcccttgtagatagatgacctgtagcaaccaaggaagctttaaggggaatgtgtgggcttcatagggtggtttgtttgctttctgatattgtgacatagtttaggtgttcgaagttaagtggatttatggattctaatatctataattagaatgtttatcttgttttgtaaaagaatgagcggtgaccttgataatatttgtaacacaaaatagttcttacaggttcgcttctccccatcactgcccctttacaccatcctctacatgttatttaatgaaaaaccacttgaaagggttaccaaggataagatttttaaagcttgctttcacaaacaactcatgctccaggcttgtcagtggcatgcttccaggtggatattattttaaaaaattgactacatttcccgtcgtcccttggtgtccgtggagaattggctccaggactccctccctccccccagtctctttcagatacccaaatccacccatgccaaagtcctccagtctgctctccgtatccgtggttgggtcaaatctatagatgtggaacccgcatatacggagagccaactgtaatttgtcgttaaggtaaaggataaaaattttaagtgaaaaagcaattgttttggaaggaaattctctaatacaggattttgaaaggggatgtagacgtgtttgcattactgtatgtttaatgctgaaaattatatattgtacataaaagttgtcctgtatactcataaactgtagaagctcgattttctaccatgtttaaaactttttcaaatgagttttggtgactttttgaactcattcaaaatataatgcaacacctccccattagtttgttacaggaacaactttttgacgtgaaggaagatagaaatttagccataaaattccatccaaaacttccactgaattggtaggtagtattgaaaaatgtgcatcataatttgatatggctgcctgtgcccttgttatgtttgtgggtacgcgtctttgctgtgcatcgcttttatctgttgcagctgttaacaattgatgatcaagagaaattggacctcagctggtcttcaaattgatgtagcccaagatgttaagccagattttttaaaaatgacaaaacatgtggtttcactattagtaatagtaatactgaagaacactttgtaccattgtaaagaaaattataataatagctaagactcatgtggcccttactgcatgcctcccattatggaaatgttgttttacatatattcttactagtcttcatcaacacttaaagtagttcctgtaattatgcccaattatagagttgaggaaactgatgcattttttttttcaatagaaacttgtgttgttccccctccaggagcttctcaaaacagaagtcaggcacaatattaaatacttgttgaatgatcacagaagtacaatagtaggttaacatatttaaagcttctctcagcttattttagactattatctgacaactttaatgagattttaattaccgtagtattagaaaatggccctgggaatggaggtgaagtgtgatactgggaagtaagtcatctgctggtagtgggatgagataaatgagatcaatgtactaaatcaaggaaattgaaattattcagtgtgcagaagcaagcttacatttaggttatctttacatggtatcagactttaagctggtacatcatgtttgagatatctggctaaattttataacatggagctttgtcctccttttgaggatttctaacttgttaagtggattaaaagcatttcatgtgaggaatcattttaaaaagtatcagtgtttatcctgaagaagaaaaaatgaaggagttaagagttaatgccatcaaatatttgaaaaagtgtcatttggaggtggaagaggactttacctgtgttgtcctaagggaagatcttacactatacttgagaggcagtcattattaaaggcattaaaatgagacgtgtgctaatagaataactagattgtcgtggaagtgagggaacagagtaatcaagtagaaataaggacacaggatagaaatcaatgccatagaaatacacatttgagaaaccaagatgaggaaaggcttcatggaagttgggaatgaagcttggcctaaaaataccagtaggcacttgggtatatgagtgtgtgtgtgtgtgtgtgtgtgtgtgtgtgtgtttgtgtgtgtgtatttcttgctagagatacaattgtagaaattgattggattagctggaaaccttggggtatgaactagagtcctccattagcagaaaaaaagcaactgtgtaagggaaaagtgaaccagtattccctgggtgagtaacttgagagataatttcatttgcacctccagaaaaccttgacaggcttttatttccctctttaaacaggtcaggaagtcgaggtttagggaggttaaataatctgcctaaattcataaatttcataattggtagaactgagatgcagacccatatttgagcccaaagctctttctttctcatcacgtgtagcattgagtgtaggaaatgaaggaaaaggagacaatggtgattctaagtttttcagtctgaggaccagaaaactggtggtaccctgggttaacaaggggttcataataacttcagtgtgacaacctcagttttagttacattcagtttaaggagcttgtgatacattgggtaggagagttcattatgtcactggaaaagtagagcttgatgtgcacatgttaacatttggagctttggaaatacagaggccagagaagatggagaagatgacagggaatgtaccaaccactcctttcagaaatctagtctgtgttttctaatgtggtcagagaattggaagtgagtttctaacagtttattttgacaatttgaatggaaaaaaagttgacttttgtacatcatttcttggagatgattattttgctgttattgatactattgaagttgacataatttcatgttttctcattagtcttttccagtattttgctccatatcaacttttttgtgtgtcttttactgtattgtatactctgttctggttttgtctttttattgataacaaatgcccctccaaacaaattttgaaatcaactttttttttttaaactgcaggagtgaaagggaagcaatgcagaaatcagagggctctggaggtacacagttgaaaaacagagcaacaggtacagagcttttgtttttaagtgaagaggtcaagtttgttcatggcactttctgtgctacagatggatgcagggtgaactttattgcttgtacctggtttctattgatgttctgtttttttccaggtaactatgatcaaaggacatcatcaagcacacagttaaaacacaggaatgcagttcagggaagcaaatcctcattgtcaaccagttctccagagtctgcaagaaaacttcatcctagaccaagtgataaactgaaccctaaaacaattaatccggtaggtccaaaactattcctaactcagtagattttttaaaggcatttcgcacagtattgaacaatgctggatgctgtgttgagttttgtccctttgctagttttgagctaataatgagagaagggcatgtggttattatgatgaagaactgagataatcagtcacatgtgggagtgagtatggaggtaaggagacatagaagttaacctgtttgggatatcgcattgtagtgcatagaaaattgcactttagctttagattttatttgcagtgttgttttacttccccatatcaatgaataaactgtattcagttgccacagaatgcttttcgtgcttctatagttgcataaaggtctctgacctttcctgtgttctgtaaattagttccaccagaaatcctagttgtagtactaacctcctttgccctctcctaacaatttaatgagatttaataaacatgggatttatgcagtaaaaatattcagaagtgaacacacctgtgcaacaacaccaggtgttatttgccccatgcccaactttggtagggtgagatgttagtgatttcagccttcgaaggggattgtgagggtggctgaagctcctgactgactgtggtggtaggtaggggtatggcagttacttaaggaagcaaaggtatagtgagctctccaagacagaaggagtgtccgactggataaaagcaaagtgacaaatagtttgagcggctatgttcctttgcttttttctgtaatctacagtgtcaaggaaattgaatacctgaagaaggccctaataatcttgttgctctcacttcctttgcttatgtttagttgagggagtttacggtgacgcttcaattttcttcctctctttaaagaagtactttttgaattaataatatttagtgaccttagtcctaagttttagtaaaaatcgaggaaagttttgggaaatagttaaataatttgacccgagaaaagcatgtgtaaaagctaccaatataaaacaaatgagttggaagtcagaataatgttcacctttggggcgaaaggtgggcagggatttgggagaggcagtggaggcatctagtgtgctggaaactttcagatttttcaactctgttgataaacaggtgtgttcattttttgtgaattcactattgtgatttatgcacattaatattttaaatatttgagttaaaaaattttttgaaacgctaattcagtgtagtatagtatataacattaatacagagttgaaatatggtctgaaattgttaaaaattgaatgggataacatttttcactttagacttggtaaaatttggttaaaatcgataaaagtaatctattcataaaaaattctgattttgtggaacatggaagatgaaaccatgattatctctagaataaaattgaaaggcaaagaaaggaattgtttagcatttcaatcagaaatttagtctttgtgggtatattgaaattttagggattattttcatgacctgtaagggccaaaaagaaagatcatttgcttgtagatggtagaagtcaaatatgttgatagtatagtactaatttgtcttaattttttctccaatatgtgtagcactttttcaaacaactttcttatcggatatgcttgttacttgaaaataatttttaaaacttgtgtttcttttatagcagaaattataactagatgagtgaaacattcctcttgtgaattgttacacataacatggattgaattttggaaatgaatctttttttttttttgagacggaatctcgctccgtcgccaggctggagtgcagtggcacaatcttggttcactgcaaactccgcctcctgcattcaagccattctcctgcctcagcctcccgagtagctgggactacaggcacccgccaccatcctggctagttttttgtatttttagtagagatggggtttcaccgtgttagccaggatggtctcgatctcctgaccttgtgatccacccgcctcagcctcccaaagtgctgggattacaggcttgagccactgcgcctggccagatatgaatcttttattgtaatttaatttgaacgaattttctcctatgtgcttttactcaaaactcatgcttttccagaggaaaaaagagctgattctaaactttttaagcacattttaaaactaccactgtgtgtgacttaaaaaaaattatctagttatatctttaaaacaggtcaatttatattttgtaatttagacaactatttttcatttgattatatattaaaagtaccatgtgataaaatatttactttttgttcctaaatcctctgtaagtctcttatcaattatattgaaattatttatgctgtaattgtttaactgttgtgattgaccatcccttaaatcatctttaagagtaggtataaaatcaagctattcatatatagcaaaactgaaaggttatgaagttatatatctaagaaaatacatccaggcatatatttgtgagaatcttccccatcttcaattctctccctcctgcccagcgcaatcctttgttttttatagaagcctaaagccagtttggagaaatgtgactacctacgccatctgtatttggctgaagcacaaagtaggagatgtgcaggtggcaaaaaacaaatatactttttctgtacttaacaccccttctccatagagtcctcaccttgaaaggtcacagtggggaagaaggtagaaagaactatcattccatatgtggtttcagccgcgttcaagcatcctgaatcgttaggggaaaaagagatgtaccaagtgtggtcgtggtattctagtagagagaggattgacagtttttctcaactgtgttgctgagtagaaacggtgcgcttcgataccagcttggcggtttgaaaagcaaaatggctgtgtgcttctgacctcagaagtataggtgatagtaatattttcattttttattttagtttggtgaacagtcacgagtgccttctgcatttgcagctatttactctaaaggaggtattccttgcaggtaaaatcaatatgatttataactgaccaaattattcaaaatcattgagtaaaatgaatacaatatttagtttaaatgtattgtaagttttatttactagtgaggttgaaataaagatgactttattcacactttcttttggactggtatagattcctggatgttgttgaagaaaaccattctagttccaaaatacagttattgggatctatggataaaccatcagtttaagaactttacttgaaccctttttctaaaataatcaatttaagcatttgcaggcttgggcaagttgcaaattaaaaaatcctatcttgttggtaaaatgaaagttgtcaatttaatgaaattgtttatatttcataataaatacatatggctgtttttgcttcattttggatataattcttgccacctttctagacagatgtcagaactttaaaaaaaaaatactacagataatgtatcattttacaatttatttctataaagcatttatttcttcagagttcatccagttttagcctgttgtagatgatagaaaattttattttgattatggaaataatcacaacatttatttatttttgttccaaaattcaagaaatctagtttttaatggtattttcggatttggagtgaaaaataagctcaagaaatactcttcagtttattgttatttcatatttacattctgaattgaaaccctatttaaagtttcttaattctctactccccacccctccaaaacttattgttgcaaaaatgtaaaaacaatattagagagacgtcttactcttatgaaaataagcccaaaggagtcaagaagtcaagaacattacaaaggagttcaaagaagcatttaggttgatggattaagttcactgtcatgattgtgatgatagttccttgagtgtattcgtacataaaaacataccaaattgtatactgtaaatacatgcagtttattgcgtgttagttattcctcagtaaaggctgtaatcccagcactttgggaggccaaggcgggtggatcacctgaggtcaggagttcgagaccagcctgaccaacatggaggaaccccatctctacttaaaaaaaaaaaaaaaaatacaaaattagccgggtgtggtggtgcatgcctgtaatcccagctactggggaggcttaggcaggagaattgcttgaacctgggaggcggaggttgcggtgagccaagatcgcgccattacacttgagcctgggcaacaagagtgaaacttcgtctcaaaaaaaagcagttaaaagaagcagaaatcctaattcaggggccaccactttgtaaccctaaatgggccattttaccttcctggcctcagttttcttctctttaacagagatgaaacttggtttagccttcaggttattagtgttagggttacatgatctatatctgaaaaacaatgttccttgtgaaacatttttaataattactatgttttgtttgcattttttcatttctgtagattacctattgtgtcatatcactgaaagatatcacctggcatatctgtgttaagattcacagacagcaacatgcttaagcaccaaaactgtaaccttaacacatgtgggtcacttttgctgtaagactaggaatgtgtaggattattgacattactttgtaaaatgtccttgtactatcttataaagttatggtattcctacatgttacaaaataaatctgatatggttatactgtatgttagattatccctgcttaatatagaattatatttttcttgttgcattcactaacttttatattttagattggtacatggttcagtaaaacacagattacagtgggaatgtcctcctgaaagtctttcatttgatccacttcttattactttagctgaggtaaatatgccatctcttgaatatttatcagaaaataaacattaaaaattgcattaaatgctactttgtagcttgtcagtaaatttcattctatgcctttgaaaaacgaagcacacaataggcattgaaacaccacacacccttaggaatgaattatgattcttatatagttatttgaaattgattaatgagctttataaacatggaattagtctgcatagggatttgtagataactagatgaaatatttgtacttacttcaaaaaaaatatgtggactcataatgaggagagattttttggtactagtgaaataaggaaaacatcagggattaaactgaaaactgtcagatagtggtaagtggttctatgtacaaccaatcgtgttgacatgatgtgtttcttagggaattgatactacctacctaaatgttcttttggagaatactccagctctttgcttgtacatttccagtacaatatcatggaggtggttttatagactattttaaaaaaaacttttgatagcttcctttatataatttaacatttgtgtcaggaaaaatgttggtggagtcttagcttcaagtgaatcattgctatcttctatgaattttattcttagagttagaagtagagaaatgaattaaccagttgtcttgtatttaaacttttaattactttttaaaagttaaggatcgttttgttgtcattagtaagaaacaaatgattagagtttgggtgatattagtaataaagcacctgagttctttcactgatagttttatttagattagttactactgtgtaacttactctataaacatggcagtgcctttttaggttaatatcatttgcttttcctataaaaccagtggggaggaccaagtgggagcagaactgaaaaatgtaattttgccaattgagattccttaattaaaatgaaacatcaaaatctctggttcctcatttaattctccaaatatgtttactctcttaagagtaaactaaccagttactagcaaaaactataagtttttgtttttcttaatttattgccgagtattacaagcagtgtatttttataggtagcctattttgaaattcagttttgaggttggcattaaaggttaggctgggtgctgtggctcatgcttgtaatcccagcactttaggaggccaaggtaggaggatcacttgagcccaggagtttgagaccagcctgacctacatagggagaccctgtctctacaaaaaagaaaaaaaagaagatcacattagccaggcacagtagagtgagatgctatctcaaacacacacacacacaaaattagttatgtttccttattttttaaaccttaagccttttaaaccaggtagcaaaccatgtttttttttttagactagtcaaaactggtgatagctttgaaagtgtagtgaagctaatcatattgtacagggagtgctttaatttgggatatccttaaagggactctaacttctgcttaaagtcagccttttatatacctgttgtccaaatgtcaatgcttttctttctgtattgagtagatttttatctttctcctggcctcatttactaacagataagtagtgacagaagaaccactgctgaaatccacttcagcttttaatctgagagtttttatcttgaaaatgaacaggatacaggacactgctatttgatccaaaatgacgcccatgtgcttggcaggatggttttcaaaagcatgacagcttcaaggaaaggaaatgtttgattactatttggaagcagatatttaggtctgaaggacaaattatttgaaaattggtttttctaagcatgattttgcagctgattatatttcttcatagataattagtcaaactaaaggagtttactgttgattttgttttgctttatcatttcgaaaaaagtcagatggcccttttgactcactatgattggttaaatcataaaagagtactagctaattgtttctaatgcatttagggtgaaaggcatagtgagatatgatctacagttttttaaaatattttcatactgcatttcagtattacaaatgacatttaaaatcttaacatgcctttaaaatgcatatagtatgatacttgctttctaaatacgttaatataaaatacttaaatatgaaggaaatttattttaggaacttattaagtcataaaatcactaaatgtaggggatcttatagccatgcattcataaaggagtggttataaacatagactaatttgctctgctttcagaaagtgagtgtacataacaaaatctttttattatcctagcgagtttcccttctttttgtctatagtttcatttacctttccttttcctccttccatttcctgctttttccttccttcctattttattttctctttcttcttatattttttcttgcctcccctgttttccatttcttttcttttcctttttcttattttttttttcttctcccttccttcccttctgtgagtagagattactcctgtctcatgtacagttggcccttcccatccatgggttccacatctagggttttaactagctgcagatcgaaactattaaaaaaaaatacaatgcaaaaataaaaaatacaaataatacaatataaaaattattgatgaagcatttccattgtaataggcattataagtaatctagagattatttaaagtatatgggagtatgtgcacatactatgctcttttatatgaagaactttagtatccacgggttttggtatccattggagggggggccctggaaccagtttcccttgggataccaagggaccctttgtcccacagtttctcaatgtaattgaaattgtaactactgaaattataatcatgattaggaaaacaataatgaaatttttgatttttgtttaagcaagtaaagactcaatttttctgttattagcataatgaaatgggtagtaaatcatgtttcctcttggtctttgtcagggtctgagagagactaagcatccatacacttttgtgtcaaaggagggttttagagaattacttttggtcaaaggtgctcctgaaaaagctattcctttgctacctagactgattcctgtgcta

SEQ ID NO: 7669 - DNA, 7606 bp, Homo sapiens
taaaaatctccctctacacactgctttgaatgtgtcccagagattctggtatgttgtgtctttgttctcgttggtttcaaagaacatctttatttctgccttcatttcattatgtacccagtagtcattcaggaacaggttgttcagtttccatgtagctgagcggttttgagtgagtttcttaatcctgagttctagtttgattgcactgtggtctgagagacaagtttgttatgatttctgttcttttacatttgctgaggagagctttacttccaactatgtggtcaattttgggataggtgtggtgtggtgctgaaaaaaatgtatattctgttgatttggggtggagagttctgtagatgtctattaggtctgcttggtgcagaggtgagttcaattcctgggtatccttgttaactttctgtctcgttgatctgtctaatgttgacagtggggtgttaaagtctcccattattattgtgtgggagtcgaaatctctttgtaggtcactcaggacttgctttatgaatctgggtgctcctgtattgggtgcatatatatttaggatagttagctcttcttgttgaattgatccctctaccattatgtaatggccttctttgtctcttttgatctttgttggtttaaagtctgttttatccaagactagaactgcaacccctgcctttttttgttttccatttgcttggtagatcttcctccatccttttattttgagcctatgtgtgtctcttcatgtgagatggatttcctgaatacagcacactgatgggtcttgactctttatccaatatgccagtctgtgtcttttaattggagcattttagtccatttacatttaaagttaatattatgatgtgtgaatttgatcccgtcattatgatattagctggttattttgctcgttagttgatgcagtttcttcctagcctcagtggtctttacaatttggcatgattttgcagtggctggtacaggttgttcctttccatgtttagtgcttccttcaggagctcttttagggcaggcctggtggaaatgcaaatcaaaaccacaatgagataccatctcagaccaattagaatggcagtcattaaaaagtcaggaaacaacaggtgttggagaggatgtggagaaataggaacacttttacactgttggtggaactgtaaagtagttcaaccattgtggaagtcagtgtggcgattcctcagggatctagaactagaaataccatttgacccagccatcccattactgggtatatacccaaaggactataaatcatgctgctataaagacacatgcacacgtatgtttatcgtggcactactcaaaatagcaaagacttggaaccaacccaaatgtccaacaatggtagactggattaagaaaatgtggtacatacacaccatggaatactatgtagccataaaaaatgatgagttcattcctttgtagggacatggatgaaactggaaatcatcattctcagtaaactgtcacaaggacaaaaaaccaaacaccgcatgttctcactcataggtgggaattgaacaatgagaacacatggacacaggaagggtaacatcactctctggggactgttgtggggtgggagtagtggggagggatagcattaggagatatacctaatgctaaatgacgagttaatgggtgcagcacaccagcatggcacatgtatacatatgtaactaacctgcacattgtgcacatgtaccctaaaacttaaagtataataataataaaataaaataaaaaaaaccttaaaaatctcatcatccttagcaaaaaatatacagatcgttcataaaacattttactaatggacagtattactattttttttaaatggaaagcacctacatgagcagagttcagggttataataaaaagtaaaccacccgggcgtagtggctcacacctgtaatcctaacactttggaggctgaggtgggtggattgcctgagctcaggagtttgagaccagcctgggcaacatggtgaaaccccatctctactaaaatacaaaatactagccaagtgtggtggcatacacctgtagtcccagcttcaggaggctgagacaggagaattgcttgaaccttggaggtggaggttgtagtgggacaagattgtgacagtgcatgccagcctgggtaacagagcgagtctgcacttcaaaaaaaaaccaaaagtcgaatggataaaagctaatgaatggtaagatggtattatgctcatgttgattaactatgaatgtaagcagtgcccatacactgtcttgtgtaattatatgttaccaaacatgtttaagtatttttgtttttcattgcgatgttttagtgaatctgtaaattgcattcaggaagagaccttttcctgatatgtataactttaatctttaatataaatatttactaggaccctgtgcagctcatgaggttcccaagaccactcttaggtttgatgatttgccagaaggatccatggaactcaggaaagctgttactggctgttatggtttcttacaacacacaaaaaataaagattaaaatcagcaaaggtaagaggcacatagggcagggtccatgagagaccagtcatggagttttcagttttcttctcctagtgaagttattcatgcagtgttttttttttgtttgtttgtttgttttaattatactttaagttctagggtacatgtgcacaacgtgcaggtttgttacgtatgtatacgtgtgccatgttggtgtgttgaacccagtaactcatcatttacattaggtatatctcctaatggtatccctcccccgacaggccctggtgtgtgatgttccccttcctgtgtccaagtattctcattgttcaattcccacctatgagtgagaacatgccgtgtttggttttctgtccttgagctagtttgctgagaataatggtttccagcttcatccgtgtccctacaaaggacatgaactcatccttttttatggctgcatagtattccatggtgtatatgtgccacattttcttaatccagtctatcattgatggacatttgggttggttccaagtctttgctattgtgaatagtgccgcaataaacatacatgtgcatgtgtctttatagcaacatgttttataatcctttgggtatatacccagtaatgggatggctgggtcaaatggtatttctagttctagatccttgaggaatcgccacactgtcttacacaatggttgaactggtttacagtcccaccaacagtgtaaaagtgttcctattcctccacatcctctccagcacctgttgtttcctgactttttaatgattgccattctaactggtgtgagatggtatctcattgtggttttgatttgcatttcttaatggccagtgatgatgagcattttttcatgtgtctgttggctgcataaatgtcttcttttgagaagtgtctgttcgtatccttcacccactttttgatggggttgtttgtttttttcttgtaaatttgtttgagttctttgtggattctggatattagccctttgtcagatgagtagattgcaaaaattttttcccattctgtaggttgcctgttcactctgatggtagtttcttttgctgtgcagaagctctttagtttaattagacaccagttgtcaattttggcttttgttgccattgctttttgtgttttagacatgaagtccttgcccatgcctatgtcctgaatggtattgcctaggttttcttttagggtttttatggttttaggtctaacatttaagtctttaatccatcttgaattaatttttgtataaagtgtaaggaagggatccagtttcagctttctccatatggctagccagttttcccagcaccatttattaaatagggaatcctttccccattgcttgtttctgtcaggtttgtcaaagatcagatggttgtagatgtgtggtattatttctgaggcctctgttctgttccattggtcaatatctctgtttaggtaccagtaccatgctgttctggttactgtagccttgtagtatagtttgaagtcaggtagtgtgatgcctccagctttgttcttttggcttaggattgtcttggcaatgtgggctcttttttgtttccatatgaactttaaagtagttcttttccaattctgtgaagaaagtcattggtagctcgatggggatggcattgattctgtaaattaccttgggcagtatggccattttcaccatattgattcttcctatccatgagtatggaatcttcttccatttgtttgtgtcctcttttattttgttgagcagtggtttgtagttctccttgaagaggtccttcacatcccttgtaagttggattcctaggtattttattctctttgaggcagttgtgaatgggagttcactcatgatttggctctctgtctgttattggtgtataagaatgcttgtgatttttgcacattgattttgtatcctgagactttgctgagttgcttatcagcttaaggagattttgggctgagacgatggggttttctagatatacaatcatgtcatctgcaaacggggacaatttgacttcctcttttcgtaattgaataccctttatttctttctcctgcctgattgccctggccagaacttccaacactatgttgaataggagtggtgagagagggcatccctgtcttgtgccagttttcaaagggaatgcttccagtttctacccattcagtatgatattggttgtgggtgtgtcataaatagctcttattattttgagatacgtcccatcaatacctaatctattgagagtttttagcatgaagggttgctgattttgacaaagtccttttctgcatctatcgagataatcgtggtttttgtctttggttctgtttatatgctggattacatttattaatttgcatatgttgaaccagccttgcatcccagggatgaagcttattcacttggtcatggtggataagctttttgatgtgctgctggattcggtttgccagtaatttattgaggatttttgcattgatgttcatcagggatattggtcttaaattcttttttttgttgtgtctctgccaggttttggtatcagcatgatgctggcctcataaaatgagttagggaggattccctctttttctattgattggaatagtttcagaagaatggtacaagctcctccttgtacctctggtggaattcagctgtgaatccatctggtcctggactttttttggttggtaagctattaactattgcctcaatttccgagcctgttattggtctattcagagattcaccttcttcctggtttagtcttgggagggtgtatgtgtccaggaattcatccatttctgcaagattttctagtttatttgcatagaggtgtttatagtattctctgatggtagtttgtatttctgtgggattggtggtgatatcccttgtatcattttttattgcgtctatttgattcttctctctttactttattagtcttgctagcagtctatcaattttgttgatcttttcaaaaaaaccagctcctggagtcattgattttttgaagggtgttttgtgtctctatctccttcaattctgctctgatcttagttatttcttgacttctgctagcttttgaatgtgtttgctcttgcttctctagttcttttaattgtgatgttagggtatcagttttagatctttcctgcttttctcttgtgggcttttagtgctataaatttccctctacacactgctttaaatatgtcccagagattctggtacattgtgtctttgttctcattggtttcaaagaacatctttatttctgccttcatttcattatgtatccagcagtcattccggagcaggttgttcagtttccatgtagttgagcggttttgagtgagtttcttaatcctgagttctagtttgattgcactgtggtctgagagacagtttgttataatttctgttcttttacatttgctgaggagtgctttacttccaactatgtggtcaattttggaataagtgtgatgtggtgctgagaagaatgtatattctgttgatttggggtggagagttctgtagatgtctattaggtctgcttggtgcagaggtgagttcaattcctgggtatccttgttaactttctgtctcgttgatctgtctaatgttgacagtggggtgttaaagtctcccattattattgtgtgggagtcgaaatctctttgtaggtcactcaggacttgctttatgaatctgggtgctcctgtattgggtgcatatatatttaggatagttagcccttcttgttgaattgatccctttaccattatgtaatggccttctttgtctcttttgatctttgttggtttaaagtcttttatcagagactaggattgcaacttctgccttttttttgttttccatttgcttggtagatcttcctccatccttttattttgagcctatgtgtgtctctgcacatgagatgggtctcctgaatacagcacactgatgggtctcgactctttatccaatctgccagtctgtgtcttttaattggagcatttagcccatttatatttaaggttagtattgttttgtgtgaatctgatcctgtcattatgatgttagctgattattttgctcattagttgatgcagtttcttcctagcctcgatggtctttacaatttggcttgtttttgcagtggctggtacaggttgttcctttccatgtttagtgtttccttcaggagctcttgtaaggcaggccttgtggtaacaaaatcagcatttgcttgtctgtaaaggattttatttgtccttcgcttatgaagcttagtttggctggatatgaaattttgggttgaaaattcttttctttaaggatgttgaatattggccccactctcttctggcttgtagagtgtctgccacgagttctgctgttagtctgatgggcttccctttgtgggtaacccagcctttccttctggctgcccttaatattttttccttcatttcaaccttggtgaatctgacaattatgtgtcttggagttgctcttctcaagaagtatcttggtggcattctctgtatttcctgaatttcaatgttggcctgccttgctaagttgggaaagttctcctggataatatcctgcagcgtgttttccaacttggttccattctccctgtcactttcaggtacaccaatcagacgtagatttggtcttttcacatagttccatatttcttggaggctttgttcctttctttttactcttttttctctaaacttcacttctcgcttcatttcattcatttgatcttcaatcactgataccctttcttccactcgattgagtcggctactgaagcttgtgcattcgtcatgtagttctcgtgccatggtgttcagctccatcaggtcatttaaggtcctctctacactggttattctagttagccattcatctaatcttttttcaatgtt

SEQ ID NO: 7670 - DNA, 4511 bp, Homo sapiens
agccaattagggaattacgaacaagccatttcctgccttgaacgccagctgaacattgctagagatatgaaagaccgagccctggagagtgacgcagcctgtggcctggggggcgtttaccagcagatgggggagtatgacacagccctgcagtaccaccagcttgatctacagatagcagaggaaaccaacaaccccacgtgccagggccgagcctatgggaacctgggcctgacttatgaatccctgggcaccttcgagagggctgtggtctatcaagaacagcacttgagcattgctgcacagatgaatgacttggcggccaagacggtgtcatatagtagccttggaaggacccatcatgccttgcagaactattcccaagcagtcatgtacttacaggaaggtaggtgaaaaggcccattgtgttctcttggcctacttgaaatcaagttcagagtcagaactcaagactcagagggaagtatgcacagtttgaatggccacctctgtgtggagtaagggtctcagaggccacattgtcagttcaactccagaatcacggtgtccccaccaggtgtccgttgatagtactaaggtgtttcattgtccatagcaccttgccctgctctctcggacccagattgtcttactctctcagtgacagcatctactgctcgccagctgcccaaggagctgataccctccttgcttttcagaaccctctgaggaatgagcagcacgttctcgcacagatgaatcaagtaagatgtaatcctaaaaaattataagggttcgaatcagaagaaaatgcccatctgctccaggctctgttgtccctctagagaatatctaaactaactatattaaaactttatagaagtcagttctgacatggcagctgaggtctaatccagaagtatcagtctgaggggtactcaagcagtaaaccaggcttctttctcagcatttgtcacctacagtgcttgggttggtgccacagtagggtcttgttccaggctggcctagaaactgaaggctgcacagttggaccttggatgcttccttcctccgaaagcagaagtcccatagcaatgtatttgccctccacctctttacattgagatgaggctttctgctcttgaaagtccttctcacacaggcatattggatcctctcaccctagaagggaaaaagggcagatagctcactggtaaaaggaatggttactgatttcaagcaaaaactctcatttccagggggctttgcacataaagtttatttaagctgattcaattctcacaatagtcttgtgaggtatatctttttattcccatttttgcagttgaatcacctgaggctcagagaagtacagtgattcaatcctaatcatgtagtcagttagtcaaggagtagggcccagcccgagttttccaacccagaaaccatacaagatcctctctgaagttgtttctaactttacagttgcagagtagggttgggcatcctacccgcttttactcctgagcccccactgggaagccaggagagagagaagcagcaagcaaagaggagagtgggtaaagagctgatgattcgctggtctcctttgcaacagaccagggactgcactggcctgcagtctgagaggttacagagagtctggaagccacttcccagaccttatctacctccgcttctatccacatggggctctgcctctatgcattaaatgagaatgttggcttctaatttcctgaaacttgactgtggtaaaattccaacagacaaggagcaattttcatttgaatttgtaaaaactattaaattcagtcatatgacaacttttcagctgtgttcttttgtacttcctgaaatactatttccatgaaacagctggtttgcctgagacattgcaacacaattctatatttgtggaaaactctcaagttcatttttattgtttcttgtaattttttaagtcttgcagagatctaaaaactctaatttgtagcatctctacagtgtctgtcttgtggatgtgtccactagagagcctgcagctgatggctttcctcgtgggccaaaccaaatgcctcttctcatgagggcaggacacctggatggtgctttccgaatgctctgagttaggtctgcagcctctggcaaggagggactagtttatctggaaaccaccctactgctccctctcccctggctttctgaggggatgaggctgtggggccttgtagatcagcatcaccctgcttcagtgcaatagactctcacaggtggggcctggtctgagccttttgaacaagctctccaggtgctgtggagggagacacctctggataaaaccactggtctcacccagcccttcctcttcttgcaaatgaagaaagggagcgtggatcaatttggtgactttcctggaaccagtccctgacaaactataggttctaggagagctggatgggtgagtcaggttcctaagaggcagaagcagagagaagctggggcaggacagataccatgtctatccagggggcttttaactcttcattgttgaacctcagctagagtcctacatgctgaggatatagcaggaacaaagcaaagtccctgttttcatagaacatggcttctaagcaggagttgtctcagtgaattttacttctgactcatagatcttgacctagaagggacatctgtattgaagaattaatgtgtttagcttattgaaggtttaaacaatcggtatccttctggttttctcccaagaaccatcttctttcatatgtttttctattctgtgagatgtttaaaaatgtgaattatttacaaatatttttgctatccaataacatgacttaaaatgtttctaagttttctgagttatcagcattttgaaatgtatatttatgacattgaacctgagtgtcacttttcttaccgtctcaacagactcagttccttttcaaaagcctgaaattgcacaggcccagcatgatcagaggcaggcttccatctaccctgaattagattagaagaaggaagtccttcctttgtgtgtgcagttgtacggtgggagccttcatgctgtctctgcacaagctagcttctatgtacagtgagcaggataatgagggcaaagtgatgctgagaactgcctagtgaccaatacaataaatggttgccttcagatttgactctcacaaagccctcaaggttgctggtgtcctgaaacccagaagcttgctgtgggtaagtgacccaaactgcaggtgcctgcctgaaggctgttagaatgaggatggtttcatttaaggcttttgcctcataatagcacttgttttgcaaccccgctgaggcacatcaaaatcttagactgaaaaggaaaatagattagacatgaaatgtgtcagtaacatcagtaacagaaggcagggtcaggctgtgttcatattctgctttcaggagaacatcgtatgtatcttctattaacactcattggatgctgtgcacgtgagaaaggaagaatattcttttgccttctgtatttaactatcaggaagagctttgccagccaaagaatcaggttagataagtttatcagccaggagttttcctttgcaaagctatggatttcaaatttaggagggtgaccaggttaagtttcacttgttttagtgtttctgcctgcccagcaaacctgtctcctgctgatagccatcacctgggctcttgccgaggcatcctggaacatcctggaaatgttgctaccaacacagaatttgaagacaatgcttattctaccttggctgattcagctcttgtcctcattttatctagctgtgttgttagtattcttttttttttttttttttttttttttttttaacagagatgggtctcactaagttgcccaggctagattcttactcctgggcttaagcagtcctcctgcctcagcctcctgagtggctcttgttaacattcttttatagacacctgaagcaaaattgggtgggagcagtgctatcccagtgctttaggagaccggggtgggtggatcacttgaggtgggtggatcaggagctggagaccagcctgggcaacatggtgaaaccctgtccgtaccaaaaaatacaaaagccagccgggttgtggtggcccgtgcccgtagtcccaggtattccggaggctgactgaggtggatcacctgagcctggggaggtgcaggctgcagtgagctgccactgcactccagtctggggaacagagtgagaccctgtctcaaaacaaacaaaaacacaaaagtaaaatgacccttcaggactccttaggatagtggaattatccatcttctatgtttccttaaatttctctatctggtttcaggtttaaggttagctgagcaactgggccgaagagaagatgaggcaaaaattcgccatggccttggcctctccctttgggctagtggaaacttggaggaggcccaacac

SEQ ID NO: 7671 - DNA, 342 bp, Homo sapiens
gctctccgggtctatgtctcttagtcttagaattctgtacttgatcttagccaaaaggccgagaagcaagtagtcttagaattctgaagtttggataaatttaaaatttgatactgagtttccagcatgtaaatatcagagtcatcttagacagtgtggcatgagggggaaaaaaaaggaaaatatcagagtcagaaaagtctgatggcctcactgatggaggagcctgttagagcatcaggacaatgtctccgttaggaatggcaattgtctggtcctcagaatgtctatgtgagtgggcatggctccttgaggagcttgcccagtgatgatctgagcctg

SEQ ID NO: 7672 - DNA, 14874 bp, Homo sapiens
ggggtgacctcctcggtaccctgcctgcccctccccaacatcctactcatggccagtgtcaaatggcaccaggggcagaaccagacatggaacagaccatccatagcccccaacatcttcctgaagaggtgagcaatgcagatgagaatggaggacaagaggggtgaggggtggatgcaaagtggaggttgcttgactactaaactcaaggagaagatagagatgtcatcagcagtgacattgatttttttagacaacagagtatcctaagacaggtgttgcactggaaggacagaggccaagtgggacaaagggagatgtcatgtggacaggagtcaggggctagtctacctgcccactttctttctcgctgcacagacgccactgaattcataggaaatctctcagcattgggcccaagggcaaggaggcagtgagtctggcagatggagcactggttggggaaaggagattatttctagttcttggtgtacaactaactggactcaatttttaaaatcacaagttatttgctgctcctcagttttctttgtctttttctttttctttctttctttttttttttttttgagactgagtctcaaaaaagactatcgcccaggctggagtacaatggtgggatcttggctcactgcaacctctgcctcacaggtttaagtgattctcctgcctcagcctcccgagtagctgggattataggtgcctgccaccacacctggataatttttgtatttttaatagagacagggtttcaccatgttggccaggctggtcttgaactcctgacctcaggtgacccaccctcctcagcctcccaaagtgctgggattacgggcgtgagccactgtgcccggccaggttttttttgttttttttttttaatcagtaaaataaatgggactaagtctcacttagagctgtagcatatagtgacatcatgcttgtctgggacgaagtagcctttttaaattttggggcctctttaaataatctgtaggatatctcaagaatctctagaaattcccaaaagtccaagaaaacccttcatttctccatgctacctcagtgacacacctctccatgatgttcttggtgtacctctagcaagtaccacccagtcccagctgactaatattagatccaaagccagatccttgaactttaactcccttgggaagactaactgtggcattaaactcaataaatgcacaagccagacagtggggcaagctcctttggtgctttcaagaaagaaattttggctgggcgcggtggctcgtgcctgtaatcccagcactttgggaggcagaggcaggtggatcgcctaaggtcaggagttcgagaccagcctgaccaacatgatgaaacctcgtctctaccaaaaataaaaaattagacgggcctggtggcacatgcctgtaatcccagctactgaggaggctagggcaggagaatcgcttgaacctaggaggcggaggttgcagtgagccaagatcgtgccattgcactccagcctgggcaacaagagcaaaactttgcctcagaaaaaaaaaaaaaaaagaaagaaagaaaagaaaaacagaaagaaattgtaaaatcctatgactagccaccttacctcctaggctgtctctctcaaatagggtctagggcacacgagaatcatggcagggtaggtggaagttacaatgcaaattccagggccacacccaattcctactgaatctgaatcttcagtggtgtcttcaggtgtctgcattttaaacaagctcagcaggtgtatttggtctccccaacaattgagcagcactgtgctaaagcaccctcttttctacctccaaaagccttagtcctaaaggagacctgcctcattttaacgaagacagggtcagattggatgcaatagggttgtcagtgtgtgtcttccctggtggcttcaggattctcccattgaggtttgtggagctccaggtatgtgaccactatcaacgcatcctgcagttgaggacagtcactgagaagatttattacctaaagctccatcctgaccatcctgagactgtcttccacttctggatccgactggttcaaattctgcaaaaggggctgtccatcaccaccaaagaccctaggattcttgtcacgcactgcctggtacccaagaactgcagcagcccctcaggagattcgaaggtaagtgagcaccattgccaccctgcagtcaaggccaaagcagcaaggtagagcttaacccagctggtatgtgagtgccctatgaaggtgatctcagtgtgaggccttttctaaacagctttattgagtatcatttagaacaataaaatccaccattgtggattttattgttttataattgttttgttttatatatattttatataaacaattctatataaattgtttattgttttataaaatccaccattgtggattttatggtggattatgttgaaaccacagtttcaacactttcagtagattgtatagagtcgtgtaaccatcaccacaatccagtttcagaacatttccattaccctaaaaaataccccctcgcccatttgcagtcattccctgttcctactcccagctctaggcaaccattatctgtttttagtctatacacattcatcttaggcatttcatataaatggaatcttacaacatatagtcttttgtgtctggcttctttcacttagcgtaacatttttcagtttcatccatattgtagcatggggccaactccagggcagagtcacagagtatttgtagttttttttgttttgttttgcttttttttttttttttttttgagatggagtcttactctggcccccaggctggagtgcagtggcacaatcttggctcactgcaacctctgcctcccaggctcaagtgattctcctgcctcagcctcccaagtagctggcattacaggcacgcaccaccatgcccagccaatttttgtatttttagtagagatggggtttcaccatgttagccaggctggtctggaactcctgacctcaggtgatccacccacctcggcccaccaaagtgctggggttacaggcgtgaggcactgtgcccggcattgaccatttttcaattgggttttttcttcttattgcattgtaaggattatttgtatattctggatacaagttcttcatctgatagatgatttcaaaatattttctctcagtctatgaattgcctttcattttcttaatgatgtttttgaggagcaaaagtttttaattttgattaagtgcaattatcaactttttccttcttctttttttttttttttgaaacagtctccctctgttgcccaggctggagtgcaatggcacaatcttagctcattgcaacctccacctcctgggttcaagtgattctcccacctcagcctcccaagtagctgggattacaagcatgcaccaccacactcaactaatttttgtattttttggtagagacagggtttcaccatgttggccaggctagtctcgaactcctgacctcaagtgatccgcctgcctcagcctcccaaagtcctgggattacaggcatgaaactttttcttttatggatcaggttttctatgcatacctaagaactctttgttcattccaaagtcacaaagattttatcctatgttttattctaggagttttatagattcagctcttacatttaggtctatgatccattttgagttaatatttatgtatggaatgaggtaatgatctaagtactttttttgtgtatatggatatgtaattagcctagcaccatttgttgaaaagactattccttcccacattgaattgtcttagcaccttcatcaaaaatcaatttactatcaatataaaaatttatttctgaattatcagttccattctgttgacttatttgcctattcttgtgttaataaaacaatgtcttggttaatgtagctttatattaagtttgaaaatgggtgatataagtcttctaattttgttctttttcaaactgtgttggctattctaaatctgttgcattttcatataaattttagaatcagtttgttaatttccacaaaaaaaaaacctgttagaattttgataagcacatgttgaatttatacatcactttggggagaagtgccatctgataatattgtgtcttccaacatctgaatatggaatgtcttttcatttatttcaatactttagtttcccttagcaaagttttgtagcttttgttttgtttttaatagcaatggggtcttgctctgttgcccaggttggtcttgagctcctgggctcaagcagttctcctgcctcagcctcccaaagtgctgggagccacatgcttggcctattttgtagtttttagtagacaaattctgcaagttctgcacttatttgattaaatgttttcctaagtatcttattgttgttgatgctgttgtgaccagaactgtgtttgtgttttcttaatttcatttttgggtcattcattgatagtattagaaatacaattggttttttaatattaacctcattatacattatagcagttttacagattccttgggatcttctacatacacacaccacacacacacacacacactcatgccatctgcaataaggacagtttcatatcttcatttccaatctagatttgtttattgctctattgcattagctggaacctccagtacatgtttaatagaagaggcaaaagcagacatccttgtcttgttcctgatcttaggaaaaaaacattcagttttttgctgttaagtatgatgcttattatgaatatttgtagatgcccttaatctgattgaggacattccctttcttcctatttattgaaagagttttctttcttttcttttttcatcatgaatgggtattagatttgttaaatgctttctctgcatctattaagatgattatgtggtttgtccttcattctgttaatacagtatattacatgaattgattttttttaacgttaaaccaactttgtgttcctgcgataaaatctgcctggtcacggtgtatatacttattttttatatgttactagattcagtttgcttacattacattaaggaattttgcatctatgctcatgagagatattggtctgtaattttcttgggatatctttgtgatcccctagctttggtattaagttaatattatcctcattgaagaagttggaaagtattccctcctctattttctgaaagaattcatgaagcattgctattacttcttctttaaatatttgatagaatttaccagtgaagatacctgggcctttttgccccagaacatgatgaatgtaagtctggcttcagctacaacagaaactccatgaaggcaggggtttctgtttgtcttctttactgctatatccctagtacctggctcctagttggcattcaataaatacggaatgaatgagtgactatggacatggacagcatgcacaactggagcacttttgagtatcacaggcagcaggaaagaaattaattttgccccgatgtaaaaagcagcacactataggatatttcttagagaaattaagttttaaaacaccaattaggccaggcgcggtggctcacgcttattatcccagcactttgggaggccaaggtgggcagatcacgaggtcaggagatcgagaccagcctggccaacatggtgaaaccccgtctctactaaaaatacaaaaattagctaggtgtggtggcagacacctgtagtcctagctacttgggaggctgaggcaggagaatcgtctgaacccaggaggcagaggtctcagtgagccgagatcgcaccactgcactccagcctggctataagagcgagactctgcctcaaaaaaaaaactccactaattaaatttctataacaaatatatgattcccctacatttaagtataaaaccaaacagcataaactttattaaagcttatattaataggctattcatacattatattaaggtatattaataggaataagtatctgttaagtaatgttaaaagtatgtaatgaagatattacccttaaggcacaaaaggacatttttaccaatacgaggagtgtaaaccaaaaaatatggcctcagaattgcctctgtgagcagctggtgtggctgcactttggaaaattttgagttccaacactttagagtctggaccatgatattaggaaaatgtgaagaccccaaggccttaaccacctggttctgctttttttcttcatatagttagtacagaagaaactccaagcctcccagcccagcgagagtctcattcagctaatgaccaagggggagagtgaagccctgtctcagatttttgccgacttacaccagcagaaccagttgaggtacatgacttaaatcaagccagcctctgacattccctcctgcaacccagatggtctgggctgtgagatccagaaaccaaatagcttggttaatgagcgcagggttttacgtgaccaggcacggtggctcacgcctgtattcccggcactttgggaggtcaaggcagatggattgcttgaggtcaggaatttgagaccagcctggcctcgatatactgccactcactatccagtcttttttttttttttttcctttttgagataggctctcactccgtcgcccagggttcaagcgattctcccgcctcagcctcctgagtagctgggactacaggcatgtgccaccatgcccccaactaatttttgtatttttagtagagacagggtttcaccatattggccaggctggtctggaactcctgacctcaggtgagctgcccgcctcggcctcccaaagtgctgggattacaggcatgagccaccgcgcccagtcactgttcagtctttatccttgactcaggacaaccttcctccagctcttcttgccttgttcttcttctccacacagcaagcatggtgggcttgactccagaggaggactactataaaaaatgaaaagtagttctccaacaatgaggataagttaggtatacaggtgaaaaagtaaaacctaaatttctttttgttgttgttgttcatttgtttacgtgagacaagagtctcactctgtcgcccaggctggagtgcagtggcacagtctcggctcactgcaacctctgcctcctgggttgatgtgattctcctgcctcagcctcccaagtagctgggattacagacacacatcaccacgcccagctaattattgtatttttagtagagacagggtttcaccatgctggccaggctggtctcgaattcctgacctaaagtgatccacctgtctcagcctcccaaagtgccaggactacaggcgtgagccactgtgcccagtcatgtaaaacctaatttctaatccagtttctagtcctacagggaaataaccaaaaccattgtttaaaacattgtcaacttattggatttacttacctactcacccaaggtctctgcttggactttatggagcttctgtgatcgttttcttaatatagagtctgttctggaaagctccatgctacagatctatcttcttcatggctgaggaaatgtcgctgtatgtacagatgacttagcattaagtcttggtataaaactggttggtttaaaagagacaggagttgagcgtacttagaccagagggtaccacagaatattcagtcccagataaagtgggatccagggtcctagtgcctattacttatggtttaatagaaaggagagaacagaaataaattagcaaatgtcaccaggagagaaaaatgaggtgtcagagaggagaattttgtcacaacaggaaccagttggaccagcagttcagaggcagaacaaattccctttctttctgagcactggtaataaactgaaaaccagtacagcttggaggaggcaagcgcttatagcaacgaagagctcgcaaagacatgggcccaagtcattgctctgactgcacccttgagcatatcgaaacctgggggctcagtcttcagatctgtaaaatggaaatgaaaatagtgccaacgccatccagatgtcaggatccaatgagctcatatgcaccaagcacttagaatgctactcagcagatttagaggcaaattgtaagtaagctctcaataagtattaacttgtattgttaattctaacttggctggaggtagaaaactattaacacaagaaaaagacttatctgttgcccagtataaagaatatatcctggagattgtcactccatatatcatacagagctctgtaattaaggaacttctcgatgagatgtcatattgctgagctagagggcactggactctaatagagcaaggtattttgaaactgctttttggctatctcaaattatcaaatcactttccttccttccttccttccttccttccttccttccttcctttttctttcttttttgagacagtctcactctgttgcccaggctggagtgcagtggcatctcagctcactgcaacctctgcctctcgggttcaagcgattctaatgccttagcctccagtgtagctggggttataggcactcactaccatgcctggctaatttttgtatttttattagagatggggtttcaccatgttggccaggctggtctcaaactcctggccttatgtgatccattcacctcagcctcccaaagtgctggtattataggagggagccactgtgtctgctcaaatcactgatttttaaattactatttaaagaaccgtttctgtttatacctcattggccacactcagtcacgtgacctcactcagctgcaagggaggctgggaaatgcattccccattttgcatagacatgtacacaacacaaaattagacactgtgctccccagggagaaggcaaaaagggtcactgggggcctactggcactctctggcacagacagcttttaatatttctagaagttgagaggaggctaaggtctgaaggagaaaataggtaatagacagctaaagaaagggtgaagaagggccaggcaggttaagggaatgggcaggtgcaaggctgaggcttccacaaaggaagaagcttggtggaaggccagtggggaaaagcgggtagtggtggaagagaataaatagaagagggcaaggagtgagccaggcggggcctgggaagccatgcgaagatatttagacttccagtatcatgggagccttagcagcattttaaacagggaagtgacgtgatccaatttacattttgaaaaggtcatgctagctgttgcctgacagttaatttgaagggaaggagagatgtggaaaaacgagctagggagctatggcaacctactctgggcagatcggaaggatgtaagaaatgaggggaggaagggattagtttttgcttcattgctatcttgataattgctttgtacagacatttagctctttcttgttagtttcccagaatgaagcccctgagtgatgatttttctctcatttgggctggttctagtctggttgcaattattatcagtttttgcacattggcaacaacatgcaacttaacagcaaataaaataaatagctgagatgcagaactgaacagatggagtcaccccctcctcctcagcaaaatcagcagcatgggctctgctccccacctcccaccccattccacctcccccttcccgattttttttttctggaactttaatatgcgtcacacccatccaatatagccacagctggcctttttcatatttatatctgtctctaaagctttgcatcaggaactttggaacaagatctgaaatacaaatttaatgttcttttcctttactttcaactttcatttccttgatcctgaaatggctcgagtttcaggagcagcagaaaggtggagaccaacaagaacagctcaggtaagggagggcacagggtaccatgcctcaaagagctttctactctggatataagaataagatcccctccagcccccatcctggttgtcctggtgctgtcagtattgccattgtccttccatgccttagtttgaattcctttaggctctctggccaccacaatcaagttggcaccaagtcctaaccaatttctttctttgcaatgtatcttgtattctttacttcatttctacacccacagaccctaccccagcccagcccttctcatctcaagcctgtagcactcttccataagttcatttatccatttattcattcaaaaccacgcactgagtgccagttactgtgatgggctctagggccaccatgtagaaagacaccatgttcccgcaagaagtttataatttggtggtgtcagatgggaaaatccccgaattacaaaatgtctccttccaggcaacattcaaagcttgtgcctagggtgccaaaggagcacaaagaagggggtccctcattcctgccaggaagcttgcctgggaggcatggtttctgaactgagtcatagacaatgagtgcaggtgagctggctgaaacaggtaacgcagggcattctaggaagaagagacagagtctgcaagagggagcatgacacattctggaaaaagcagccagttccctatttccaggttctagttcaccccaaatccactcaattcggcatgcatggccctgcacaatcttcccccatctcacccatctcacctgctcactcactcttcctctaatagcagccctctgcctaatcatcttctctagcccaaatcttttgctccagcaaaccttagccatcccatgcctccttcatcccccatccactcccttcccccgatgcttcactctaaatcctccctatccttctaaatcctacccttcacacaacaccttcctgccaggctaatccttcctcggtcataacctctctttcattattccctagttgttttataggtttgagggatatttcttcagtgaatactaaattgttttcaggcttctcaattatccacagcatgaagcagaggcctgagaacacaatgggaggcaattaatacccatataccatggcactaataaattattccttcacgttggctcagtaggcagccaaaatatcataagatatttataaatttagagaaggctgtaggtcccaggggaactctgctaactttcgtctaaatcagggattacaaatgcataggactgcaggtggtataaatgggtaaagggggcagggcgcggtggctcacgcctgtaatcccagcactttgggaggccgaggtggatggatcacgaggttaggagttcgagaccagcctagccaacatggtgaaaccccatctctactaaaaatacaaaaattggctgggcatgatggtgcgtacctgtagtcccagctactcgggaggctgagacaggagaatcgcttgaatctgggaaagtggaggttgcagtgagccgagatcacgccactgcactccagcctggtgacagagcgagactcagacttaaaaaaaaaaaatggataaagggctgggtgacatggatgtaagaaaaggttaacttttctctaaattctgttataagtaaaacaactgctggcagctgacacttggtgtcaaaactgagaagacagcagggagtggtggggatagtggcaatgagaaagtgaaagcttcaattaagacttccattcgttgttgccatgctggaatccaggccaaatattctgatttttcaagagaagccaaaagatctggacatatgtggcataccaccttcccataaaatattcaagcatagtattggctaacacttagtgggcaaacaaaacatatctgcagaccacattcagcctggaggctgccagctcacagcccctgttctaaatggtgagcacagctgtggctgcctcacattttgtccaagcctaagaatgttttctcatgttatgcgactaatgacatgatggtgactcatttctctgcatttaaacatacattcaaacacacatatgtataaacatacacactcaaaacataccccatgacattagggttgaagaaaacagatgtgaggaatatttcaaacatttctgggacttgagaaaacagctagaattttagggtcgcagggtatctggcatcatgggacctaccacggccaagatgttcctaggctgaaattgaattgaaattaaccatcccaggtggcctccaggccctcttttctcattcggcgagggagtgtagtctctcagtttaaaaagactgttataccccagcctctggaacttttggatgaaaaagagacttaaaattggaaaaaccagaggcccaacagcacctgtgtggctgaatctttccactcaccaccagcaggtggtatggcctattattgcagtgcttcccaaactttaatgtccaaacagtcccccatagatcttgttaaaaggcagattctaatttcttgggtctagcgggattgagactgcgattctaacatgctcccaggtaatgcccaaggtgctgggctgtgggccatcctttgaagagccagggccaagtggaccaagaacaggctctagcttaaggtcttctgggttcaaggccattgctagttcagctagatgagtctcctggggaaatccactcagttaacccatctgaatcatattgggtctctccttttactggtgctgtcttgttcacgtgacatagtggtaagaacgtggactctggagccaggctgccaggcttggaattctgactctgcttctccttgtgtgacagttggtaagttactcaccctctctgacctcacagaggtgaggattaaaggaccatgaatgcacgtaattgtttggaatggtgcctggcacatcgtaagcacccccccaaatgtcagctgtaacctgtaagggctctgtgaaccagcacacaagcaaatgcatttctttacttgatctagggaaagattcttcccgtgaagacagcatcccttgcacctgtgacctacgttggagggcttcattcacgtacggagagtgggaaagagagaacccctccggcctgcagcccctctcactactcagcactctggcagcctccaccgggccacagctggccccacccataggtacagcaatgggaggaatcccctgccattgtggggcagccctggcattcagcctcagggctgggtcagatcctggggtcctgagggtgattccagaaagttgtggggtgtggtcgaggaatgctggccacagagacctcagccctcttttcccaactgggctgagcaaaaccatgatgtgtggcacctccagggcccccagagttcccccagatgctgttgacgctatagctgctttctcttgctgtatgggaggtgtaagggatctcctctgcagactccccatgtggtctttcctctcttttcctttcctggagctcttgaagggccttcttactgcttgggttgggatgcagagagtgaaaaggaagtaggttaagggggctggggtggggtcagacctccctaaggtcccagtccttctgtcttcatgctcaaggcccattcgtccatccacacattcatttaacaaacatttgtgaagtacttcctatgtgcctctgtttgaccagagatagatttccctaaaagggaggggtgatttctgttttctaaagtaaaatgtcatgaataaaccaccaactcttttttttttgagacggagtctcactctatcacccaggctggagtgcagtggcatgatcttggctcactgcaacctccgcctcccaggttcaagtgatcctcctgcctcagcctcctgagtagctggaattacagacatgcaccaccacgcccagctaatttttgtatttttagtagacacagggtttcaccatgttggccagtcttgtctcgaactctcgacctcagaactctcaacctcaggtgatctgcccaccttggcctcccacaaagtgctaggattacaggtgtgagccactgggcccggccaccaccaacccttataagatacctattatagatagttgacaatttttttaaattagcataagtatctgtgtgcccacaaaagagctttttaggtaatttatatcctatcaaacacttttctctcctacactcacaggaaattctatttgagccacccttccgcactggggagaatctatgcaagcctcgtcaacaccactttgcagcattcagctgctgagggattatcgggatggagagtaggagaaaactgcaaccaaggaagaatagagtcatctcacggtgacagcagagcctttccagctgtacataaccacgtcctcgccactgcacctcggcatatgccacctccatgccactgccagagctggcctagcaagatgtgctctcagaatggccgggcccaagagatgaaggaaaggagtgaaagggaagtaggaccagagaagtggaaggaagcaaaatggaggtgatgagaaaggtggtgggagaaagtcagcagatgagagacacaaagagaagtggtaataggaaacggaagagacttggtagacgagataaggaggacaagagaagggacacacccctgagagatgctcaccaagcttctatttatctaatttaaaacttgaaagtaaagccataaacaaaaaaaagaaatgttttcttccctgctcagaccattctggacaaatgtgaactgccagacaccttccatttccctttctatctgtttttcttgctagttcctgtcttctgattaaagcttcattccttctt

SEQ ID NO: 7673 - DNA, 22645 bp, Homo sapiens
tgcagacataatgatggcaggagctggagcagccacctgaggacccagagctcaaagccacatgttgagaagggcagagataactgtatccactctggactgctgacctttgaactattatgtaagagaaaatcaaaattctattttaagtcacaatactttggggtctttgactacctggactacatcttaagtagtacagcttcatgccactacctgcacccagaagcctgtacctctcctttatttgcacatacttatgttttcttatttcatgttttatgtccatgtttttacaaagtaaaatgtttagtggtccaactaatttttttcaaagaaccagcttatggatttattttagtgtgcttagtgttttgagattatttttgttatatttgaatgaattttaagccatttatagaatcatggggtcacatacttttcttctcaacattctttctccattgtttcattgtcctatgccatctaaacttgctggaaagaggtctgaggccagtatccttttatcccctgggtagactgtctgcttcttctttctggatgtttgtagtataatgttgttgttgttgttgttttaatatggggttttccagtggaaaccagaaaacatgctagacaaattctctctctctctctctctctcttttttttttttttttttttagacggagtctcaccctgtcacccaggctggagtgcaatggcgtgatctcagctcactgcaacctctgcctcctgggttcaagcgattctcctgcctcagcctcctgagtagctgggattacaggcgtgtgccaccacgcccggctaatttttagtatctttagtaaagatggggtttcaccatgttggccaggctggtctcgaactcctaacctcatgatccacccgcctccatctcctgggttcaagcaattctcctgcctcaatctcctgagtagctgggactacagttgcctgccactacacctggctaatttttgtattgtttgtagagacagggttttgtcatgttggccaggctggtctcaaactggcctcaagtgatctgcccgcctcagcctcccaaagtgctgggattacaggtgtgagccaccacacccagccctgctagacaaattctaaaagagcagtaacacttagctagtgcattctttatgcctaagatttaggaacttcacaagagccagtggcttctttgctcactttacctgcaatatagtacattctgttcttttgctaaatcaggactttttttggtttgtttcagaaatggctgtttctttttatgtttttcattacttttttgaatttcatttgttccctagtcactaaggactcaatctgtatgttggatcaacataactattttctatatctctcatttctccccagtcagttcatctctctccccagctttattgtatgatatttatcccagctttattgtgtcatattctcaagcctgtcatccatgttgctgactcagttttctgtcatgccagctctacttcttatggcttctaacatgacttccagatctttagtgagtttttcttgtttctttttttcttttcttttcctttttttttttgagacagagttttggtcttgttgcccaagctggagtgcaatgacgcaatctgggctcaccgcaacctccgcctccctgagtagttgggattacagccatgtgccaccacgcccagctaattttgtatttttagtagagaagagacggggtttctccatgttggtcaggctggtctcgaactcccaacctcaggtgatccgcccgcctcagccttccaaagtgctgagattacaggcgtgagccactgcgcctggcctggtttttcttgtttctttgcttacctctttcggtcttaatttcatcttattttggtatctctatatttttgtttcagagggtccatattatatttaatttccttgagagtgcagagaagagtcttgtcaaatattttcttccacttcctgggatcattattcttttgatatgcagtcgtcatgtgtactttcctcctggcatgctttgggagagaagagtagcatcttacggagatctcgtgatagagctttactaagaaatagtgactattttaattaaaaaaaaaagtttaccttgaatccagtaaccctttagatagagcttctatttcacaggaaatgagtagctagagaatcaagctaaacatcaccccatagaagcaaccagacaaacctagaaggtaggacgtggtgtgggacaactcactcaactgctctcactaataagtgtcctaaaaaggggaatatactagattaaaataagctaagggaacatgcttggtcctgtattgggtactgacttggataagccagctgtagtaataattttggttaattggagaaagtataatatggcctgaaaattaggtaagatgaaaatatagggaaactcaaaggcagagagtatcaactaaatgaaccaggttgttaaaaagttataaaacaatatttaaagtatgatctcattttggttttacagacacacacacacacacacacacacacacacacacacacacttacagtgatgttctccaggaggcaggactatgctgagttttattaaacacttgctgtattgctggccgtggtggctcatgcctgtaatcccaacactttgggaggccaaggtgcgtggattgcttgaggttaggagttcaagaccagcctgaccaacatggtgaaaccccgtctctactaaaaatacaaaaagtagccaggcatgttggcaggtgcctgcgatcccagctactcgggaggctgaggcaggagaatcacttgaacctgggaggcggaggttgcagtgagccaagaccataccattgcactccagcctggatgacagagcgagactccgcctcaaaaaacaaaaacaaaaacaaaaaaaaccttgctgtattttccaatattctacaaagctttgcactgcttatgcaataataaagtgttttaaatagtgacatagatttaaatgggacagacttaccacaaagataataaaacttaaagcttcagggcctctaattcatatgggccttatgaggccctaggaggacctctagcaattttgtatcatacttttgtaggggttttaattttatttgttaagttctagcatattttcactgtggtaaaatacacacaacataaaatgtaccattttaaccattttaggtatgcagttcagtggcatgaagtacattctcactgttttgcaaccatcaccaccatccatctccagaactttttcatcttccctaactgaaactctgcacccattaaacaataactccctatgaccccctccatccagtctttttatttttaagagtttccaaaattgtataaactcttggcttcacaaaacctgggtccagccccaactgacaaccagatgtcctggtaattcctgtgcaagctacgaaatgataccttgcactgccaaagtggctttagcctcaaaccaaaggacagtcagcatggttgaggctgtcaccaaagttttcatcactaaaagtgcaaacagtagtgattgtggcagcatcaatattactgaatacacaaggaggaaaaagcaatgttttctcaagttattggaacctacatctatataactttccccagaagctacaagtttgtaatttctacagtcctaatttcctgtaaattaaccctattttcttcactgcttaaagttattggtaaataattttacatctccttttccagaaggtagtcacatggtcttacctagctgcaagggaggccaggaaatgtaatctttcttacaggagacctgtgcccaactaatgatcaagtattctattactaaaaaatcagaatgggccgggcatggtggctcaggcctgtaatccagcactttgggaggtcaaggcggttggattacttagggccaggagttcgagaccagcctttagtagagatggtgaaaccccatctctactaaaaatacaaaaattagccaggcatggtgctgcacgtttgtaatcccagttactcgggaggctgaggcaggagaattgcttgaactcgggacatggaggttgcagtgagccaagactgtgccactgcactccagcctgggccacagagtgagaccttatttcaaaaagaaaaaaaagaaagaaacagaatgggtgttgggacagacaactaatagacaactaagtatctgtcacatggtttctaaaaagattcaatatgcttgtttttgaggtttgcaggggaagtaggaaggggtgcacatcatttttttgtttaatagagacaggatctcattctctcgtgcaggcttgagtgcagtggcaagatcacagctcactgtagccttgaactcctgtcctagagtgatcctcccaggagcctaggcttcccaaagcactagaattacagatgtgagccaccttaaagcaccatttacaaaactgcttagcatcttgtttagagctaaaaaatcctttgctcacaatcagctttctagactgggcacccaagccttcttcctctgagggttgaacaccatagaagtgggcttaacagacttgtatggaaaagagaagaagtcatctccccaactgactcttggatgtctcagtggccaagtatactcaaattgtatatctaaaccaatgagctttattgttgtggttaagctttaactgtgaacagcaacgtatcaatttattaattactacgcttttgtgctgtgtgttccctttctaggttatttccagggaaatgcaaaccaaaggatgtggtctctgatctaatccttagagaatgtgaccatgaagacacttttcctacctggtaaacaaaagataatgagaaaagtgaggttggaagttggtttactgagccaggagctataacaggtgctggagcaggggtgtgatctgaatgaccagagggaaggactgatggaattggatggtgagagcctccaggccctttaggcttctccctgactttataatgaaatacaaaagtcagcctccatgcttgtcctttgtgtgtaatgattgtcaaactctgtctatatgtgttacatttgaccttgatggttaattcattatgtaataagttcagaatttgggacagacacagtggctcatgcctgtaatcccagcactttgggaggtcgaggtgggcggatcatctgaggtcaggagttcgagaccagcctgaccaacatggagaaaccctgtctctactaaaaatacaaaaaattagccaggcgtgatggcacatgcctgtaatcccagctactcgggaggctgaggcaggagaatcgcttgaactcgggaggcagaggttgtggtgagccgagatcgcgcacattgtactccagcctgagcaacaagagcgagactccatctcaaaaaaaaaaaaaatttagaatttggtccaaattagaaaacagtttctcccaggaatggccttgaatagtggtcagcctgcttggttctttcttcctgacctagcagcccatgatttgggctctttcctcctctggttcaggggtgagggatgctgtcactctccaagagggggaacagcttgggacctagcagagctgctcatcggggttctattcctcccagccagcgccctgacaaagccagcctctggataagaaactaattacttctcctgcttcttcagtttgacctcctaagggaagtaagtcctgcagaagtaaccagcctgccgcggcagaatgcagagcaggcaccaactgccctgcaactgcttccataacctgcagatccaccagggtgtcgggggcccacatgctgcaaagcttaggaagatggggttttcaatggacatgcagcttttaaagttgtgtgagataggttgcattcagagtaaggaagggttgaaaggcaggaagggcattttcctcttagcagtggaaggatcttcctgacagccctccttgcttgctttctgcctggctcactgctttctcagcaagttccgggaggactatgtcctggggttccgaaaagggctggggaatgtccaggcacggataaggcacacaagctctctggaggaaaagggaggctcctttgcacttccccttcctgcaggtctgtcctggtttttcatgatgtcatccattcatcattgtgagctgactggtggtcccagggcttggccagctgcccaaggccaggaggggagacagagatcccaggacaaatgtgcagcaggcccctgagcatgtgtagaaatgttgtcatcatttccacatagaaagacttggaggaaatcaaagaagacagtaaaagtcacaagatcctatccaaccttcccttccctgaatgcctgggaagaattcaggggcctcttgcctgtggatggagagccgaaccctggagcgggcctaggtgtggaggagggactgctctgccgggtggttcattctccagaattcaacctgtttcttgactccgtggtgtttgaaagcaacttcatccaggtattcttgggtggcgcagaatagcactctttgattcttcgaaacctgttcccaagatatgactgagagagtccatccctgaaactggggcagagtgagaattgaggcaaggagaagctagtggacctggaatgcaaggccaccctcactgacctgggctttgctgagccccagacggggcttctcctacagacagctgtcacccagggagaaaggtcaggggtcctctgctctgagtggagaatttggtattctaatcccccagtttacttcagcccccaggctgtcacctgaagtagatgaacaaagaggcagtaaaaagagacgcttcttgagaacaataatgcggattggcgaaagaacagcacctggggtcccagagacagctgggctcagattccagtcctctgccttctccttgggaggtgactgtgcaagtaacctgtgcagcctgaatctggccccttgattgtaaaagggttgaactgacctgaggatgaaatgcaaatacagcaagaaaagtaccttgtctaacaggcactcggtgcacgttcgtctccttgcctgggctctcctctggttggatggaagcgagaatgaacagcactttggagttagagaggaccttcctgttcagtgaaggtgcaggagataatagggcacctcggggaaggaccaagaggatacatttttcaaagaaggccaggaaacagtccagggaggattggcagaaatgacagatggcagggaactcctgggttgtaattcctgtgggcaattgttaacaaatgggtggttgaaatactgtttaaatactagtagttgtttaatcaatatagtggctatcaacaagaattgatttttggccccaactgccagggaacatttgacgatgtctggagacattttttattgtcacgatttggctggtagtgctactagaactagtaggtagaggtcaaggatgctactaagcattctttagtgtgcagggcagtatcctaccctcaacaaagaatatccaacccaaaacattaatagtgtcgaggttgagaaaccctgggctgaaacagactgcagcttttgccaaatgctcaggttgtgcctgggggctgtgttgcaggtcaaaaggggcaggaattggagagacgtctacaaagcttccaacaccatggccctgggggtgacctcctcggtaccctgcctgcccctccccaacatcctactcatggccagtgtcaaatggcaccaggggcagaaccagacatggaacagaccatccatagcccccaacatcttcctgaagaggtgagcaatgcagatgagaatggaggacaagaggggtgaggggtggatgcaaagtggaggttgcttgactactaaactcaaggagaagatagagatgtcatcagcagtgacattgatttttttagacaacagagtatcctaagacaggtgttgcactggaaggacagaggccaagtgggacaaagggagatgtcatgtggacaggagtcaggggctagtctacctgcccactttctttctcgctgcacggacgccactgaattcataggaaatctctcagcattgggcccaagggcaaggaggcagtgagtctggcagatggagcactggttggggaaaggagattatttctagttcttggtgtacaactaactggactcaatttttaaaatcacaagttatttgctgctcctcagttttctttgtctttttctttttctttctttcttttttttttttttgagactgagtctcaaaaaagactatcgcccaggctggagtacaatggtgggatcttggctcactgcaacctctgcctcacaggtttaagtgattctcctgcctcagcctcccgagtagctgggattataggtgcctgccaccacacctggataatttttgtatttttaatagagacagggtttcaccatgttggccaggctggtcttgaactcctgacctcaggtgacccaccctcctcagcctcccaaagtgctgggattacgggcgtgagccactgtgcccggccaggttttttttgtttttttttttaatcagtaaaataaatgggactaagtctcacttagagctgtagcatatagtgacatcatgcttgtctgggacgaagtagcctttttaaattttggggcctctttaaataatctgtaggatatctcaagaatctctagaaattcccaaaagtccaagaaaacccttcatttctccatgctacctcagtgacacacctctccatgatgttcttggtgtacctctagcaagtaccacccagtcccagctgactaatattagatccaaagccagatccttgaactttaactcccttgggaagactaactgtggcattaaactcaataaatgcacaagccagacagtggggcaagctcctttggtgctttcaagaaagaaattttggctgggcgcggtggctcgtgcctgtaatcccagcactttgggaggcagaggcaggtggatcgcctaaggtcaggagttcgagaccagcctgaccaacatgatgaaacctcgtctctaccaaaaataaaaaattagacgggcctggtggcacatgcctgtaatcccagctactgaggaggctagggcaggagaatcgcttgaacctaggaggcggaggttgcagtgagccaagatcgtgccattgcactccagcctgggcaacaagagcaaaactttgcctcagaaaaaaaaaaaaaaaaaagaaagaaagaaaagaaaaacagaaagaaattgtaaaatcctatgactagccaccttacctcctaggctgtctctctcaaatagggtctagggcacacgagaatcatggcagggtaggtggaagttacaatgcaaattccagggccacacccaattcctactgaatctgaatcttcagtggtgtcttcaggtgtctgcattttaaacaagctcagcaggtgtatttggtctccccaacaattgagcagcactgtgctaaagcaccctcttttctacctccaaaagccttagtcctaaaggagacctgcctcattttaacgaagacagggtcagattggatgcaatagggttgtcagtgtgtgtcttccctggtggcttcaggattctcccattgaggtttgtggagctccaggtatgtgaccactatcaacgcatcctgcagttgaggacagtcactgagaagatttattacctaaagctccatcctgaccatcctgagactgtcttccacttctggatccgactggttcaaattctgcaaaaggggctgtccatcaccaccaaagaccctaggattcttgtcacgcactgcctggtacccaagaactgcagcagcccctcaggagattcgaaggtaagtgagcaccattgccaccctgcagtcaaggccaaagcagcaaggtagagcttaacccagctggtatgtgagtgccctatgaaggtgatctcagtgtgaggccttttctaaacagctttattgagtatcatttagaacaataaaatccaccattgtggattttattgttttataattgttttgttttatatatattttatataaacaattctatataaattgtttattgttttataaaatccaccattgtggattttatggtggattatgttgaaaccacagtttcaacactttcagtagattgtatagagtcgtgtaaccatcaccacaatccagtttcagaacatttccattaccctaaaaaattccccctcgcccatttgcagtcattccctgttcctactcccagctctaggcaaccattatctgtttttagtctatacacattcatcttaggcatttcatataaatggaatcttacaacatatagtcttttgtgtctggcttctttcacttagcgtaacatttttcagtttcatccatattgtagcatggggccaactccagggcagagtcacagagtatttgtagttttttttgttttgttttgctttttttttttttttttttttgagatggagtcttactctggcccccaggctggagtgcagtggcacaatcttggctcactgcaacctctgcctcccaggctcaagtgattctcctgcctcagcctcccaagtagctggcattacaggcacgcaccaccatgcccagccaatttttgtatttttagtagagatggggtttcaccatgttagccaggctggtctggaactcctgacctcaggtgatccacccacctcggcccaccaaagtgctgggattacaggcgtgaggcactgtgcccggcattgaccatttttcaattgggttttttcttcttattgcattgtaagaattatttgtatattctggatacaagttcttcatctgatagatgatttcaaaatattttctctcagtctatgaattgcctttcattttcttaatgatgtttttgagtagcaaaagtttttaattttgattaagtgcaattatcaactttttccttcttcttttttttttttttttgaaacagtctccctctgttgcccaggctggagtgcaatggcacaatcttagctcattgcaacctccacctcctgggttcaagtgattctcccacctcagcctcccaagtagctgggattacaagcatgcaccaccacactcaactaatttttgtattttttggtagagacagggtttcaccatgttggccaggctagtctcgaactcctgacctcaagtgatccgcctgcctcagcctcccaaagtcctgggattacaggcatgaaactttttcttttatggatcaggttttctatgcatacctaagaactctttgttcattccaaagtcacaaagattttatcctatgttttattctaggagttttatagattcagctcttacatttaggtctatgatccattttgagttaatatttatgtatggaatgaggtaatgatctaagtactttttttgtgtatatggatatgtaattagcctagcaccatttgttgaaaagactattccttcccacattgaattgtcttagcaccttcatcaaaaatcaatttactatcaatataaaaatttatttctgaattatcagttccattctgttgacttatttgcctattcttgtgttaataaaacaatgtcttggttaatgtagctttatattaagtttgaaaatgggtgatataagtcttctaattttgttctttttcaaactgtgttggctattctagatctgttgcattttcatataaattttagaatcagtttgttaatttccacaaaaaaaaaacctgttagaattttgataagcacatgttgaatttatacatcactttggggagaagtgccatctgataatattatgtcttccaacatctgaatatggaatgtcttttcatttatttcaatactttagtttcccttagcaaagttttgtagcttttgttttgtttttaatagcaatggggtcttgctctgttgcccaggttggtcttgagctcctgggctcaagcagttctcctgcctcagcctcccaaagtgctgggagccacatgcttggcctattttgtagtttttagtagacaaattctgcaagttctgcacttatttgattaaatgttttcctaagtatcttattgttgttgatgctgttgtgaccagaactgtgtttgtgttttcttaatttcatttttgggtcattcattgatagtattagaaatacaattggttttttaatattaacctcattatacattatagcagttttacagattccttgggatcttctacatacacacaccacacacacacacacacactcatgccatctgcaataaggacagtttcatatcttcatttccaatctagatttgtttattgctctattgcattagctggaacctccagtacatgtttaatagaagaggcaaaagcagacatccttgtcttgttcctgatcttaggaaaaaaacattcagttttttgctgttaagtatgatgcttattatgaatatttgtagatgcccttaatctgattgaggacattccctttcttcctatttattgaaagagttttctttcttttcttttttcatcatgaatgggtattagatttgttaaatgctttctctgcatctattaagatgattatgtggtttgtccttcattctgttaatacagtatattacatgaattgattttttttaacgttaaaccaactttgtgttcctgcgataaaatctgcctggtcacggtgtatatacttattttttatatgttactagattcagtttgcttacattacattaaggaattttgcatctatgctcatgagagatattggtctgtaattttcttgggatatctttgtgatcccctagctttggtattaagttaatattatcctcattgaagaagttggaaagtattccctcctctattttctgaaagaattcatgaagcattgctattacttcttctttaaatatttgatagaatttaccagtgaagatacctgggcctttttgccccagaacatgatgaatgtaagtctggcttcagctacaacagaaactccgtgaaggcaggggtttctgtttgtcttctttactgctatatccctagtacctggctcctagttggcattcaataaatacggagtgaatgagtgactatggacatggacagcatgcacaactggagcacttttgagtatcacaggcagcaggaaagaaattaattttgccccgatgtaaaaagcagcacactataggatatttcttagagaaattaagttttaaaacaccaattaggccaggcgcggtggctcacgcttattatcccagcactttgggaggccaaggtgggcagatcacgaggtcaggagatcgagaccagcctggccaacatggtgaaaccccgtctctactaaaaatacaaaaattagctaggtgtggtggcagacacctgtagtcctagctacttgggaggctgaggcaggagaatcgtctgaacccaggaggcagaggtctcagtgagccgagatcgcaccactgcactccagcctggctataagagcgagactctgcctcaaaaaaaaaactccactaattaaatttctataacaaatatatgattcccctacatttaagtataaaaccaaacagcataaactttattaaagcttatattaataggctattcatacattatattaaggtatattaataggaataagtatctgttaagtaatgttaaaagtatgtaatgaagatattacccttaaggcacaaaaggacatttttaccaatacgaggagtgtaaaccaaaaaatatggcctcagaattgcctctgtgagcagctggtgtggctgcactttggaaaattttgagttccaacactttagagtctggaccatgatattaggaaaatgtgaagaccccaaggccttaaccacctggttctgctttttttcttcatatagttagtacagaagaaactccaagcctcccagcccagcgagagtctcattcagctaatgaccaagggggagagtgaagccctgtctcagatttttgccgacttacaccagcagaaccagttgaggtacatgacttaaatcaagccagcctctgacattccctcctgcaacccagatggtctgggctgtgagatccagaaaccaaatagcttggttaatgagcgcagggttttacgtgaccaggcacggtggctcacgcctgtattccccgcactttgggaggtcaaggcagatggattgcttgaggtcaggaatttgagaccagcctggcctcgatatactgccactcactatccagtctttttttttttttttttcctttttgagataggctctcactccgtcgcccagggttcaagcgattctcccgcctcagcctcctgagtagctgggactacaggcatgtgccaccatgcccccaactaatttttgtatttttagtagagacagggtttcaccatgttggccaggctggtctggaactcctgacctcaggtgagctgcccgcctcggcctcccaaagtgctgggattacaggcatgagccaccgcgcccagtcactgttcagtctttatccttgactcaggacaaccttcctccagctcttcttgccttgttcttcttctccacacagcaagcatggtgggcttgactccagaggaggactactataaaaaatgaaaagtagttctccaacaatgaggataagttaggtatacaggtgaaaaagtaaaacctaaatttctttttgttgttgttgttcatttgtttacttgagacaagagtctcactctgtcgcccaggctggagtgcagtggcatagtctcggctcactgcaacctctgcctcctgggttgatgtgattctcctgcctcagcctcccaagtagctgggattacagacacacatcaccacgcccagctaattattgtatttttagtagagacagggtttcaccatgctggccaggctggtctcgaattcctgacctaaagtgatccacctgtctcagcctcccaaagtgccaggactacaggcgtgagccactgtgcccagtcatgtaaaacctaatttctaatccagtttctagtcctacagggaaataaccaaaaccattgtttaaaacattgtcaacttattggatttacttacctactcacccaaggtctctgcttggactttatggagcttctgtgatcgttttcttaatatagagtctgttctggaaagctccatgctacagatctatcttcttcatggctgaggaaatgtcgctgtatgtacagatgacttagcattaagtcttggtataaaactggttggtttaaaagagacaggagttgagcgtacttagaccagagggtaccacagaatattcagtcccagataaagtgggatccagggtcctagtgcctattacttatggtttaatagaaaggagagaacagaaataaattagcaaatgtcaccaggagagaaaaatgaggtgtcagagaggagaattttgtcacaacagaaaccagttggaccagcagttcagaggcagaacaaattccctttctttctgagcactggtaataaactgaaaaccagtacagcttggaggaggcaagcgcttatagcaacgaagagctcgcaaagacatgggcccaagtcattgctctgactgcacccttgagcatatcgaaacctgggggctcagtcttcagatctgtaaaatggaaatgaaaatagtgccaacgccatccagatgtcaggatccaatgagctcatatgcaccaagcacttagaatgctactcagcagatttagaggcaaattgtaagtaagctctcaataagtattaacttgtattgttaattctaacttggctggaggtagaaaactattaacacaagaaaaagacttatctgttgcccagtataaagaatatatcctggagattgtcactccatatatcatacagagctctgtaattaaggaacttctcgatgagatgtcatattgctgagctagagggcactggactctaatagagcaaggtattttgaaactgctttttggctatctcaaattatcaaatcactttccttccttccttccttccttcctttttctttcttttttgagacagtctcactctgttgcccaggctggagtgcagtggcatctcagctcactgcaacctctgcctctcgggttcaagcgattctaatgccttagcctccagtgtagctggggttataggcactcactaccatgcctggctaatttttgtatttttattagagatggggtttcaccatgttggccaggctggtctcaaactcctggccttatgtgatccattcacctcagcctcccaaagtgctggtattataggagggagccactgtgtctgctcaaatcactgatttttaaattactatttaaagaaccgtttctgtttatacctcattggccacgctcagtcacgtgacctcactcagctgcaagggaggctgggaaatgcattccccattttgcatagacatgtacacaacacaaaattagacactgtgctccccagggagaaggcaaaaagggtcactgggggcctactggcactctctggcacagacagcttttaatatttctagaagttgagaggaggctaaggtctgaaggagaaaataggtaatagacagctaaagaaagggtgaagaagggccaggcaggttaagggaatgggcaggtgcaaggctgaggcttccacaaaggaagaagcttggtggaaggccagtggggaaaagcgggtagtggtggaagagaataaatagaagagggcaaggagtgagccaggcggggcctgggaagccatgcgaagatatttagacttccagtatcatgggagccttagcagcattttaaacagggaagtgacgtgatccaatttacattttgaaaaggtcatgctagctgttgcctgacagttaatttgaagggaaggagagatgtggaaaaacgagctagggagctatggcaacctactctgggcagatcggaaggatgtaagaaatgaggggaggaagggattagtttttgcttcattgctatcttgataattgctttgtacagacatttagctctttcttgttagtttcccagaatgaagcccctgagtgatgatttttctctcatttgggctggttctagtctggttgcaattattatcagtttttgcacattggcaacaacatgcaacttaacagcaaataaaataaatagctgagatgcagaactgaacagatggagtcaccccctcctcctcagcaaaatcagcagcatgggctctgctccccacctcccaccccattccacctcccccttcccgattttttttttctggaactttaatatgcgtcacacccatccaatatagccacagctggcctttttcatatttatatctgtctctaaagctttgcatcaggaactttggaacaagatctgaaatacaaatttaatgttcttttcctttactttcaactttcatttccttgatcctgaaatggctcgagtttcaggagcagcagaaaggtggagaccaacaagaacagctcaggtaagggagggcacagggtaccatgcctcaaagagctttctactctggatataagaataagatcccctccagcccccatcctggttgtcctggtgctgtcagtattgccattgtccttccatgccttagtttgaattcctttaggctctctggccaccacaatcaagttggcaccaagtcctaaccaatttctttctttgcaatgtatcttgtattctttacttcatttctacacccacagaccctaccccagcccagcccttctcatctcaagcctgtagcactcttccataagttcatttatccatttattcattcaaaaccacgcactgagtgccaattactgtgatgggctctagggccaccatgtagaaagacaccatgttcccgcaagaagtttataatttggtggtgtcagatgggaaaatccccgaattacaaaatgtctccttccaggcaacattcaaagcttgtgcctagggtgccaaaggagcacaaagaagggggtccctcattcctgccaggaagcttgcctgggaggcatggtttctgaactgagtcatagacaatgagtgcaggtgagctggctgaaacaggtaacgcagggcattctaggaagaagagacagagtctgcaagagggagcatgacacattctggaaaaagcagccagttccctatttccaggttctagttcaccccaaatccactcaattcggcatgcatggccctgcacaatcttcccccatctcacccatctcacctgctcactcactcttcctctaatagcagccctctgcctaatcatcttctctagcccaaatcttttgctccagcaaaccttagccatcccatgcctccttcatcccccatccactcccttcccccgatgcttcactctaaatcctccctatccttctaaatcctacccttcacacaacaccttcctgccaggctaatccttcctcggtcataacctctctttcattattccctagttgttttataggtttgagggatatttcttcagtgaatactaaattgttttcaggcttctcaattatccacagcatgaagcagaggcctgagaacacaatgggaggcaattaatacccatataccatggcactaataaattattccttcacgttggctcagtaggcagccaaaatatcataagatatttataaatttagagaaggctgtaggtcccaggggaactctgctaactttcgtctaaatcagggattacaaatgcataggactgcaggtggtataaatgggtaaagggggcagggcgcggtggctcacgcctgtaatcccagcactttgggaggccgaggtggatggatcacgaggttaggagttcgagaccagcctagccaacatggtgaaaccccatctctactaaaaatacaaaaattggctgggcatgatggtgcgtacctgtagtcccagctactcgggaggctgagacaggagaatcgcttgaatctgggaaagtggaggttgcagtgagccgagatcacgccactgcactccagcctggtgacagagcgagactcagacttaaaaaaaaaaatggataaagggctgggtgacatggatgtaagaaaaggttaacttttctctaaattctgttataagtaaaacaactgctggcagctgacacttggtgtcaaaactgagaagacagcagggagtggtggggatagtggcaatgagaaagtgaaagcttcaattaagacttccattcgttgttgccatgctggaatccaggccaaatattctgatttttcaagagaagccaaaagatctggacatatgtggcataccaccttcccataaaatattcaagcatagtattggctaacacttagtgggcaaacaaaacatatctgcagaccacattcagcctggaggctgccagctcacagcccctgttctaaatggtgagcacagctgtggctgcctcacattttgtccaagcctaagaatgttttctcatgttatgcgactaatgacatgatggtgactcatttctctgcatttaaacatacattcaaacacacatatgtataaacatacacactcaaaacataccccatgacattagggttgaagaaaacagatgtgaggaatatttcaaacatttctgggacttgagaaaacagctagaattttagggtcgcagggtatctggcatcatgggacctaccacggccaagatgttcctaggctgaaattgaattgaaattaaccatcccaggtggcctccaggccctcttttctcattcggcgagggagtgtagtctctcagtttaaaaagactgttataccccagcctctggaacttttggatgaaaaagagacttaaaattggaaaaaccagaggcccaacagcacctgtgtggctgaatctttccactcaccaccagcaggtggtatggcctattattgcagtgcttcccaaactttaatgtccaaacagtcccccatagatcttgttaaaaggcagattctaatttcttgggtctagcgggattgagactgcgattctaacatgctcccaggtaatgcccaaggtgctgggctgtgggccatcctttgaagagccagggccaagtggaccaagaacaggctctagcttaaggtcttctgggttcaaggccattgctagttcagctagatgagtctcctggggaaatccactcagttaacccatctgaatcatattgggtctctccttttactggtgctgtcttgttcacgtgacatagtggtaagaacgtggactctggagccaggctgccaggcttggaattctgactctgcttctccttgtgtgacagttggtaagttactcaccctctctgacctcacagaggtgaggattaaaggaccatgaatgcacgtaattgtttggaatggtgcctggcacatcgtaagcacccccccaaatgtcagctgtaacctgtaagggctctgtgaaccagcacacaagcaaatgcatttctttacttgatctagggaaagattcttcccgtgaagacagcatcccttgcacctgtgacctacgttggagggcttcattcacgtacggagagtgggaaagagagaacccctccggcctgcagcccctctcactactcagcactctggcagcctccaccgggccacagctggccccacccataggtacagcaatgggaggaatcccctgccattgtggggcagccctggcattcagcctcagggctgggtcaggtcctggggtcctgagggtgattccagaaagttgtggggtgtggtcgaggaatgctggccacagagacctcagccctcttttcccaactgggctgagcaaaaccatgatgtgtggcacctccagggcccccagagttcccccagatgctgttgacgctatagctgctttctcttgctgtatgggaggtgtaagggatctcctctgcagactccccatgtggtctttcctctcttttcctttcctggagctcttgaagggccttcttactgcttgggttgggatgcagagagtgaaaaggaagtaggttaagggggctggggtggggtcagacctccctaaggtcccagtccttctgtcttcatgctcaaggcccattcgtccatccacacattcatttaacaaacatttgtgaagtacttcctatgtgcctctgtttgaccagagatagatttccctaaaagggaggggtgatttctgttttctaaagtaaaatgtcatgaataaaccaccaactctttttttttttgagacggagtctcactctatcacccaggctggagtgcagtggcatgatcttggctcactgcaacctccgcctcccaggttcaagtgatcctcctgcctcagcctcctgagtagctggaattacagacatgcaccaccacgcccagctaatttttgtatttttagtagacacagggtttcaccatgttggccagtcttgtctcgaactctcgacctcagaactctcaacctcaggtgatctgcccaccttggcctcccacaaagtgctaggattacaggtgtgagccactgggcccggccaccaccaacccttataagatacctattatagatagttgacaatttttttaaattagcataagtatctgtgtgcccacaaaagagctttttaggtaatttatatcctatcaaacacttttctctcctacactcacaggaaattctatttgagccacccttccgcactggggagaatctatgcaagcctcatcaacaccactttgcagcattcagctgctgagggattatcgggatggagagtaggagaaaactgcaaccaaggaagaatagagtcatctcatggtgacagcagagcctttccagctgtacataaccacgtcctcgccactgcacctcggcatatgccacctccatgccactgccagagctggcctagcaagatgtgctctcagaatgggcgggcccaagagatgaaggaaaggagtgaaagggaagtaggaccagagaagtggaaggaagcaaaatggaggtgatgagaaaggtggtgggagaaagtcagcagatgagagacacaaagagaagtggtaataggaaacggaagagacttggtagacgagataaggaggacaagagaagggacacacccctgagagatgctcaccaagcttctatttatctaatttaaaacttgaaagtaaagccataaacaaaaaaaagaaatgttttcttccctgctcagaccattctggacaaatgtgaactgccagacaccttccatttccctttctatctgtttttcttgctagttcctgtcttctgattaaagcttcattccttctt

SEQ ID NO: 7674 - DNA, 368 bp, Homo sapiens
ctgtgatcagtcattattattatcacttcctggcatgcattctcaacatctttgtgactctctcactttcttcccttggctaaattcagttctctaccagctccatgcctgtgtgatgctgctgaacttgccactgaacctctctggagaagatcacatgacatactaaccagtctccctgcaaagtcatcatcatggcctcaagggggtccttgatgttgcctggaaatcatcatgtgttctcctaaatctgttcactctgctgaatggctatttcacacctctctcctctaactgccaatgcctcctcctgatgaccctgcttcctatttcactgagaacatagtcagaattgaaagagaatttca

SEQ ID NO: 7675 - DNA, 368 bp, Homo sapiens; identical to SEQ ID NO: 7674

SEQ ID NO: 7676 - DNA, 374 bp, Homo sapiens
ttaattagcattctttattatcaggctatctccagattttatgtcttttctaccctttggccacctgacttaacctctttctttgttaggttatcaatagttaatcttttgttttttaaataaactacatacttaatgcgtatggcaaggggagtcattctgtgacatagcttcttcccacgggttgctaattgtccatcaatatccctcatccttaaataataaataattctccagttgtaggtgggctcatggccacccagtgaaaagctacatttcccagcttcccttgtatctgggtgtggccctgtgtttgaattccgaccaatgggatgtgagcaaaagtgattatgccattttcaggtcatagcctt

SEQ ID NO: 7677 - DNA, 2151 bp, Homo sapiens
tgatgattcaacaatgcacgctcaatctgttatctttggaggctatgctttcttcaagttaacactctctaggagtcctttagtctcccaaccaggtaataaaggtagagaatttgtgccagatgaacaaaagcaaagtatccttccatctcccaaattttcagaggaagaaattgaacctttgcctcccacactagagaaaaagccctcagaaaatatgtccattcagctagactctacatttaaacaaatgaaagatgaagatctacaatctgctattgtacaaccttctcaaatgcaaaccaagcttctgcaggaccaagctgcgtcactccaagtttttccatcccattctgcactaaaactcgaagatatatcacctgaagacttgccatcccaagctctaccagtagaaggcctgtcagaacaaaccatgccatctaagtctacatcatcccatgtcaaacagtcttctaatctgacagctaatgacctgccccctcaaggcatactatcccaagacacatcatctcaagatatgctgtttcatgacatgacatcccaagatatgcaatccctagatatgctatctcaagacacaccatcccacgccatgccacctcaagacataccttcccaagatatgctatcccaagctctatcagcgcatgccatattacctgaagcctcaacatcccatattgtgcagttccctgaaatacaacacctacttcagcagcccccagatcttcaaccagaaaacactgaacctcaaaaccagcaaattttacaaatgtcatatcaagatattagatcagaagttatggaagagaccaaagaatggaaatctgaggaggaactccatagaagaaaatcctcaagacggcattccttaaaccagcaaaccaaagccttgcaatacttaaggagacattctttagacgtgcaagccaaaggccagaaatcctcaaagaggcattccttagatcagcaaagcaaaggctggcaatctccaaagcagaaatccttagaccagcaaatcaaagactggctatccccaaagaggcactccgtagataagcaagctcaacttaatcaaactagagaggcactcccagattaagcagctgaagatcagcaagccaaaggggaaccataccccgaaggaccatctaaagatggaccagtttaagaccagcagactgattaggagcaaaactccaagaagcaaacccaggatccgcaaactgaagaccagccgggcccagagaagaaatccccgaaaggacaattcccaaatgttcaagccgaaggacagcaagctcaggtggagaaagtgccaaaactgttatgccaagattcagaatcccaaatacagcaataccaattctggcaattccacaaaggcaatctccaggctggacaacccaggactgtcaatcttttggccaagaatcccctgactggataactcagggctggagaaacaaagattataaagcacgagaatggcaatttgaaatgaagcactggcaaacacaggatctattagagaaagaagccctaaagcagaaagctctataccaagaagtccaaacccagcacgcaacagcccaacataacctagaatgtcaagacactcaagataaagaccaacaagaccttcaatccagagttacacaaaaaggagatatgtacactagagacatcaaaccaggggacatgaaatgtatagggcaaacctcaggggacctgcaatcagaagacgtgaaggcagattttcattcttcttctggccaaagctcagtacaagacacatgtttagcctatttgtccaatctagattcagaacaagatgtgcaaccagacacttcagcttcctcaaattcatataaagaagatgtgaatttaacttctacttcatgtgatccaaaagatcaacagcaatctgaagactctgactaacatgcagaatctacccaataccacactgcccccattaatggaattaaattgggaaaaacaatattgcctcctccaatctgtgttctcaactgtggttgccacctcattaacttacaaaaaaatgaagggcatgctgagcactcaaacaatttgttcttacttaaaataaaatgacaacaaaccaaa

SEQ ID NO: 7678 - DNA, 2152 bp, Homo sapiens
gtgatgattcaacaacaaatgcacaatctgttatctttggaggctatgctttcttcaagttaacactctctaggagtcctttagtctcccaaccaggtaataaaggtagagaatttgtgccagatgaacaaaagcaaagtatccttccatctcccaaattttcagaggaagaaattgaacctttgcctcccacactagagaaaaagccctcagaaaatatgtccattcagctagactctacatttaaacaaatgaaagatgaagatctacaatctgctattgtacaaccttctcaaatgcaaaccaagcttctgcaggaccaagctgcgtcactccaagtttttccatcccattctgcactaaaactcgaagatatatcacctgaagacttgccatcccaagctctaccagtagaaggcctgtcagaacaaaccatgccatctaagtctacatcatcccatgtcaaacagtcttctaatctgacagctaatgacctgccccctcaaggcatactatcccaagacacatcatctcaagatatgctgtttcatgacatgacatcccaagatatgcaatccctagatatgctatctcaagacacaccatcccacgccatgccacctcaagacataccttcccaagatatgctatcccaagctctatcagcgcatgccatattacctgaagcctcaacatcccatattgtgcagttccctgaaatacaacacctacttcagcagcccccagatcttcaaccagaaaacactgaacctcaaaaccagcaaattttacaaatgtcatatcaagatattagatcagaagttatggaagagaccaaagaatggaaatctgaggaggaactccatagaagaaaatcctcaagacggcattccttaaaccagcaaaccaaagccttgcaatacttaaggagacattctttagacgtgcaagccaaaggccagaaatcctcaaagaggcattccttagatcagcaaagcaaaggctggcaatctccaaagcagaaatccttagaccagcaaatcaaagactggctatccccaaagaggcactccgtagataagcaagctcaacttaatcaaactaaagagcaactcccagatcagcaagctgaagatcagcaagccaaaggggaacaatacccagaaggacaatctaaagatggacaagttaaagaccagcagactgataaggagcaaaactcaaagaagcaaacccaggatcagcaaactgaagaccagccggcccaagagaagaaatccccgaaaggacaattccaaaatgttcaagccgaaggacagcaagctcaggtggagaaagtgccaaaactgttatgccaagattcagaatcccaaatacagcaataccaattctggcaattccacaaaggcaatctccaggctggacaacccaggactgtcaatcttttggccaagaatcccctgactggataactcagggctggagaaacaaagattataaagcacgagaatggcaatttgaaatgaagcactggcaaacacaggatctattagagaaagaagccctaaagcagaaagctctataccaagaagtccaaacccagcacgcaacagcccaacataacctagaatgtcaagacactcaagataaagaccaacaagaccttcaatccagagttacacaaaaaggagatatgtacactagagacatcaaaccaggggacatgaaatgtatagggcaaacctcaggggacctgcaatcagaagacgtgaaggcagattttcattcttcttctggccaaagctcagtacaagacacatgtttagcctatttgtccaatctagattcagaacaagatgtgcaaccagacacttcagcttcctcaaattcatataaagaagatgtgaatttaacttctacttcatgtgatccaaaagatcaacagcaatctgaagactctgactaacatgcagaatctacccaataccacactgcccccattaatggaattaaattgggaaaaacaatattgcctcctccaatctgtgttctcaactgtggttgccacctcattaacttacaaaaaaatgaagggcatgctgagcactcaaacaatttgttcttacttaaaataaaatgacaacaaaccaaa

SEQ ID NO: 7679 - DNA, 422 bp, Homo sapiens
aacatggaaatttttccaaaattgcaagaatacaacgcctataggttagacttacaatatgagaatggaagaatgtaaaaaaccacttcttctgaggcctttccatcccactgagggagatgctaaggggcaagtcagaagctcccaaggcccccagaacccatagtaacctttctagtctacagaagactctcttttctctctgtttcttgaaggcattttcccttgacctcccctttctgagacacctaatactgtcctatcaatgagtttgggtctgaagttgacaaaatcaaatgtgtttaagacccataaggaaaaataatgtttgaagtatctgtttaaaagacaaaatgcaaaaggctgtgggaaactagaaaatttatgatttgcttaaaggcaacctaatttttttattaaaa

SEQ ID NO: 7680 - DNA, 1562 bp, Homo sapiens
ggaggagccacagctcctccgtattgtcctgccgggaggacaggatcaagtggtggcccgtcaggcacagggtgccctcgacagccgggtagaaaggccggtgcagcaccacattgtccacccgcggggtcttaatcagctccgcaaactccatgctccccccgcggccggagccagggaaccgagcccggtaggtgcgaggcggttaccccgccgcaggaagtagcggaaacacccggcgcggggctggcccgtggggcggggcgggccgggccggtgaggtgggcccgccccaggtgggtgggcgcggcgaggcctacagccgccggcaccggccgcggggagacaggggctggggctggacgaggcccaagcgcctctcccgcaccgcgcggttcaccaggcctaggactcggccacagagaacccctctccacaggcccaaggaccgccgctgccgttgggctccgggtcccgcgttggcaagcggagggcagtaggagaaagccgcctcagaatccgcttccacgccctggccgctagggactcctagcggaagtggctactcgctgctggagcccacaacaactccgggcggaagcagcaggtctcgaaactcggaagacgcggaagtcgcagccggaagttggtcctcgctaggtcctctggaaatgcctccggaaacacagccagaccagaagatgtgtgttcctacgagaaaaaaagcttgtctttgccttcacgccctcccgctgcctttcttaaccacctacaaatattccttatcagaagaggtccgggaagagggaggaggtccctgtcttgccttcctccgcttgagtagtatcccctccagaagctcttcagagcgtggggctgctgtaaattgtgataattgttatgcattagccctgaagacatggcaagtaggggatggaggcggtgactgtgaccttacggaatcctccaggggtcagggagggacacagggccactccacaggctctccgagagcgccgcgccacgaggtgtaaccctggagcaagaaagaggaaaaacaggaatacctgtgagaggaacccaagtacatgcagtgcacagaagagcaagtcacttgacttgctggcggccaccccgttaatctgcagcagagcctggacttcagtctgcatctgtgaaacccagcgcatgggtgcgttggtcaccaccgcacagcctccccgtcagacacccacgtttcgccaaaaatttattcaaataattactcctttgcttgttcctttcccaccgcccacttctgacatttttattcaaaagtaggaaatagaagagaaatatgtttgagtgctggtctgctgtgacttcattgaccttttaaatcctcaccatctagtacctaagcacagcgagttggacaaactctcacagtattcacaaagtaaattgccacaacctcatcagctcatccaacacttgtccatgcttttgattttgtccttcttaaaatgtacccttcttaaaataaaccactttatagacttgttttaagtgagatacgtaaa

SEQ ID NO: 7681 - DNA, 1562 bp, Homo sapiens
ggaggagccacagctcctccgtattgtcctgccgggaggacaggatcaagtggtggcccgtcaggcacagggtgccctcgacagccgggtagaaaggccggtgcagcaccacattgtccacccgcggggtcttaatcagctccgcaaactccatgctcccccgcggccggagccagggaaccgagcccggtaggtgcgaggcggttaccccgccgcagggaagtagcggaaacacccggcgcggggctggcccgtggggcggggcgggccgggcggtgaggctgggcccgccccaggctgggtgggcgcggcgaggcctacagccgccggcaccggccgcggggagacaggggctggggctggacgaggcccaagcgcctctcccgcaccgcgcggttcaccaggcctaggactcggccacagagaacccctctccacaggcccaaggaccgccgctgccgttgggctccgggtcccgcgttggcaagcggagggcagtaggagaaagccgcctcagaatccgcttccacgccctggccgctagggactcctagcggaagtggctactcgctgctggagcccacaacaactccgggcggaagcagcaggtctcgaaactcggaagacgcggaagtcgcagccggaagttggtcctcgctaggtcctctggaaatgcctccggaaacacagccagaccagaagatgtgtgttcctacgagaaaaaaagcttgtctttgccttcacgccctcccgctgcctttcttaaccacctacaaatattccttatcagaagaggtccgggaagagggaggaggtccctgtcttgccttcctccgcttgagtagtatcccctccagaagctcttcagagcgtggggctgctgtaaattgtgataattgttatgcattagccctgaagacatggcaagtaggggatggaggcggtgactgtgaccttacggaatcctccaggggtcagggagggacacagggccactccacaggctctccgagagcgccgcgccacgaggtgtaacctggagcaagaaagaggaaaaacaggaatacctgtgagaggaacccaagtacatgcagtgcacagaagagcaagtcacttgacttgctggcggccaccccgttaatctgcagcagagcctggacttcagtctgcatctgtgaaacccagcgcatgggtgcgttggtcaccaccgcacagcctccccgtcagacacccacgtttcgccaaaaatttattcaaataattactcctttgcttgttcctttcccaccgcccacttctgacatttttattcaaaagtaggaaatagaagagaaatatgtttgagtgctggtctgctgtgacttcattgaccttttaaatcctcaccatctagtacctaagcacagcgagttggacaaactctcacagtattcacaaagtaaattgccacaacctcatcagctcatccaacacttgtccatgcttttgattttgtccttcttaaaatgtacccttcttaaaataaaccactttatagacttgttttaagtgagatacgtaaa

SEQ ID NO: 7682 - DNA, 1000 bp, Homo sapiens
ggcaggtgaaagatagttttattcagcggcagctctcattaacagctttcttacactagctctcttattagcagcttactcttccactgttcgcctgtctcagcagcttgagccagctgcccctacacatagctgcgcagccagctctctcttgccttcagggtcagcagcttaactccttctctctctgggcatgagcaagcccagctgtgtcctggctccctcccatctgcctgcaagatggacagctttggctctctctttctctgggtgccagtgtgctcatcatgtcaagccatgttaagccaaactgagccaagccccgaagagccatgtctcttatgcacggcatcaacagggcagttataccttttacagacaatagtggcataaagccaggaatgaacttacacaaacaggttatattacaagtggagctgtgtgcttgcacgccaaactcgtgagtcacacaggcctagatatccacctcggcctattccttgaccaaagcacatctatgtaccttactatgtggttttgtatgttggccaggctggtctcaaactcctgaactcaagtgatctgcccgcttcagcccccaagtgctgggattacaggtgtgagccactgcatctgaccggaaaggatgtatttttgctcaattagcaacacttctgggtctttaatgtcttttctatggctatttgatattcactttatagagaattaatgcctgtattgttggacatttaagttgtttccaagttttcaccattataactgtatttgtgtgtatatattatattcttgccaggctgtaagctttactagcagagaggaaattttaaagctttaaaagaacgctgagctagatctagcttctggctctgtgtgtttattgaccagtggtgtgccttgagaaaccagaactctctgaatttcagttttgtctctgtgtaaatgaagaaggttgtaataaaaaaaatctcaagtttccttc

SEQ ID NO: 7683 - DNA, 688 bp, Homo sapiens
ggcaggtgaaagatagttttattcagcggcagctctcattaacagctttcttacactagctctcttattagcagcttactcttccactgttcgcctgtctcagcagcttgagccagctgcccctacacatagctgcgcagccagctctctcttgccttcagggtcagcagcttaactccttctctctctgggcatgagcaagcccagctgtgtcctggctccctcccatctgcctgcaagatggacagctttggctctctctttctctgggtgccagtgtgctcatcatgtcaagccatgttaagccaaactgagccaagccccgaagagccatgtctcttatgcacggcatcaacagggcagttataccttttacagacaatagtggcataaagccaggaatgaacttacacaaacaggttatattacaagtggagctgtgtgcttgcacgccaaactcgtgagtcacacaggcctagatatccacctcggcctattccttgaccaaagcacatctatgtaccttactatgtggttttgtatgttggccaggctggtctcaaactcctgaactcaagtgatctgcccgcttcagcccccaagtgctgggattacaggtgtgagccactgcatctgaccggaaaggatgtatttttgctcaattagcaacacttctgggtctttaatg

SEQ ID NO: 7684 - DNA, 255 bp, Homo sapiens
acgtatccacagaaagccaagcagctaatgtcagatgagaaatgctttaaggtgagagttgctcatgtagtcaaagaccttgctggtgacaatgtaagttgttaggattctctgaatcggaagttatagccagggtactttgaccccgtgattctactcctggaactttttagagttcctaatgagttcaccagagaaatacaaagtggaagtaaccatcttcctggacaatctattttgtttctttcttgcctt

SEQ ID NO: 7685 - DNA, 7727 bp, Homo sapiens
cgcctcaccgtgatgttgcagtggagcctgagctgccgcggcggctcctggttcttgtggaaaatagaggacaacaacttcagcttggccttgaaccctgacacggacattttactctcacctctggcgggaggggcgcggaaggtgagccggtcgggagccgctgtcatggccgcgaccacccgcgggacctctcggcggcgctctcgcggctccgcctctccccgctgcctcaactctagtcggagtagggctggaaaatggcaaggggcaccgaggcctctgcggggagctgtgtggcggcctgggcggctgctccccttgtaacagactccaccgacagaggcgctcctcctgtcaagccacagcttaaaaggacaacagcaccaccgcccccgctaccgcctgggaaagggctgcccctaccccgctcccgtccctctcgtccctcacccctcacccctcacctctcacccccgcgcgcccggtgcgcacccgtttcggcgggtgcacgagtccagagcatgtgcgcgcttccggctgccccctcctggctttgacccagcactgctggacccatctagtccgttcctcacactcgcggactggaagctccaggctgcacaaccaccaactggtgtgtgtgtatttaggggcggggggaggtacaaaaccaccaactcgtgtgtgtgtgtgtgtgtgtgtgtgtgtgtgtgtgtgtctcccaagggaacagcactgctgagttcaggctatcagctcatggactgtcagcaaaatacagtcacaagaaggctatgtgctgttttgtcttttgcagtgatgtcatgttgctcatgttttatgtttttcagagttcattagtttctttttgttctcagtaatatccagctcaatagattgtgtaagtagaatacccccaaactgaaagtcacctacataaaatatagtgaaaaatatgtcacccacttaaactatagttgaaaatatgtactcattagttttgtgtagccaacactggataatgggtaaggaagggcacaggatcccagggctagactgcctgggttcaagttccgatttagctgcttgctggctgtgaaatgcttgacagctttaagcctcagtttctttttttttttttaacttaatcccaaatgtgatagtaagtctcagtttcttgatctgaaaaacagaaattattcaatgagagtccatgtgaaaactttaaagttttaaagccactttctggctcaggaaagtcctcagctttagctgttaaagttttaaaagccactttaaagttttaaagccactgcctggctcaggaaagccctcagctttagccattattagctatgattattattgtgctggctacacatgcattaatgaggcaggaaaatgctcaaggataacaaccaagtatccaaattatctcatcagaccgaaacagatgcatatgtttgcatgctcatgttttagctcagagccatttgtctaaaagactcttgaactcaggggtccaggcagtatcaactttactttgcagtgaagccatcacgtttgttaatcaatgaaaacgacataatgctctttttttttttttttttttttagcaccaaccatgtgcctaaagctaactgtgtcaaaaagagcatgcttcgaggggctggagtgagcaattcaacttgtggagaaataagaaataatagtgttgagacaagaaacataaaaccgcaggtaaggtaggaatcactgaaggtcaggcaaaggaactggcatccagtaatgagtcaggctttgacggcctctggcctacagatggctctttggagaggaaaaaattaagccaggcctgaggccacagatcctaagggactgctggcagctctaggctgtctatggaagagaagcagagggtggcacctggttgaaagagggagctggggggcatggcttgagcccgcatttacagatagagtcccctgattcctgcaactggggaagaagagcatgcctggatcaggggacctcaaatcagaactcttcccacccacaccccttcttttcagggcatctttcactgcaaacaacagataaactagttagaaagctcagcagattctcaggatggtgcctagcgggcagggcctagctaccctttgacagtgactgagggtgatgccacaggcccgtaagcacacattggaaaatctttacatccatggacacgccatgccccacagagacagctgtgcagggttctttaggtttggggtgctctgctggcagttgccttataaatatataggattaaaatgggatgccctggagcttagctaacctttacaccccactctaaaaggaacggactgctagttttgtctgctttataaaagatggatctgtcattgtttttagaacttttggagaaagatttcttgggaggaagctatcctgaacgcttagagacttttctcatttactggcacaccagctttagagtcctaggtcttcatcctgctcagccaccctccagctgtgtgaactttgagaagttgcttgactacactgagtctcgttgtcactatgagtggaggttgctacgttgctactgtgtggagcacctacccccaagcactcttataaggtgatggtgaagatcaaatgcagaatacggctcaaggtgaggatcacttgaagccaggagtacgagactagcctgggcaacaaagccagacctcatctctatgaaaatgtttttcgtctcgttatgttgtgctttttgagatggagtctcgctctgttgcccaggctggagtgcagtggcatgatctcagctcactgcaagctctgcctcctgggttcatgccattctcctgcgtcagcctctggagtagctgggactactagcgcccgccaccacacccagctaattttttgcatttttagtagaaacgggtttcaccatgttagccaggatggtctcgatatcctcaccttgtgatccacctgcctcggcctcccaaagtgctgggattacaggcatgagccacctgcccggcccgaaaatgttttttaaaaaattagctggacttgatggtttatgcctgtattcccagctactcgggaggctgaggtgagatcatttgagcccaggagtttgaggctgcagtgagccatgatcacgccactgcactccagctcaggcaacagagagagaccctatctcaaatcaatgaataagtaagtaaataaataaataaatgaaataatgcacacaattactacactagtacatgatcaggcacatgataaatgctcaataaatggtagccccaataagctttgtaatgttttgggaaagggtgtcctttggactcagcccagtgacagaagcatttgaaaagactgatttgtatgatggctatttcctccaggtacaaacctgtacctccagggacccagggcattggctcagtggggcaccttgttctattttctcttgttttgggcagcactgattgccctagggctaatcaggactgccaccccagactccattgccaagagtatccccctccccaagctagccatgggaaagccacttgcatcctaagactactggaaattaaagggaataaaaagcacaatttagtcgctcactctccagctgatgggaaataggtttttgctattttgaacagagctgttaggaacattccttgtccacatcccctgttttatattgttttatataggcaagaatttcttttggatgtagagtagaattgctgagctgggaggagtatgaatattcagccttatgagatggagccaaattgttttccaaagtggttataccagtgtatactcccagcagcagttcttaagagatctcaggatctctatcttctggtgatgtcacaacatacaaaaagaatgaatgccagctataaacaacaataaggatgaatcttagcaatataatattaagtgaaaaaaaacaagttccagaaggatgcatacagcatcctctatatagcttggaaaagaaaatgtgggcatggtggctcatgcctgtaatcccagcactttgggaggccaaggcaggaggattgctttaggccaggaattcaagaccagcctaggcaacatagcaaaactctgtctctacaaaaactagaaaaattaactgggtgtggtggtgcaggcttgtagtcccagctactcatgaggctgaggtgggaggatctcttgagtctaggtgatcaaggttacagtgagccattactgcaccactgcactcagagacagtaagtaacttgtctaaggtggcctcattagaagttagctgcggccaggcgcagtggctcacacctgtaatcccagcactttggaaggctgaggcgggcggatcatgaggtcaggagatcgagaccatcctggctaacacagtgaaaccccatctctactgaaaatacaaaaaaaaattagccgggcatggtggcaggcgcctgtagtcccagctacttgggaggctgaggcaggagaatggcgtgaacccgggaggcagagcttgcaatgagccaagatcgggccactgcactccagcctgggcaacacagtgagactccatctcaaaaaaaaaaaagaagaagttagctgtggtggctgggtgcagtggctcatgcctataatcccaaaactcagggaggccaaggcaggaggatcacctaagatcaggaatgtgagaccagccaggccaacatggtgaaaccctgtctttactaaaaatacaaacattagccaggtgtggtggtggatacctgtaatcccagctactctggaggctgaggcaagagaatagcttgaacccaagaggcagacattgcagtgagctgagactgcaccactgcactccagcctggatgacagagcaagactccatctcaaaaaaaaaaaaaaaaaaagattcaaaagcgttagaaaccaaataaatgtaatgaaaacaatcagattttctgcttaaagaccagcgaagaggacaaatgggagggggaaactggagctctgcccctgttggtgggagtataaactgaaccaatttttctgcaggataatttgaaaatttatattaaaaaccctaaaactgttgtacgttattttcctccagaaattctacttctatgaattaaatccaaaaatgcttgctctaatccactaaaaatatacatataagaaaatttatttctggggtggcaatgattaagttaatatacatcgagctattaaaaatgatgatgctaaggatagatttactgccatagaaatatgcctaaaacatagtgacaaaagactatataatgattctactttttaaaatgtgtatatgcataaaaaagtataaaaagcaacaaggcagaatgttttgagtggcaaaattaaagacttttcttcatattttgtcttccaaattattagaaaaagaatatgattttctttataatcagggagaagtattattttcatttatttctatttaaatttattttcttttccttattttttctcatctatgtatcacatatagtctagaaagcttgaatccctgcctcttgagataaatcagcccatttctttctctataaatttgccttttttggacatttcaaatcaatggaattatacaatatgtggtctcgtgtctggcttttttacttagctaatgtttttgaggttggtccatgacatattgtagcaggatgagctgcagacaaaactcctcagacaccaggttaaaaaaggaaggagctttattcagctgggagcttctgcagacttgcatctcaaaagccaagctccccaagtaagcaatgactgtcccttttaagggcttacaactctaagggggtctgtgtgagagggtcgtgatcaattgaggaagcagggggtatgtgactgggggctgcatgcaccagtaattggaatggaacagaacaggacagggattttcacaatgcttttccatacaatgtctggaatctatagataacacaagcagttaggtcaggggttgatttttaactaccaggcccccaatttttttttttgagatggagtctcactctgttgcccaggctggaatgcagtggtgggatctcagctcactgcaagctccgccttccaggttcatgccattcttttgcctcagccttctgagtagctgggactacaggtgcctgccaccacgcccagctaattttttgtatttttagtagagtcggggtttcaccgtgttagccaaggtagtcttgatctcctgaccttgtgatctgcccacctcagcctcccgaagtgctgggattacaggcatgagctaccacacccggctgatattgaaattaacgttttgctttcttcttgcatctatttttcacttctctgacattttgatggataaagtttcatttggaaggatttttatttcaaaatagaaatagcatataacatgagaatgggaactctgaaaggttcaactttctagtcattagtttcctaagattgtcatgaaagccacatatagtcaatcatgattggcctgtattaaaagtgagataacatcatgtacaacttaagcactgtactttctatcagatatagaaaaataggtggtgtgtttggaaaagtattgggctaggagtcaggaagcttgactgttagtcccaaccctccttcttcagctgagcacccctaggcaataattcagcagctatttcttaaatacctaatgagtttcaggctttgtagttgggctgggaataaagatatagatattgctttcatgattctccaaggctcccctcctcaccccaactcacagtgagctttcttatgcattgtgtaaatttgtctcctaacaggtcccaactctctctccaacctgcttcccagggaagttgtgaggatcaaatgagagagaatatgtatgaaagcaaattctaaatgattttaaaatgcaataaaatatgacctatggaaaattatttaaagatccttagaattttaaataaacagtacattaacctgagttctctatggtttttattttaaatagatatgaaagttttacaatgaaccactgatatggttgaaaaacttagcttgattattctccaagaaaatgatacagtggtttgtctggtgaattttctaaaattgccagccaaataaaaccaaaacctcttttgagttgagtgactggatcagtcaaaggaacattgactgtgtaatggagaaatgttttctgtgttcactgacagcttgccgttgtttgattccagctgcagcatatcatgagtgatgagatctgtgtacaggtgactgacctttacctggcagaaaataataatggggccaccggaggccagccgaacacacagaactcaagaagcctcctggagtcaacgtatccacagaaagccaagcagctaatgtcagatgagaaatgctttaaggtgagagttgctcatgtagtcaaagaccttgctggtgacaatgtaagttgttaggattctctgaatcggaagttatagccagggtactttgaccccgtgattctactcctggaactttttagagttcctaatgagttcaccagagaaatacaaagtggaagtaaccatcttcctggacaatctattttgtttctttcttgccttaaa

SEQ ID NO: 7686 - DNA, 1719 bp, Homo sapiens
gaagatgtctttttccagatgttctttttatttaactaaaatgtctctagcttctttccatttatgataatcctgcccttttcgacccacagtgtagctcagaggaggaggaccttaagaaaaactgagattcgttattcagggcccatggtaccttaatctagaaacacatatcccaagaaatattttctttttaaaattatacatcaactttatgccttattgtttaaaaatcttctatcaaaagtatcatcgataagacaatttatcttgcttttgtacctcataattaccctaaaatgtgaagtttctagtctcactgatttcagatgaatatttaaaataatttgataagtttaatcaattgaactctactgtgtgagtgagggagagaaaggagttatttttgtgttttgaagaaagttgacaggatggaagatctgaaattatggctggggattgtagtgatagctggtagctgaaaccacccaaaaaagctagaaaagtgttctcttatgcctccagagatacctagaaaatatgaagaatgtggaaaagagcaagatggaaccctcagagtgtttcagataaggtctgttggtatctccataagcttttctcctatttggagaaaatagactctcactgaaactcttcaatgtttttaccctccatccttttcttagcaatctaaactcaatggcctcctgttccccaacactgcagtctgggcatctgactttgtcttccctctgcactcatttctgtgaatcatgaccaggatgaaactgatatccctagttcctcttccccatttcttctcacactcccctgcctgagaatcagttgagttcccaatacctcttccttcagtctctattcattatatggtctaggttgagacttccttggaagcagaacctgagtaccaggaactcatattttataaagtatatttattccttttagctgcaaactaacccagccatgttttagtgaatgctttaatctgaagatgactttgagctcattgaccatattaatctttcatcaaacaaactggatgttgtttcattaacaaaaaactcctccacaccaaggagtgtttagtaacttctgcacagaggactcatccatctcttgcttatgtttgggacagaaagacacttctctggctttttactggcttgaacccaatgggacagagactctctagaaagtttcagggctcacattcacttgtttgtccaaaaaatatttttgagtgtctcccaagtgccaaaccctggctactcccacctttgcctgagcccatgagcggtagtctgggggctggatgtgaggagttctgagttggctaggaagacacaaggcacaatggacatggggcaaagtccacttgctggacattggtcccttccacttccaagctgtccatcaggctgagagatctggaatgcataccccacactttgaagatgaggaagggcgagtttctcaaagtgtgtgtgtgtgtttctcttttaatctgtaatggtttctgcattttgaggtagaaacagaaatctcttttttgagtgggaccactcgggtgcggcttcttagtcttgttgatataataaagcacatgcccactcctcatggagtggagaggagaaaattctaagggaacgtactctgaatgcaaatgtttctgagattaaacactagtcacttgtt

SEQ ID NO: 7687 - DNA, 255 bp, Homo sapiens
tttcacctgggtgcaggcgggctgagtccgaaaagagtcagccaagggagataggggtggggctgttttacaagatttgggtaggtaaaggaaaattacagtcaaaggggggttgttctctggtgggcaggggtgggggtcacaaggtgctcagtgggggagctttttgagccaggatgagccaggagaaggaatttcacaaggtagtgtcaccagttaaggtaaggactggccattttaacttcttttgtggtg

SEQ ID NO: 7688 - DNA, 5151 bp, Homo sapiens
cccagacctggagacctgattgagatttttcgaattggctatgagcactgggccatctatgtagaagatgattgcgtggtccatctggctcccccaagtaagagtgaatagtctattgaaatactgatattgaagttagcaaagtaaatagaagcacagttaattactgtgttcctcagttactgccattctttagcaatgggaccccttgaagcatgactggacctttgcttactgtgtgacagagcttggtctctgttcaccaaaaaccaatgagtgtccaggcctaagagtgatacaagtgtaaagagcgtggcccaagttccctgacctcctagagggccctttgtttaaatacacacattttagaacttgagctccattttgtattgacaaaagttgagcatctatcctcatctttctgaggattccccaaggagggtgcagatgctcacatgttctgatcgtcatttgttttctatagtcctcagacactgcatctggcttcttgatcacctttggcaccttcgtcctcaccttgtctcgctgctgttccaacatgctccttgctgtttcaccctaaatgtagatacagccctcttttcatttctcacagctgcttaacatatggctgagattcaatttgtgttaattaaatcttagtggagatttgatgggggaggaggtgatgatagtagaggaagagtacagcaaaatgggaaacaacttaaaattgggtatctagaactgctggtcacagtggttatctcaggagatgaggcctgataagggttggggtttgggagaggaaggggtaggtagaccctgttgaataccattgaatgcactttgaatgctgtctcctgtgcaggtattgccagttcaaagttgaattacagaagggcactataccaaaggcctttggtcctaacttgttctcagctgtcatccctgtgtcctgtcctcttcctctggcccagtctctcaccatgcagggatgttcccatggagcagagcccctttctcattgcctctcttctctgccccatccactcatacccttcccacttcttgtctcagaacctactcaaagaatgtagaaattcatctcttctttccagactaagtccaggagtttccctcttgtacaaccacagagatacttatcagttatgtcttcccccacccctatcttgctctctgaaaatgaattctgccatttctgctcctgaatgctgaattatctattgccagcttttataaaatcagcagattttcttcaaatttgtaagaaaagatcatggagcatttcttgcccttggacaacttataaagggaagggtatacacattcgcatatcaacatggttgtagcagtgctactttaaatgactacccacccagctttgggcaggttcctgaccctctttcagtctctgtctcatctcagggctgaatatgataatgtagcacctttcaaacatttcttttttcaaagctgtggaaccctgttttcaaacatacccttaatgagaatccccgtatttgagtagaggtcagtcaagtggctgtaggtggaagctggcaggagcaggtgccattcagagccctgcttggctggcttcccctgtgtccctgtggcagcccagagggaggcgtgacatggaaccaccataatcatgtatgtgatagccttttacccatgagctgacacttacatagagagtgctctttacatgtttgtgaagattactgaagtcttctcaggaaatgagactcaaatcctaggacttgggtaggtcagtgcaacacagtctgggaccacatgggaaggtgctccaagagtttaatgagaaagagactcctgtgcgggttgagagcagggagtgaggcgcagggcaaagggcttctcaggaaagttgattctctgcggttctttgattccaacttcccctcttctgccacccttctactgatggtgccaatgagactccaggggaagcagcttactcagagtcttagactgtgctctgctttgctactccttgtatttcccaacctttgtttgtctttggtctccaggtgaggagtttgaggtgggcagcattacttccatctttagcaatcgggccgtggtgaaatacagtcgtctggaggatgtgctgcatggctgctcctggaaggtcaataacaagctagatgggacgtacctgcccttgccggtggacaagatcatccagcgtacaaaaaagatggtcaacaagatcgtgcagtacagcctgattgaagggaactgtgagcactttgtcaatggcctcagatatggcgtaccccggagccagcaggtgtgaccccatttgctctgatgatggcttcttccagagctttcttggggtttgtcatttcattagtgatcagaatggtaatcagggctttcattatattattcgttatactagtagggccttctatttctgcaggactttatggttcaggaggtattttcacctttattaacccagggaggagtagaaaaggcactgggctaatagtaagaccagcgattggagccccagctcaactattaactagaggggtatccttggtcaaatcagtatatttctgaaagcttttctttcttttctttttttcccctctttctttggagacaggatctcactctgtcacctaggctggagtgtaatgacataatcatggctcattgcagccacaacctcctgggctcaggccgtcctcctgccttagcctcctgaatagctgggacttcaggtgtgcatcaccacacccagttaattttaatttttttgttgagaggtggttttgctatgttgcccaggctggtcttgaactcctgggctcaagtgatcctccacttcgacctcccaaagtgctgggattacaggtgtaagccaccgtgactggccaaagatcatttcttccttaacaaagcagggatatacacgaagcagatactctcttgataaaatagcgacccagtactttgtgggccacatattggagacacacacacacacacacacacacacacacacacacacacactttttgtttgaattacttgccaatatttaaaaatatagaaattttatataaaaagatgtaggttctcagcttctctctctctctcttttttttgagacagagttttgctctgtcgcccaagttggagtgcagtagtgcaatctcggctcactgcaacctccgcctcctgggttcaagcgattctcctgcctcagtctcccaagtagctgggattactaggtgtgcgccaccacgtctggctaatttttgtattttgagtagaaatggggttttgccatgttggccaggctggtcttgaatgcctgacctcaggtgatccacccgcctcggcctcccaaagtgctagattacaggcatgagccactgagcctggccctcagctttctttttaacatacaattgatcaggccactgggctggcattcctacttgctgacactctgtagggacatgctgtggctttgcaggggataaggggtaggtatgtcacccacctgcctcactcacattacctgcctggcctatactgcatttggctctgtcacttcctcccatatagagaagtaataaattcatgtagttcagtgcatgtgaaataactttgaatcctaaatgtatgtgaaaacttgggctattcatgttaataggtgatccttactaaaactccatgagatgagcagagaaagcatttattatcactactcccctttttttttgagacagagtcttgctctgtcacccagactggagtgcgatggcgtgatctcggctcactgcaacctctgcctcccaggttcaagcggttctcctgcttcagcctcccgagtagctgggactccaggtgcacgccaccatgcccagctaatttttgtatttttagtagagatggggtttcaccatgttggtcaggatggtctcaatctcttgacctcgtgacccacacgcctcagcctcccaaagtgctgggattacaggcgtgagccaccacacccaacctattatccccctttaaagagatggaaaaaattaaggattaaaagaagaacataattattctattttttttctatgtttcttctgttgtctaagcagattgggctcacattccaatgttagtctctgcttttgccagcccatcctcagtgaccattggcagcctccctgctgtgccctttactttctgcaccttcctcctctctgctctgcatcctctccagcctgcactccattcttgtgaggcttttctctagtgtccggggcttggtgggccctggtgtgagaaacctcccgtcccgtgagaatttgcacatgaagaccccaaggactgagggcattacaagaagtcctctgaagaagcttgggcctaggagtcatgaggcccaagaacccaagagctaagtttggacatgaattcactgtatggctctgtccaagtgagttccgctccctggctcttggatcccctgtttgtagaatgagggcctcagtggctgtggtgctgtgagatcctttgcctctgagccccacactggaagcagaccctgggccaaatggcacagagggaggaaggggttgtctgtctccaacaatcctggcttttcttggtctcttgtcactctaggagttttgaaaatataagatagcatggactgcttcttctcttgggaatagactccagacaggctggttgctgaatgggtatggtggggtggaggtaggggagggtgcaagcctaggattggtactgattgtcctgtgaactgatgtgctttgcaggtagagcacgccctgatggaaggagcgaaggctgctggagcagttatttcagctgtagtggatagcataaagcccaaaccaataactgcctgaaggtgatgaaaactccagctagaggaagagttactgacacaagcaaaaagaacatgcttccttcccttgccttctctcaatggctccgattaagaaaattgtgaacttctggaagaatctacaatgtatccaattacccttccagaaatacatccaatatatacgagcatagacccacagactctcaggatgggaagga

SEQ ID NO: 7689 - DNA, 12970 bp, Homo sapiens
gcagtcaccgcgcagggcggccgcccggaggtagctaccacggcctgtgtcaacgactaaagctccagtacagcggcgccctcagacagctgggagggtggctctggccgggagcggcggccggtgagctaccgcgaggaggagcggcggaggcgacctcggcccggccctgcactggccgcccggcaggcgcgacatgagcctggtctggcatccgcgggatgctccttaagccccttctccggctgttaacctccggggaacggttgtgaccacaccgacacgtattttacagataaatcattcttgcggcggcgggtcgaacacgtttatttattttttattttctcaacaagcttttacccagcacctgtccagtgaaacaacttgataatcgtttcgaggggcgtccgccgggttaggaagccactgcctggcagcttgtggaagcctcatttgcaaagccacccctcagatgttttgaagatcgtgacgtcttgtaactagcagtgtgtgcacagaatcctactcaaggaacgtcttggcccagcgatgcaaagaactgaagtttcaaggttttatgtctattgctggatggtcggggtagccccagtaactgggaactgctccgcagtccgctcacgtggacccctgtgggaatagcaaggtcaggacatgcccttctctctcctcttccagcctgtccagtgttttccttaaggaagaagccatcagatgtcattgcttctgcaactcctgggttagaggaggagacagaacaagcacaaagaaggggagggcagggtggctttggtttcttgaacagtaatttcctcagtcgtccttattcatgcagaatagtttaaagtccctgaagatattcccgatctccagccgtgatcggaggccatggatactggagtgtctctggagtgacctgattcacccagccctccttctaagaaatgctgtccttctcctctcccctgactagacagtccttgcttcacagcggtggattttctttcgttcccgttcactttcagggatctccccgttaaccagtgaaactgtacatttgttttacagtttgtttactaatgaaaacaggtaacagccggagttggctgacattggaaataggagacaaggtaccttctgcacttttggctattgtactcggctcagatggagacaaaggttgggtacagaccatatctcagtggccacctgagcctaggtgaaaagaattgataggagaggtcaggcctggtggctcacgcctgtaatcccagcactttgggaggctgaggcgggaggatcactggagcccaggagttgaagaccagtctgggcaacatggcaaaaccctgtctctacaaaaaattagctggtgcggtggcatggcacctgtggtcccagctacttgggaggctgagtcaggaagatcatctgagcctaggaaagtggcactttcatgcactcacccactgcactccagcctgggcaacaatgagagaccctgtctgaaaaaaaaaaaaaagtgatagagcctagggggtgtttgtcagtgttacctcttgtctctcactagagggagttcttgcttttaggcagcccaaatctcacaggctcctttgcttaggaaaaagctaccttatctagctttcactgggtagaattaaggcacccatacttaggtgcaaaaggagcctttttttcctgagtgctacttcacgtatttttttgtaggcacaaagaaacaaccatttagctaggtcaagtaatggttctaagttcttttgctactgtgtgatagcagtataacatgagagttagtgttggcctctggagccaggctacttgagttcagatcccatctatatcacttactaactcttaccttgggcaggatacttaaacctctctgtgcctcagtcccccatcttgaaaatggggataataatggtacctactgcatggcgtgtttgtgagttaacacatgtcaagtacctagaacagtcccttttattccatcacatgggttgggaggtgaagtgcaccattgccttgaccctggggaacttgataaccaaatacagaattaaattgcttaccaaaccccatttatatttatagctggaagagcctgtattgtcctcacaatagtatagaagaattcaagagaggagagagagacagcaccgaatgaagactgtaaaagaaaagaaggaatgccagagattgaggtagaagtagttgacatagggaatttgggagaaattgtccaatggcctgtggtataggctgcactttttgccccctttgtcgtagtcttgggggttgaggttggacagtgtggaagcacacacggagctgggagctgtcatacctgtcttaccagtgctgtccctagtagcaaagtgctgactctggaaccttactacccaaattcatatcctagctctgccacttgccaataactgtgacagaaggcactacatttctttatgcctcagtttcctcatctggaaaatgtacataataatggcatgtactttttagagtgttctgtagattcattgagctactgtagattaattgagccaatacatgtaaagtgccaagaatagtgcctcgcaacaggaaatacttttatcaattttggttcatttcagtatgctttgtaaaggtggtaccacctgagattcagagtagttggcagaagaagcagtaaaaaagtaaaagagggtttgctcttgcattcattcagtcaacataggcagtacaggcactggggagagaaagatgcttacaatccggttcctgccctcaaataactcagtgagtatgttttgcacttaaaaaaaatatgaaatatggccaggtgcagtggctcatgcctgtaatgtcagcactttgggaggccgaggcgggtggatcacctgaggtcaggagttcaagaccagcctggccaacatggtgaaaccccgtctctactaaaaatatagaaattagctgggcgtggtgacaggcgcctgtaatcccagctcctcgggaggctgaggcaggagaattgcttgaacccaggaggcagaggttgcagtaagctgagatcgcaccactgccctccagcctgggcaacagagcaagactctgtctcaaaaacatatatatgtgaaatatgaaaagaagctgatgtcttaggctttagatatgttggtccttcatcagacccatgaatggcattttaagagaaatgttaaaaaggttatcaacaagatccccaaagaacaccttgtgcttcttatttctcttgtatagaaaatctgccaagactaggagggtaacccagaggaaaccgtcttcagggcctggtaagaaagactggagcttgtgttcgcccactgcctccagccctcagcaaagaaggccacctgtgtggggcagtatacttgcttcttctctctctcccagccctacttccttcctagattctctaagatcttgaggactcaggaactgccattttaaattaccatgtctgaagttcaagaaacaagttattaaagtcactttagaacaaaacaaaaccaaaaaaaaatgaagtgagcagttgtggccaactttttcattgtaaccagaattatgtgacagactaattgataccacataagacctcatcccaaccttcctccttgccaaaatgacccttttcctagtattctactccttcctgacttagaggaatggttacattctcacccttctcttccattcttaatggtcaatttgagccaaattctgggtgtcctctcttccagtttgctggctatgccttcgagaacctggggatcccgaaaaattaggggaatttcttcagaaagacaatatcagcgtgcattatttctgtcttgtgagtatgaggcctcctttgctttgaatatcctatggcttttggtgtactgactgttctctgttacattcatcctcatatccacagccttgtttttttatttttcttaatagcttttttgttttaaaatctatttttaggctgggtgcagtggctcacgcctgtaatcccagcactctgggaggccgaggcaggaggatctcttgaacccaggagttcaagaccagcctgggcaaccttgtctctacaaaaaaattaaaaaaaaaaaaaaaaaagctgggtatagtgacaaatgccactccggaggctaaggcaagaggatcgcttgaaccctggaggtggaggctgcagtgagcagtgatcacaccaccacactccagcctgggtgacagaggaagaccttgcctcaaaaaaagaaaaatatatgtgtctggtataaaatcttgacagtataaagtaagttcagtaaaaaagtctcttccctaaacaatgttcccaatccttctccctctccccagaaacaaatgctgtcaaagttgtaacatccttccaattgctttttcccagtatttttttattaggtataactttcatactgtaaaaatcaccaatttttttctttttttgagaacggagtctcactctcttgcccaggctagagtgcagtggcgtgatcccggctcactgcaacctctgcctccctggttcaagtgattctcctgcctcagcctcccaagtagctgggattacagacacctaccaccatgcctggctaattttgtatttttagtagagacaggtttcaccgtgttagccaggctggtcttgaacaaaattcactaattttaagggtccagtttgataagttttgataaatgtatgtccccaaataaccaccaccccaatcaaaataggtaatattttcatcaccccagaaagttccctcctgcctccttttccagtcaatcccactagacgtaatcactgttctgatctatggattatttttggctattcttttacttcatataagtgaaatcatatagtttataatcttctgtatctggcttttttctcccaacacagtgttttggagattcatccatgttgttgcatgcattcatagcttgtgcctttttattacttggtagtattcggttgcatgaataagttactatttgcttatctgttcacctgttgatgaacatctgaattgtttccatttgaggactattatgaataaagctactttaagcattcatgtacaagtctctttgtgaacatgtgctttcacttctcttgtgcagatgcctagaagtggaattactagttgtatgctaattagatatttaactttatgtgaggttgccacatcactgtccaaagcggttgtaccagcttacactcctaccagcaatttataagaagtccagttgcacagtattcttgccggaactttgttttgtcagtgttcttaattttagccattctactgggtgtgtattggtatttcattgtcgttttaatttccatttttctgatgactaaagcttcttttcatgtgcatattggccattcacatattttctttggttttttggtttttttttttttttgagatggagtctcgctctgtcgcccaggctggagtgcagtggtatgatcttggctcactgcagcctccacctcccgggttggagcaattctcctgcatcagcctcccaagtagctgggactacaggtgcctgtcaccacgcatggctaatttttatatttttagtagagacagggtttcaccgtgttagccaggatggtctcgatctcttgacctcgtgatctgcccacctcggcctcccaaagtgctgggattacaggcgtgagccaccgcgcctggcccggcccacatattttcgtttgttaagtatctgtacaaatatttttacccatttaaaaacactgagtggtggtcgggcacagtggctcacgcctgtaatcccagaactttgggaggccgaggcgagcagatcaagaggtcaggagatggagaccatcctggctaacacggtgaaaccctgtgtctactaaaaataaaaaaattagccgggcatggtggcaggcgcctgtagtcccagctactcgggaggctgaggcaggagaatggcgtgaacccaggaagtggagcttgcagtgagccgagatcacgccactgcactccagcctgggcgacagtgcaagactccgtctcaaaaaaaaaaaaaaaaaattgagtggttttattattgagttgtaggaattgcttatatatttcagatacaaattctttttcaaatatatgtattgagactattttcttcctagtctttggcttgccttttcattttcttaatggtgtctttcaaagaacaagtttgtaattgtaatggagcccagtttatccatttttttcttttatggtcagtgctttttgtgtgttgcaagaaatctttacctacccatagaattgccttggtgcctttgtcaaaatcaattgaccatatatctgtggatctggataatctatttatgtcattgatctatgtatctattcttacacaagtccccactgtcttgattattgtggctttatagtatattgaaattcagtattgttaagttctacaatcttttccaagattgttttgactatcaggtcctttctttataaagtttatattaagcttgtcaatttttctttaaaaaaaaagtctactgggattgtgattgggattgcattgaatttataggtcaatttgggaagaattgacaaaaaatattgaaccttccaatccatggacatggtatatttttccacttatttgggtcttttaaaatatatctcagcaatgttttgttgttttggtgacaaagtcttgtacatcttttgttaaatgtattcctaaatattctgtggttatgctattgtaaatagtatttttatttcatttttaagtttattgctggtatatagaaatgcattttatttttgtatattgatttgtatcctgtaatcttgttaaattgagtttgattagttgtttttttattttgttgtaaatgccttgttacaggattccctatgcacataaccatgtcatgtgtgaataaagacagttctacttctttctctcaatctttgccttttatttcttcttgccttgttgtattggctaggacctttaacctaacattgaatagaagtggtgtgagttgttatccttgtcttgttcccaacatcaggggacagcatctagtttttcactattaaagtatgttagctctaggtttttttcatagatgtttttatcaggttgaagatcccttttattcatatatagtttgcccagagtatcatgaatgggtgttgaattttctcacttttcctgtatttattgagattatcttgatttttctctttaattttgttaatgtagtttgttacatcaactaaatgctctaatgttaaactagtcttgcattcttggtataaactctacttggtcatgatgtattgtcctttttatatggtgctggattcagtttgcatctgttttgatttttatatctgtgctcatgagaaagattggtctgtgattttcctttcttgtaagtcctatcaggtgtcagggcttagttataattttgatgtatttacaagcatatacattttttacataaaaattaaacattatacagagtgctttgtatcttggcttttttccatcatatatattttggaaatctttctgtatagaacatatagatatagttttttctttttagtagctaatttattaaatcaatacatgcttattgcagaaaacatgaatgatacttaaaaatatgaagaaaacaaatcactcatcccaaagccctgagataattagttttaaaatatgtgtttcaaaagttcaattccttcccccataatacagaacaacaacaatcaagagatattaaaaccctgtttttcttcctgtattactctgagaagagtattttctctgtactaagaggtgatgcagcaggaagggtaagaatggggattccatgggcctgggtgtgaatagccagctctgctcctccttgtcctataaccctgggaggcagtgtcacttgccacactgcacctcagcggcctcctctgtaagatgagcatcataatagcatctgccattacaggaatttttttttttttttttgagacggagtcttgctctgtcgcccaggctagagtgcagtggcctgatcttggctcacttcaacctccgcctcccgggttcaagcgattctcctgcctcagcctcccgagtagctgggattacaggcgcgcaccaccatgccctagtttttgtatttttagtagagacagggtttcaccatgttggccaggctggtctcgaactcctgacctcagatggtcagccctcctcggcttcccaaagtgctaggattacaggtgtgagccaccgtgcctggccaaggattgtaagcataaaatgagtaaatacaaaggaaatgtttcccccaaagtcccagcacacaatagcagccctcagtaagtgagaggcagcctagagcaaaagtaagagtccaggttccagagttctgtggccttgagcaggtcgcatcatctctcctataaaatgaggacaataatagtacctacctcctagggctgttgggaggactcaatgagttaatatttgaaaccacttagagtattcaacacatggttggtgccatgtaagccttcattaaataaattaccctgtcaatgcatatatattccaccaagctctgttctttttttttttcttttttgagacagagtcttgttctgtggcccaggctggagtgcagtggcacgatctcggctcactgcaagctccaccctctcgggttcacgccattctcctgcctcagcctcctgagtagctgggactacaggtgcgtgccaccacacccggctaatttttttgtatttttagtagagatggggtttcaccgtgttagccaggatggtctccatctcctgacctcgtgatccgcccgcctcggcctcccaaagtgccgggattacaggcatgagccaccacacccggcccaagctctattctttagctctcttaccctgtccttctcctcacctcactgcactgtttcactgatcatcattgttaacagcctggttctactgcccccgcagatcttatctagtaagctgcctcagaggggccagtccaacagaggcttccatggatttctgcctgaagacatcaaaaaggaggcagcccgggcttctaggaaggttagaatctcttgaaatgaggaccttggggtaggcctcttttcatacctcacccatcattcctgtttctgttctcttccctacttcctagtttagatgtcaaaggactcttggattttccaactagtccttaagtcccatattcctctggggtatgggtgtcctaagtgagaagagggagaaacatcttgagaaaataggaaagaactcagtgctgcttgaagctcagcttccgggtgccccagagcattcaggaccactgaagatagggaatggctattatttcacaaaacttccatttaatagaaagatgtgctacactgtgtgtgtttgcatttcttggggtcctgagcactgtctgggaactcatttgcagatctgctttgtgtgcaagaaaaagggagctgctatcaactgccagaaggatcagtgcctcagaaacttccatctgccttgtggccaagaaaggggttgcctttcacaattttttggagagtacaagtgagtgagggaagggaaaagtctggcttcctttttgcaacttattattcagccactaatgaaatcagagtccagttctcacaagcaggcctgttttgattcaccagtgaatctgtccctccattcagtaataagaaacagtgtcttgacttggagatttcacagggggttcttcttgcttcctgacccctccttaaattacaaacagctggggttcttagacagctgctcagcactaagtggggctttcaggaacgagaggctatggagacagtcctgggaactttgctcagtaggtgagcagccgtgagaaggcatgtggcagttcttcactctgcctctcctcttccccatgtgtggaggttcactgggcaccagcctgggtggctggctgcccctcctagagcgggccattgggaaactacatcaatgacaaaccagaaaccaagtctgtttacctgccacagatcattttgtgacaaacatcgcccaacacagaacatccaacatgggcatgtgggggaggaaagctgcatcttatgttgtgaagacttatcccaacagagtgttgagaacatccagagcccgtgttgtagtcaagccatctaccaccgcaagtgcatacaggtggggctttttccgccctgggtcccttccaccattgccctagttctctgcctggaaccagagaaccctgggaatgctcaggtgtgcctcagctttggtgctccatgctggaggcctgtattgagggctggtttcaggcagttagaggaaagtcagtccagtctgtggtcattcctggcctataggacctcacacatgataagatttagaataagcaaaatcttcagcattgctagagcaaatgggctcatcccagaatgagctgagaagcctctatgtcagcctcacttcctgggatgaaagaaaagggaaacatgtatccaggtggctgacccctactcagtactgccgagccccatggtcagagatgacagctgaggcactcctgggaattctcttgaaagtattttggtcccaggtctgacacctggatttgcagccctcaccctagcccacccaaactccttttcctgtaccctcaaactctcttagcaacatcctctttgtaggggtgagggtgggaggagaaagaaggtagtcaaagggtttttacaaacacagagctcttccctgtttctcttacagaaatatgcccacacatcagcaaagcatttcttcaaatgtccacagtgtaacaatcgaaaagagtttcctcaagaaatgctgagaatgggaattcatattccagacaggtagtgggaaccccaaagcaggaactgagccagggagtgggttgcctagatttctagagaggaggtgagtgagaggatagttcagagaatgagagcagcagaggcactgataagaaggaaggggaggagggagtgcttttcaattatcaaaacagaagggagggggaagaagtttgcgggggaatggggtgcttgttgctgaaaagggcatttggggaatcagaattccctggggggttgagttattggattccagagtggaactaaggaacctgcatgcatgttccattcatcctgcttcaaccctctcccactgccaggccacttggccagccttgttggaagtgttcaggcagcctactgaactcttgctgtgcttagcttgggctcttcctaactcctccctgatggacaaaagtttcaccaacccattatgttcttattcactgtttcttctcccactgcagagatgctgcctgggaactcgagccaggggctttctcagacttatatcagcgctatcagcactgtgatgcccccatctgtctgtatgaacaaggcagagacagctttgaggatgaagggtaggggaaggcttctggctagaaagagctctcatcagtgctatcttagagttagaccttggcacagttattagaagtaagaaattcactcttgtatgcagaccttaggataaacacgattgctaagtctcattcttgaccagcccgactcacttgtgtgcacgtgaacacgtctcccctgcaaggtccgcttcaccttgtgcccagtggagagacattcagagccaattcctttcctaatctacctttcaaggggttacgactgatggcaggcttctgggatcagcactcatcctctctgagccatacattcatcttgggtaaaatgtgctgtaaaaaatgcctggcccatagcaaacatccaagcatggcagttggtgttctgtatgtctccacaacccttcctgggctcttcctctaggaggtggtgcctcattctgtgtgctacatgcggatcccacggaacccacagggactgctcctctcttagatctaacagtaagaaatgggagtgtgaggagtgttcacctgctgcagccacaggtgaggctggagggatgggccggcctcagagcaaggagggggctgtagggacttgtggtgcctgggaaaggaggaagacatcccaccagagggggattaatagttggtgcctttgactttggaaggaaagtagctagagaggagcttaaggacctgtgcctgggagaagcagaggcttgagttttcctctcctgcctttctctcaccagactacatacctgaaaactcaggggacatcccttgctgcagcagcaccttccaccctgaggaacatttctgcagagacaacaccttggaagagaatccgggcctttcttggactgattggccagaaccttccttattagaaaagccagagtcctctcgtggcaggaggagctactcctggaggtccaagggtgtcagaatcactaacagctgcaaaaaatccaagtaacaccttctgagtagctgctgtcccacacaatagggtatgaagctgcgctcctccatcgggtttggggagggagcactctgggactgtgagacaaggaagcagggccagcagtgagactatgagccaagcaaagagaagtctcagtggagcatgaggagggagcagtccagatgccaacaaggaaatgcgtttatggctacaagagtgcctctgctttctcctcctctcctcccaccaaggattcttccaccttaatcttgttttcatatgcctcttcttacttcacccatgtttgttgttatgcaaataaaggttttctctcca

SEQ ID NO: 7690 - DNA, 8984 bp, Homo sapiens
gagggttcatttctcaggagattcttaggagagttttattcattcattgatccagtatttacaggggctagaggggtcaagctgtgctcagcccagaggcagctgccacacttgccagcaccccccactcagtcactatgtacagataaaggggcctgcttggatcacctttttcaaagccatctggcagaggccatggggctgtgttggggcctgggctccagaggcactgctgggcccattaccccttggcatcaggtcctctggaacacaggggctccaacgggttgtcttgatcctgctgtcccccaccctgagtgccttgcagaggctgaggaaactggagtagcaggaagagctgagtggtgccagcttcctataagcaaccctgtctctgctacccctgagagggagacatggtaatactgaggggctggacagaggctcttctgagcctcaagcgccagggacagagacctagagcccaatttaggcccatagctagggccacaacactgaaggcgaagagccctagaaccttgctatggagagcagtcttgaacagcctggctagaacaaggaagacagttcacaggccactgaacagttcccacatgctctgctcaggccatgggatcccagcagcctgctcaccccaaccccactgggacaccctactcccaacccagcccagtgctgggtccctgagtttggcactctcctaagaggaatgaagagagaagacctggcttccttacaacagggacaggctggtggctggggctagagcagcagggcccagagcccagggcccacccaggcccccagctaggaccctgtagttgagaccgtggcatgatacaaggacctgggcccaccaggacagctcctaggagagaaagcatagtcaggtaggaacttatgtcaacatggtggcatgttgggttggagcccagaaaaatagatgtctctgataggtaaaatatatattctgctgcccaggcagaagggccaggtcctgctgctccacagccggctgtggaggaagctgcagtacctcgctgtgccccaactccagatgctgcctcctgagcactatggggctgatctgccgtgtcaggcctcagggcacgatggaaggaatgtggcctggttcctcccattcccagggcctggactctccagctgggactattcagtaatactgggaaaaggggaagtggggcagggaaggaccctggtgagggccacacggcaagagtgggctgcagagtcagggccagcagtcctcactggcgcttggccttgtaggggcgagagcgtttccgccggtcaggcttccgctgcttgtggagccggccgatgctgaccccttggcgccgccgcacggagatgttctgctccactaggttggccagcatgcctgcgaagaggtagagacccttgagcaggtgctggctgcctcaggccaggagctgaggctctcatggccctccctgtgccccaaggtctgctcaagcctcaggagaggccaggggaggggagctgaaggacacggccctcagcagggcattccagttaagacagcagcgcatcccctcaccttcctgagccagcatggagataaaggtgcagatgaactcatcgtagttgtgggtccttctctggtcatcaatctgtaggagagaagaagactgagagcactggagccaatcttgccagagcagccaccagtggacctcgggagaggccagatcaggcaactggagaaatcacccaccttgaacttcttcctcttctctacctcctccttgaggcacgcctcatagtttgcaatctcagcctccacacacttcagcagtgccagcagctcctgccaaaacccagcattgcacctctgatcggggcgggccagcaacaaagccccacgagcaataggcagctagaggcaaggatgagcagcgagtccatgcctatcaaggcccctgccaccacccaacccagaaagtcttctggcacatggctccagccaccaatcttcacaccaaagttccaatcaagaacttggcacctgggcaggaggagctcaggccttaccctctgccaggattaaaggagaaaaccacaacggaggctcaccttgggtgagtatttctccccactcaagggctcgccaggcctcaccatccccgtcttctctctgctgtccgtggcttccacgacctccttctccactgggctgctggacccctggctgccttggattggtctgatggagggcgaggaacccttcccaccctctgggaagagaggtcacaagaaaatcatcagagtgcaggacactttgtggtcacttggccacttccctcctccctcctgggtgcaccaagtggccagtgagccagtccaaggcccacctgtcagcgccaggggactcagcaccccatcctcagccaggtgcagcaggcctgtgctgatgacaggacccagatcacggacagcacggttgtagcgtatgcagtcaacacgcagcaggctgtcatcctctccaaaaagcaccttggagatgtgggaggtgacagggctggagggccgcgtcgggttggctgagcggataggcgagcgcagtggcgagttgaaagcactgccgatctcagaggccgtgtctgtactctcattgctgggggtgggtgagggctgcgagtgtgtgggcactgccacagccggactcccagccccgctgctagtcttgatggacagaggaattgagaggtccttctgggactctttgagcttctcagccaagacgttgatggtgttgggctgcagcactgacagttgcccatcagcagaaccgctcaatgcccctggcttccctgttcccttccccttatacctgtggggcccgagaagatgtgaagcaagggaacgggccaggtgaccatacccagcagtacccagaatggcttaaatacatcccgacctccaggggctgaccctaaaactccttatacttggtccaagcaacttgaactagccatgctaagcctggcatcaagttctgacagctgcagccaagtgtcctcaaaagacacttcctctattccagccatcccactcctggccttttgccaatgccctgtgttccagcaaagctgcctccccaccacccacatctcctccatccctgccccaaccaatccttcaaggcctggctaaaaggccacttccaataggacatgatataagcttacgtgctcagccttaccccccagcccaccaaaaacttcctggggacctggggtcagccccatcatgccagcctcccccagggccccaaactccgcaggtgctcaacattatctgctgcagggcattctcagacacagactgagatattcaggatgggatccgaagcacctagaacctggtagccttagaaagctgggctgacctaagggcagagttggtgttctgcacgtcatcctcctcgtcatcctcatagtcatcctcatcatctgagtactgctggggtgggcggactggaactcggctgcggcccacacctgccgccaggtcttcttcctcctgggacaaagaccagggcagttacaaacaagtgctgctcggcccaggctgagcctagacactcacagccagagagaaagccaacatggttttccagactgagtcagcggaacccctccagctgttccatggcctgtccttggcttgtggggaggctgccacccacttacactggatagaaccccacggaggggttttaagagaaacagagtgccctgaaacacatgcctttattttgccagtaaaacccaacccatgaagttgtaccaaggagcgtgacctaaacatttaatcccacagccacgtaactagattaaattcaaaggagctctccctgcctccctaagctcctgctgttgtgggggccttttcatatcaggcagaggaacctagcaacccaggcccaggcagcttgacccagccatgccaaggatgaacaccaaggaaccacatgggaaaattgcctgttgcagcctctcaagagaatcaagtagagaatcctgcaagggtgctcccagcttacctgcatgggggacttggcataattgtgattgtctagaaaggccggcagccgctggacaatgggagtggggttggggtgaaccccattgaggctgctgcctggaggcttcaccactagcttgggtttgttgggagggctgtgggatggggcttgtgcgcatgaaccagccgcctcctctgcaccatctgagacagggcaagaacacaggcaggacctccagtaggatctccaagaaaagctcacagtctccccggccctgtgaaccagcacttcccagagaagaacagcccagccagctggtgcaatgggagtcagcaagctctaagtcatgatcccgcaatgagacagggcaaagaatgagatgggaaaaaagaagcaggaagaaaaaaaaaaaaaaaaaaaaaaaaaaccgcctctagagaaaacaagaaagggagtgtacattacagagaagggcccaggggcctgtggtaacagcggccctttacaggtgcctttctttagggaaggactgctctccctctaccttctgacgggggaagaacactgcccaaggacatccccagaaaaagactttccctgtttaggcctcccatgtcagacattagcgggtggctctgaggtccacaagaggtcccaaaccccccagtacctgtgtggttgccctcagaggctgcaggggccctgtttgcttccagcaccagcggggacttgttgctggctgacttggactcctcaggcagctgtgactcttgagacttgtgggtctgaatcagctctggctgtgttactcttatcagctaacaacagaatccagggctcagaggagaaagggtagacccgggcttctaccttaaatagctaagggctgaggacctaaaggaataatggccttggctctacccattcactcacagggaaataaaacacccaaacccaaacttccttttagaagctattctccctccccactccaagtcccacctttcccacaatgggggcaaagaaaagatgtggttagctgaagcccagatctacaagagagtatgttcacgaatcagagacaaatgctgtgggggaagggaggaggaatgcagggagggttgggctgggcagaggccaggaagaaagggcacctacctgctgcagagcctctagtactgtctgacggttcaccttcagcacatgcagcctggcctcatacttgatcctgcggtcgggcaccactgccatcaggttgaagcggatgtcgtggtagggctccctgcagtcacagccgcagccgtgagagcagctcccgccccggccccgccatcaggttgaggcagatatcctggcagggctccctgcagtcacacctgcagctgtaggtataggccccaccccaacaggcaggcagcgactagccatacatgccaggcacctgagctggtaccttccaacaagctgtatgaggggcctatctggaagtgaaccagcagacctgggctgcctaaggctccactgaggcctgcccctcccccagcccacccaggagcaggccacaggcagcccaggcaggaaataagacaacaagttgagaacccatgatctaagcctgatcttgccagattcaccatatggccttgcaatttacaaatcacctggatactctctgtccctcccaaagtaggtacagctccagagagtagaacagggcaggcacagggcccttaccctgcagtggcgaggccgatacgctccatgatgacccgccgggccttgtctgtccactcctcgtcctccccccagggccctagtggagaccaagacaaggaatcagcgagaaggaaaccctgagtttgggcaggccaggagtgggaaggaagacagagaagagcagttgagccagggaatcaggagctggtcgggcaatatggtgtagggtgaaaccccagccagagccgggtgtcggtaccgacaacccctgccactgggtaccacataccagagggccctgagccccagctccctaggaggtaggcagagacacccaacaggcctccagctcatggtgcctaccatggtcaatggggtagaccttcagcccatccagctcaaagagccggcctgtgataggcacatagctgacaaagtggaacgcctccatggtccgcactgcactaaggccattctgcttctcagggaggtggcgtggctcgggcctggggaaaaacagagtcagggcccaaaaaatgatactccccctactcccaccccacatcagctcccacagctcccacacacctggcatggctattatgggccttggccaactccggggcattgccaatcgcatatcctttgctctacggggaagaaaataaggccgtatcagaataatttctcctcaggtaggactatgggtggaaggcaaagcttcagagagcagcctggaggcattccaggaatcggaaggaacacagacgaactttctttaaaggctggtgggggcagaaaagagctctggagccccaaagagatggactgtgctggccttgcatggtaattagtggacactaggaagcaacatggcctgagaggaaaagtcctgacagagaaggttctgacatggtctgacttaaggaaactctcctccctccctaggcctgtgtcctttccccgcaactgcatctaaaaacaatggccttacacaatttatttaagagtcaaatgtaacataaacaatcatttgaaaaagaaacagcctaatagtacccaatatcatgtggtagcattcccagtggccctcagggtcagatctgcccagttggctgtgagccaggatgaaggcactgcagcctacctcagggctgaaacccttggtgaagtccttcatgcgactcagggtgggtcccaggtccacgctgctgcagttcaggagcacgctcagcaaggcatgagttgcacaagagttgggtatcagctgtgaaaccaagaatagtcacccatacacagcacccctcactgcaagccccaagcccatatacatcaagaatggggatccagagcaggtcagtcatatctggacaactccccttctcagctcctttcatctttgcctaatgtttattcatttaacaagcacctaccaaatacccactggatatctgaggacacagagagtggactcagacaccctcctactctaaagctgttccctttaatgaattaagagttcagttccttctgccagaggatttctgtagctaccacccctagaatctgcctatctcctcctcctgtcttcctccatttccacttcccaagcaaaaacatggcagcatcccaccctccaaacaaagcacagagtccagcagacctggtgggcaaagaacatgttattcacaatatcatcatcaatcacggacgtatcatccaccaaggtagagacctttcgccgggaccggcgctcttcgatccatttgaacaggaagataaatccatatacagggctgggggaagtaaggggcagagccagatcagccaaaggggagaagacaatcagcattcccttctttctcccattaatcctttgcactgcgtcatcactcaggtgtccttgctgtgatcccccctctcccctggcttcttcccaacactgtgtctgaagtggccttgtgccctcacacaccaaaggcctgccacaggcagagcaaagcataagcctctgactgtgatgctccaggagtccacccagtctccttatgaagtctatagttctgggtaagagaagaaaagctggaactgagggccaaggatgggacagggtaggaacacaaagtaagacaagaacaaaaactctgatgaggaactgaggcactccttctcacttgtgggccccaatgcagtcaggaaagcaaatgaacacccacaccagtctcttttgttccaggaaattaaagtagacttcttggttcagtcacggttgctactgttgctactctcttacacatctattctgcaggaccactgggaaaagactctaagtgtgggcacccaggaggggccttgtcaccccaaccaatcaatacaggatgactttgtgtcaggattaaagccaaggacacatgggcacactaaaattaatacattacacaactgcacaaaaggcattgtgtgaccggggtcttcccgctgcaaggccaggaaagcagctgaaccaaaggatgcttaggggtggggagggggctgctacaaaaagggaagcgctaaggaaagtttgggagaaaagaaagtatcagtttgatcaggagcgggcactcagagagcaaggctgctgctttctgtgagattttacaacgtagggttcctggcactgtcttccctaaggggccctgttctctgggaccttccccagcactctgggtgtaaggggcagccctggtgtacagccactcacccctgacatttgctctgaaggtcgtagatctcctccacttgcacccccttgacacctgcgatgaggaaaggaaagcagtagggaaggacagcccctgatgagtgagggcgcaggggtgggccgccacagccccggtccggcagggagaaaaggctcttaccgaaatcttccacgagcagggtgaagaggcctgggtggggcgacaagaggagggggtgatggtcaggcaggcgcgtcccgggcccatccggcctccccagcccctggccctcccggtcccctcctcacctgggtcgctctccagctccagccagcccttattcatcttcccgcggggcggcccctcagcgccatgtccaggccctccctccccaccgctgcccccaccgggagcccccaccgcccccggggcccctcagtcccacacacaga

SEQ ID NO: 7691 - DNA, 1187 bp, Homo sapiens
ggcttgtttgaggtgaacaaactaggaagtagtgtagctggtcacactgtcttccagactccatgcccctccccgcccccattctccagggtttttctgtaaaccttacattctgccttctacacacgcgcgcgcgcacacacacacacacacacacacacacacacatccctacctggagatgcccatgggaaggagaaacaccctcattactttctatatccaggcccactgctcagtgtctttcagagcccaccacctggcttcttatagggcccagatctgggcacaccattcttacttaggctgcttgtacctgtgctgtaggggagagggagttggctgtaaccaggcaaagccaggcagaaggagtcatgcaggacaggcttgaagtgggcaggtgagtctccctggctagaatccatactctcctaggaatctcagtcttcctctgcccccatcaccccatccctgggagtgggggctgcacaagctcaacacacatcctgtaggctgctggtcagagctcctttggagacttaagttacttgagaaatctgacagttcccccctggggctggctggggaggaggcacagactgtgtggcagggctaggactagggtgaggcatgtgaggtgccatatttaaggaaggcatctgctctcagctctgtgtgtgatcccttaggttttgtgccgtgggcatctcactcgcctcaccctagtcccagctctactgtgtggtctgggagttagaatcaagtccagtgaactgctgagaggggacagggaggctgatttcagctcatccttgagaatggctttctgaaggatcaaagtggaaacaatggaatgagcttcccccaacacatggagtatgcaagcagggcttagcgcttgctaagaaggaaaataatcacggtcttattgtcatcaccaatattgtcctcatttgaccatcactttgtgtcaagtaaaagctgtcatcacattgtttcatttaatgtatataaatatgttttagctgaatatgggatatcagagtctctgactttggggtcctttccagctccaagagtccattgttgcataagacaaagagcacttctgttgatttttgttggtttgatgcattgtcattatttgtggacttatagtcttatactaatggataagactttgaggg

SEQ ID NO: 7692 - DNA, 1189 bp, Homo sapiens
ggcttgtttgaggtgaacaaactaggaagtagtgtagctggtcacactgtcttccagactccatgcccctccccgcccccattctccagggtttttctgtaaaccttacattctgccttctacacacgcgcgcgcgcgcacacacacacacacacacacacacacacacatccctacctggagatgcccatgggaaggagaaacaccctcattactttctatatccaggcccactgctcagtgtctttcagagcccaccacctggcttcttatagggcccagatctgggcacaccattcttacttaggctgcttgtacctgtgctgtaggggagagggagttggctgtaaccaggcaaagccaggcagaaggagtcatgcaggacaggcttgaagtgggcaggtgagtctccctggctagaatccatactctcctaggaatctcagtcttcctctgcccccatcaccccatccctgggagtgggggctgcacaagctcaacacacatcctgtaggctgctggtcagagctcctttggagacttaagttacttgagaaatctgacagttcccccctggggctggctggggaggaggcacagactgtgtggcagggctaggactagggtgaggcatgtgaggtgccatatttaaggaaggcatctgctctcagctctgtgtgtgatcccttaggttttgtgccgtgggcatctcactcgcctcaccctagtcccagctctactgtgtggtctgggagttagaatcaagtccagtgaactgctgagaggggacagggaggctgatttcagctcatccttgagaatggctttctgaaggatcaaagtggaaacaatggaatgagcttcccccaacacatggagtatgcaagcagggcttagcgcttgctaagaaggaaaataatcacggtcttattgtcatcaccaatattgtcctcatttgaccatcactttgtgtcaagtaaaagctgtcatcacattgtttcatttaatgtatataaatatgttttagctgaatatgggatatcagagtctctgactttggggtcctttccagctccaagagtccattgttgcataagacaaagagcacttctgttgatttttgttggtttgatgcattgtcattatttgtggacttatagtcttatactaatggataagactttgaggg

SEQ ID NO: 7693 - DNA, 857 bp, Homo sapiens
gaagaaactgaggttaaggtcgcgatgctctggccagcatcacaggtgggattcgaacgcagatggggtttggagcggctcttgtgtttaagccacacagtctgacgttagacgggtgaatccagccctcgcagggcctggagtgacctaagccgagaggagctgggctgaatctccaggcgttcctttctttctgccctaggaaagctttgaaattcttattttcaggtaaacgattttggcagtgcccggagaaagatagaagtaagacctaaagaggaactttccgcatgttatgggagagcccctggggcgaggaggcgagggcagccttccccaggccaagggagcagccatcgctcttggatctgtttttcctcaagcgtctgtcctgtggggcctagtccccaagcggcagtcctggacctaacgggagaaggggctgggggaagagggcgcacccccagcccgggacccacagcagccctagccagtcccccactctctccctctgtaggggcctctctctgagatcgggtcctcctcctgcagggcagcagagtggaagccagggcctgggaccctctggctgggcaaggagggactggagtccggctcccggtgaccccgtccccagtgccagcggtggggtcgcctgtggcggcccggacaggccacgggtccctctccccaagtcccattacgttgtatttatgtttcattttatagtttttttttcctcctcccttattattgtctcactctgggggaggcaaaggatataatatattcatctttattataccaaatctgtgtgaagcatttaataaaacgctgtttccacacagccagggata

SEQ ID NO: 7694 - DNA, 146 bp, Homo sapiens
catgcctgtaatcccagctacttgggaggccgaggcaagagaatcacttgaaccagggaggcagaggttgcagtgagccgagatcgcaccactgcactccagcctaggcaacagagtgagactccatctcaaaaaaaaaaaaaaaa

SEQ ID NO: 7695 - DNA, 140 bp, Homo sapiens
cctgtaatcccagctacttgggaggccgaggcaagagaatcacttgaaccagggaggcagaggttgcagtgagccgagatcgcaccactgcactccagcctaggcaacagagtgagactccatctcaaaaaaaaaaaaaa

SEQ ID NO: 7696 - DNA, 857 bp, Homo sapiens; identical to SEQ ID NO: 7693

SEQ ID NO: 7697 - DNA, 486 bp, Homo sapiens
ggggagactgagaccaagattggctacataacttttgggggttgtgcaaaatgaaaactggaggcatctatttcaaaaactatgaagaatttcaagatggtaacagtagagcattataccaagcatggggcccgtctaggcatggggccttgtgctcaggtggcacacctgtgaggtaagtctaaggcagagatggcttcccagtgagccagagctcacccagcctaacctcaggcctcctgagtcccgtcactcctctttctatcagtgcaccccctcacccttgccctccgaacttgtctgcctccagggatctagctgcagccaggcagggaggcgctggggcaaggagggagtccaagacttggcaggctccttccaccccaagcttaggaggcctgacctcctggctgccttcccagacccacagattcctctggctctgtgggcccagctcatctgagtaattctctgccacttccagct

SEQ ID NO: 7698 - DNA, 3377 bp, Homo sapiens
gtctaatctgctctttccttccttcattcattcaatcaatcattcacgcagctggccagcagacactggatgaccacccctgggccaggccttgtggcaaatgctacagtaatgaccagacacatcacacccgccttctagaagccctccctcacaaaccggatcaactgctatgataaaggtaagacaaggaacagtgttgaggaaggcaggaataaacaactacagcagggtggtcagagaaggctacacagagttgattgcactggacatcagaggttgaggaagaatgttcttggaagaaaaggtaggaagatcatgtcttccagtggaggtgtgagacagcctcgtccattcagggatgtgcaggcggaacaggcatcttcttccagggggtgagaggtggcaggaggtgagaccacagcctcagtcaggggccaggtcaaggaggacctgccagcggagcttgggaggtgataaggcactgtaccatggttaggtttgctcttagaaaggctacgctgctggatggggaggaggagagattgaaacggcaagtttgaagaggaggccacttgatggtcactggccatggctcaggcaaaagaggacacaggcccgaacagaggcaatagcagtggggatggcagggaggggactgcctaaaggattgagagctttttggtattccttagacgtggggagtgagtcgacaggtgggtcccaggtttctggcttaactggctgaatcagtggtgtagtcctacagtgagaagggtgtagcagaacactttcggttgaaaatgtctgaaaaactagtcaaactgacctttaaaaaaagggaagaggagtgcagtgttcatataactgaacagtatgagggtcatatgatcagcatttcctccccccatctcccgactcaagtactttgtgctgactccattcttgacagctcgtcccatatcttttcaagatggctgccagcacctctctgaactacatccctccaggtttaaattcaacaaaaacacacaagagcttgtgtccaagcattcccatgaatagtctgagatttgccctgattggaccagctttggtcacatgctcacctccagccaatcactatggctttgctaattgacttagacctaatccatgagctccaccccttaagctttggtggagccatagaaactgtagggactaagaggcaaaggagtggaccccaaagaaatactcaggctcttgctaggacaaagggaaagaaatagatgccagtgagatagaccagattttttcagctttgtgggcagcacgagagaaagaatagtaggttaggggaggacaagatgacgagtccagattagaaggtgttgtgtttgcaggctctgtggtgcaagcagaggagatggtcagcaggcagtcgggtagagagagacccatgctggagagggatctggaattgccagtgtgtaggtggtgagtgagaagctgaagaagacaataatgatgcagactttggaaaccattctggactccctgcttcaggaactgcaagtttgatctagtaaaagtctcttgctttctttgctctttaggattaggcagtggaacagtccttgtgatcctgaagttagcaacgccctagcctccttctttcaacaccagctctcacttcttgtcttagattgctttgcaccttcctgtcccttaattgatgtcaggacctgaatatatttgatagtgatttgaagcactgatgctacaaatgaaagagattgatgctgggccctgggaccaggacatgtgacagagccagagtccttcagggctgatgggcatgtgctaggactgacacaggctagcatctcccgagaagacgtaaggacaagcaactccaaatggggatgacattgatgactcttccacctctcctggtaaccttcccatgcccatcatgtcgttgcacctctgacagtactaggagaggtgccaaaatgagggacagtacttgggaggacaccaaaatgggggaaagtttgtgaaatgttgcaatgggagaaaggaactcagtggcccatgtaaatcttggatatgtttgagatgtggcattgcctgtctctgtgtcttcacaaggataataagcttctccagtgttactgtaagccagtgtgatccctatcttcattaatttttgcctggaaactcctggcccatgactattgtaaaaagtcctggcaaagtgtgcctagccaacatccactctcctctacttccttactatcaaaaccttgcatttgtttaggatggcaatgtgccaactagaaaagccacacttgaccgggcatggtggctcaagcctgtaatcccagcactttgggaggccaaggtgggcgaatcacaaggtcaggagttgagacctgaccccttctgttggcggggtggagggggtggggggagggcagtccaagggtggaccctgtctctactaaaaatacaaaaattagcctggtgtggtggtgggcacctgtaatcccagctactcgggaggctgaggcaggagaattgcttgaacctgggaggaggaggctgcagtgagctgagatcccaccactgcactccagcctgggtgacagagtgagactccgactcagaaaaaaaaagccacacttaacctcctttgcagctaagaggcaacatacatggctggacagtgagattgtgttaatgtggattattcctccacaaatatgcattcttctcctctccattgtgaatagagtgtaagtacttacgcgttgatgttgagcttagtaacatgacttcctttggaatgttagtggaaggaataagcagaaaccttttatttgcttgcatagtttggtttccttcttttcatgattcaccattagaagaacccacccaggtaatcactgcttgctcggatcccagcaaattctagatcccagaactagtgctcttagagccaaggccagccgatccaagtctggactactgctcagatgagccgagcctgaatttgggagtggttgttacagagcattaccctggcaataactgactgatgcagagatgtaaatagacatcactggtggagcccccaggaaagctctttaacagaagacagactcagctggcaggtttcccgtctccttgaatgaagacaggctcaatgcttggaggggtgagaggaggcagccatcttacaaccacaggtcacaggaagacactaaacaaggccgtgtggaaagacagaaggagcctccatccctcagcaccacagagacattgtatcagcctagaaatgcctaaatctgaacttcctcttacctaagaaaaataaaacctcaatttga

SEQ ID NO: 7699 - DNA, 347 bp, Homo sapiens
tcttttcatatgctctgtccaattacaaaccctctttcttgccataagtaaccattatcttgacttttatagcaatcactttcttgtggtttctacttttatgatccacatatgcatccccaggcactgtaattttttattgccaattttttcttaatttgacatatcttttaagtctgccttttatgtacaggtttcttctgcatctcttttctttccctatattttatgtgattaaaaacccaagtcatttgacatataatccgatctgaattgtgctgatcacatactcatgatacagctcaatgtgttcttctgtccattgcagttagtttagtatcatcatg

SEQ ID NO: 7700 - DNA, 708 bp, Homo sapiens
attttttgaaactgctaagaaatctttccacccacaggttgtcagttgaggtagaagccctatctcctcagtgaatcttctttaggatttttagtgtgctgtatttgattcattgctcttccactcttgctctgggccaaggttgccttctggtggctttcaggggtttctccttttcatataagctgcatttgaattgggctcctatgtttaattgggcaggcattactctcaaacatactggttttcaaagtagccacacccaggactcataaataagtatcctgatcacttcaccaaataagtgagcttctataaccagaatatcttgtgtattttatttttttcttttctctccctcttctttattctattttctatttgaataatgacatgcagataggatgccattatctgggatatttttcacattatctgtgtaggaatttaaatgtatacttgcaggatagagtatctaaatcactcaatctctctgttataaaaataatgcagaaagtcttcagtgattagctgtctcacaactactattgttgggtcttctgaagtatgaattttgtgtgtgaattccaaatctaagtgcttctcttttggatcaaatcatcaccaaaacaaaaacaataacaacaaaaaaagtctttattgtagcatctgtctttcgtagttctcattataaccttgacttcctct

SEQ ID NO: 7701 - DNA, 1634 bp, Homo sapiens
tttagacatgaagtccttgcccatgcctatgtcctgaatggtaatgcctaggttttcttctagggtttttatggttttaggtctaacgtttaaatctttaatccatcttgaattgatttttgtataaggtgtaaggaagggatccagtttcagctttctacatatggctagccagttttcccagcaccatttattaaatagggaatcgtttccccattgcatgtttttctcaggtttgtcaaagatcagatagttgtagatatatggcgttatttctgagggctccgttcggttccattgatctctatctctgttttggtaccagtaccatgctgttttggttactgtagccttgtagtatagtttgaagtcaggtagtgtgatgcctccagctttgttcttttggcttaggattgacttggcgatgcgggctcttttttggttccatatgaactttaaagtagttttttccaattctgtgaagaaagtcattggtagcttgatggggatggcattgaatctataaattaccttgggcagtatggccattttcacaatattgattgttcctacgcatgagcatggaatgttcttccatttgacaaatgggaactaattaaactaaagagcttctgcccagcaaaacaaactaccatcagagtgaacaggcaacctacaaaatgggagaaaattttcgcaacctactcatctgacaaagggctaatatccagaatctacaatgaactcaaacaaatttacaagaaaaaaacaaacaaccccatcaaaaagtgggcaaaggacatgaacagacacttctcaaaagaagacatttatgcagccaaaaaacacatgaaaaaatgctcaccatcactggccatcagagaaatgcaaatcaaaaccacaatgagatatcatctcacaccagttagaatggaaatcattaaaaagtcaggaaacaacaggtgctggagaggatgtggagaaataggaacacttttacactgttggtgggactgtaaactagttcaaccattgtggaagtcagtgtggcgattcctcagggatctagaactagaaataccatttgacccagccatcccattactgggtatatacccaaagtactataaatcatgctgctataaagacacatgcacacgtacgtttattgcggcactattcacaattgcaaagacttggaaccaacccaaatgtccaacaatgatagactggattaagaaaatgtggcacgtatacaccatggaatactatgcagccataaaaaatgatgagttcatgtcctttgtagggacatggatgaaattggaaatcatcattctcagtaaactatcgcaagaacaaaaaaccaaacaccgcatattctcactcataggtgggaattgaacaataagaacacatggacacaggaaggggaacatcacactctggggactgttgtggggtggggggaggggggagggatagcattgggagatatacctaatgctagatgacgagttagtgggtgcagcgcaccagcatggcacatgtatacatatggaactaacctgcacattgtgcacatgtaccctaaaacttaaagtaaaataaaaaaaagaaaaagatatagtaaa

SEQ ID NO: 7702 - DNA, 143 bp, Homo sapiens
aagaaaagaaaaaaaaaaaaaaaaaaaaaaagaaaaaacaaaaaaaaaaaaaaaaaaaaaaaaaaaaaaataaaaaaaaaaaaaaaaaaaaagagaaacaaaaaaaaaaaaatagaaaaaaaaaaaaaaaaacaaaaaaggag

SEQ ID NO: 7703 - DNA, 148 bp, Homo sapiens; identical to SEQ ID NO: 7489
  SITE (136): n equals a,t,g, or c

SEQ ID NO: 7704 - DNA, 116 bp, Homo sapiens
aaaaaaaataaaaaaaaaaaaaaaaataaaaaaaaaaaaaaaaaacaaaaaaaaaaaaaaaaaaaaaaaaaaaaaaaaaaacaacacaaaaaaaaaaaaaaaccaaaaacaaacag

SEQ ID NO: 7705 - DNA, 158 bp, Homo sapiens; identical to SEQ ID NO: 7490

SEQ ID NO: 7706 - DNA, 86 bp, Homo sapiens
  SITE (21): n equals a,t,g, or c
  SITE (65): n equals a,t,g, or c
  SITE (74): n equals a,t,g, or c
  SITE (76): n equals a,t,g, or c
  SITE (85): n equals a,t,g, or c
taaaaaaaaaaaaaaaaaaanaaaaaaaaaaaaaaaaaaaaaaaaaaaaaaaaaaaaaaaaaaanaaaaaaaananaaaaaaaana

SEQ ID NO: 7707 - DNA, 126 bp, Homo sapiens
  SITE (9): n equals a,t,g, or c
  SITE (10): n equals a,t,g, or c
  SITE (14): n equals a,t,g, or c
  SITE (20): n equals a,t,g, or c
  SITE (95): n equals a,t,g, or c
  SITE (107): n equals a,t,g, or c
  SITE (108): n equals a,t,g, or c
  SITE (110): n equals a,t,g, or c
  SITE (118): n equals a,t,g, or c
gccaaaaannaaanaaaaanaaaaaaaaaaaaaaaaaaaaaaaaaaaaaaaaaaaaaaaaaaaaaaaaaaaaaaaaaaaaaaaaaaaaaaaaaanaaaaaaaaaaannanaaaaaaanaaaaaaaa

SEQ ID NO: 7708 - DNA, 151 bp, Homo sapiens
aaaaaaaaaaaaaaaaaaaagaaaaaaaaaaaaaaaaaaaaaaaaaaaaaaaaaaaacaaaaaaaacaaaaaaaaaaaaaaaaaaaaaaataaataaaaaaaaaagagaaaaaaataaaaataaagaaataaataaaaaaaaaaaaaaaaa

SEQ ID NO: 7709 - DNA, 130 bp, Homo sapiens
aaaaaaaaaaaaaaaaacaaaaagaaaaaaaaaaaaaaaaaaaaaaaaaaaaaaaaaaaaaagaaaaaataaaaaaaaaaaaataaaaaaaaaaaaaaaaaaacaagaaagacaaaaaaaaataaaaaga

SEQ ID NO: 7710 - DNA, 4167 bp, Homo sapiens
  SITE (268): n equals a,t,g, or c
  SITE (269): n equals a,t,g, or c
  SITE (270): n equals a,t,g, or c
  SITE (271): n equals a,t,g, or c
  SITE (272): n equals a,t,g, or c
  SITE (273): n equals a,t,g, or c
  SITE (274): n equals a,t,g, or c
  SITE (275): n equals a,t,g, or c
  SITE (276): n equals a,t,g, or c
  SITE (277): n equals a,t,g, or c
  SITE (278): n equals a,t,g, or c
  SITE (279): n equals a,t,g, or c
  SITE (280): n equals a,t,g, or c
  SITE (281): n equals a,t,g, or c
  SITE (282): n equals a,t,g, or c
  SITE (283): n equals a,t,g, or c
  SITE (284): n equals a,t,g, or c
  SITE (285): n equals a,t,g, or c
  SITE (286): n equals a,t,g, or c
  SITE (287): n equals a,t,g, or c
  SITE (288): n equals a,t,g, or c
  SITE (289): n equals a,t,g, or c
  SITE (290): n equals a,t,g, or c
  SITE (291): n equals a,t,g, or c
  SITE (292): n equals a,t,g, or c
  SITE (293): n equals a,t,g, or c
  SITE (294): n equals a,t,g, or c
  SITE (295): n equals a,t,g, or c
  SITE (296): n equals a,t,g, or c
  SITE (297): n equals a,t,g, or c
  SITE (298): n equals a,t,g, or c
  SITE (299): n equals a,t,g, or c
  SITE (300): n equals a,t,g, or c
  SITE (301): n equals a,t,g, or c
  SITE (302): n equals a,t,g, or c
  SITE (303): n equals a,t,g, or c
  SITE (304): n equals a,t,g, or c
  SITE (305): n equals a,t,g, or c
  SITE (306): n equals a,t,g, or c
  SITE (307): n equals a,t,g, or c
  SITE (308): n equals a,t,g, or c
  SITE (309): n equals a,t,g, or c
  SITE (310): n equals a,t,g, or c
  SITE (311): n equals a,t,g, or c
  SITE (312): n equals a,t,g, or c
  SITE (313): n equals a,t,g, or c
  SITE (314): n equals a,t,g, or c
  SITE (315): n equals a,t,g, or c
  SITE (316): n equals a,t,g, or c
  SITE (317): n equals a,t,g, or c
  SITE (318): n equals a,t,g, or c
  SITE (319): n equals a,t,g, or c
  SITE (320): n equals a,t,g, or c
  SITE (321): n equals a,t,g, or c
  SITE (322): n equals a,t,g, or c
  SITE (323): n equals a,t,g, or c
  SITE (324): n equals a,t,g, or c
  SITE (325): n equals a,t,g, or c
  SITE (326): n equals a,t,g, or c
  SITE (327): n equals a,t,g, or c
  SITE (328): n equals a,t,g, or c
  SITE (329): n equals a,t,g, or c
  SITE (330): n equals a,t,g, or c
  SITE (331): n equals a,t,g, or c
  SITE (332): n equals a,t,g, or c
  SITE (333): n equals a,t,g, or c
  SITE (334): n equals a,t,g, or c
  SITE (335): n equals a,t,g, or c
  SITE (336): n equals a,t,g, or c
  SITE (337): n equals a,t,g, or c
  SITE (338): n equals a,t,g, or c
  SITE (339): n equals a,t,g, or c
  SITE (340): n equals a,t,g, or c
  SITE (341): n equals a,t,g, or c
  SITE (342): n equals a,t,g, or c
  SITE (343): n equals a,t,g, or c
  SITE (344): n equals a,t,g, or c
  SITE (345): n equals a,t,g, or c
  SITE (346): n equals a,t,g, or c
  SITE (347): n equals a,t,g, or c
  SITE (348): n equals a,t,g, or c
  SITE (349): n equals a,t,g, or c
  SITE (350): n equals a,t,g, or c
  SITE (351): n equals a,t,g, or c
  SITE (352): n equals a,t,g, or c
  SITE (353): n equals a,t,g, or c
  SITE (354): n equals a,t,g, or c
  SITE (355): n equals a,t,g, or c
  SITE (356): n equals a,t,g, or c
  SITE (357): n equals a,t,g, or c
  SITE (358): n equals a,t,g, or c
  SITE (359): n equals a,t,g, or c
  SITE (360): n equals a,t,g, or c
  SITE (361): n equals a,t,g, or c
  SITE (362): n equals a,t,g, or c
  SITE (363): n equals a,t,g, or c
  SITE (364): n equals a,t,g, or c
  SITE (365): n equals a,t,g, or c
  SITE (366): n equals a,t,g, or c
  SITE (367): n equals a,t,g, or c
  SITE (368): n equals a,t,g, or c
  SITE (369): n equals a,t,g, or c
  SITE (370): n equals a,t,g, or c
  SITE (371): n equals a,t,g, or c
  SITE (372): n equals a,t,g, or c
  SITE (373): n equals a,t,g, or c
  SITE (374): n equals a,t,g, or c
  SITE (375): n equals a,t,g, or c
  SITE (376): n equals a,t,g, or c
  SITE (377): n equals a,t,g, or c
  SITE (378): n equals a,t,g, or c
  SITE (379): n equals a,t,g, or c
  SITE (380): n equals a,t,g, or c
  SITE (381): n equals a,t,g, or c
  SITE (382): n equals a,t,g, or c
  SITE (383): n equals a,t,g, or c
  SITE (384): n equals a,t,g, or c
  SITE (385): n equals a,t,g, or c
  SITE (386): n equals a,t,g, or c
  SITE (387): n equals a,t,g, or c
  SITE (388): n equals a,t,g, or c
  SITE (389): n equals a,t,g, or c
  SITE (390): n equals a,t,g, or c
  SITE (391): n equals a,t,g, or c
  SITE (392): n equals a,t,g, or c
  SITE (393): n equals a,t,g, or c
  SITE (394): n equals a,t,g, or c
  SITE (395): n equals a,t,g, or c
  SITE (396): n equals a,t,g, or c
  SITE (397): n equals a,t,g, or c
  SITE (398): n equals a,t,g, or c
  SITE (399): n equals a,t,g, or c
  SITE (400): n equals a,t,g, or c
  SITE (401): n equals a,t,g, or c
  SITE (402): n equals a,t,g, or c
  SITE (403): n equals a,t,g, or c
  SITE (404): n equals a,t,g, or c
  SITE (405): n equals a,t,g, or c
  SITE (406): n equals a,t,g, or c
  SITE (407): n equals a,t,g, or c
  SITE (408): n equals a,t,g, or c
  SITE (409): n equals a,t,g, or c
  SITE (410): n equals a,t,g, or c
  SITE (411): n equals a,t,g, or c
  SITE (412): n equals a,t,g, or c
  SITE (413): n equals a,t,g, or c
  SITE (414): n equals a,t,g, or c
  SITE (415): n equals a,t,g, or c
  SITE (416): n equals a,t,g, or c
  SITE (417): n equals a,t,g, or c
  SITE (418): n equals a,t,g, or c
  SITE (419): n equals a,t,g, or c
  SITE (420): n equals a,t,g, or c
  SITE (421): n equals a,t,g, or c
  SITE (422): n equals a,t,g, or c
  SITE (423): n equals a,t,g, or c
  SITE (424): n equals a,t,g, or c
  SITE (425): n equals a,t,g, or c
  SITE (426): n equals a,t,g, or c
  SITE (427): n equals a,t,g, or c
  SITE (428): n equals a,t,g, or c
  SITE (429): n equals a,t,g, or c
  SITE (430): n equals a,t,g, or c
  SITE (431): n equals a,t,g, or c
  SITE (432): n equals a,t,g, or c
  SITE (433): n equals a,t,g, or c
  SITE (434): n equals a,t,g, or c
  SITE (435): n equals a,t,g, or c
  SITE (436): n equals a,t,g, or c
  SITE (437): n equals a,t,g, or c
  SITE (438): n equals a,t,g, or c
  SITE (439): n equals a,t,g, or c
  SITE (440): n equals a,t,g, or c
  SITE (441): n equals a,t,g, or c
  SITE (442): n equals a,t,g, or c
  SITE (443): n equals a,t,g, or c
  SITE (444): n equals a,t,g, or c
  SITE (445): n equals a,t,g, or c
  SITE (446): n equals a,t,g, or c
  SITE (447): n equals a,t,g, or c
  SITE (448): n equals a,t,g, or c
  SITE (449): n equals a,t,g, or c
  SITE (450): n equals a,t,g, or c
  SITE (451): n equals a,t,g, or c
  SITE (452): n equals a,t,g, or c
  SITE (453): n equals a,t,g, or c
  SITE (454): n equals a,t,g, or c
  SITE (455): n equals a,t,g, or c
  SITE (456): n equals a,t,g, or c
  SITE (457): n equals a,t,g, or c
  SITE (458): n equals a,t,g, or c
  SITE (459): n equals a,t,g, or c
  SITE (460): n equals a,t,g, or c
  SITE (461): n equals a,t,g, or c
  SITE (462): n equals a,t,g, or c
  SITE (463): n equals a,t,g, or c
  SITE (464): n equals a,t,g, or c
  SITE (465): n equals a,t,g, or c
  SITE (466): n equals a,t,g, or c
  SITE (467): n equals a,t,g, or c
  SITE (468): n equals a,t,g, or c
  SITE (469): n equals a,t,g, or c
  SITE (470): n equals a,t,g, or c
  SITE (471): n equals a,t,g, or c
  SITE (472): n equals a,t,g, or c
  SITE (473): n equals a,t,g, or c
  SITE (474): n equals a,t,g, or c
  SITE (475): n equals a,t,g, or c
  SITE (476): n equals a,t,g, or c
  SITE (477): n equals a,t,g, or c
  SITE (478): n equals a,t,g, or c
  SITE (479): n equals a,t,g, or c
  SITE (480): n equals a,t,g, or c
  SITE (481): n equals a,t,g, or c
  SITE (482): n equals a,t,g, or c
  SITE (483): n equals a,t,g, or c
  SITE (484): n equals a,t,g, or c
  SITE (485): n equals a,t,g, or c
  SITE (486): n equals a,t,g, or c
  SITE (487): n equals a,t,g, or c
  SITE (488): n equals a,t,g, or c
  SITE (489): n equals a,t,g, or c
  SITE (490): n equals a,t,g, or c
  SITE (491): n equals a,t,g, or c
  SITE (492): n equals a,t,g, or c
  SITE (493): n equals a,t,g, or c
  SITE (494): n equals a,t,g, or c
  SITE (495): n equals a,t,g, or c
  SITE (496): n equals a,t,g, or c
  SITE (497): n equals a,t,g, or c
  SITE (498): n equals a,t,g, or c
  SITE (499): n equals a,t,g, or c
  SITE (500): n equals a,t,g, or c
  SITE (501): n equals a,t,g, or c
  SITE (502): n equals a,t,g, or c
  SITE (503): n equals a,t,g, or c
  SITE (504): n equals a,t,g, or c
  SITE (505): n equals a,t,g, or c
  SITE (506): n equals a,t,g, or c
  SITE (507): n equals a,t,g, or c
  SITE (508): n equals a,t,g, or c
  SITE (509): n equals a,t,g, or c
  SITE (510): n equals a,t,g, or c
  SITE (511): n equals a,t,g, or c
  SITE (512): n equals a,t,g, or c
  SITE (513): n equals a,t,g, or c
  SITE (514): n equals a,t,g, or c
  SITE (515): n equals a,t,g, or c
  SITE (516): n equals a,t,g, or c
  SITE (517): n equals a,t,g, or c
  SITE (518): n equals a,t,g, or c
  SITE (519): n equals a,t,g, or c
  SITE (520): n equals a,t,g, or c
  SITE (521): n equals a,t,g, or c
  SITE (522): n equals a,t,g, or c
  SITE (523): n equals a,t,g, or c
  SITE (524): n equals a,t,g, or c
  SITE (525): n equals a,t,g, or c
  SITE (526): n equals a,t,g, or c
  SITE (527): n equals a,t,g, or c
  SITE (528): n equals a,t,g, or c
  SITE (529): n equals a,t,g, or c
  SITE (530): n equals a,t,g, or c
  SITE (531): n equals a,t,g, or c
  SITE (532): n equals a,t,g, or c
  SITE (533): n equals a,t,g, or c
  SITE (534): n equals a,t,g, or c
  SITE (535): n equals a,t,g, or c
  SITE (536): n equals a,t,g, or c
  SITE (537): n equals a,t,g, or c
  SITE (538): n equals a,t,g, or c
  SITE (539): n equals a,t,g, or c
  SITE (540): n equals a,t,g, or c
  SITE (541): n equals a,t,g, or c
  SITE (542): n equals a,t,g, or c
  SITE (543): n equals a,t,g, or c
  SITE (544): n equals a,t,g, or c
  SITE (545): n equals a,t,g, or c
  SITE (546): n equals a,t,g, or c
  SITE (547): n equals a,t,g, or c
  SITE (548): n equals a,t,g, or c
  SITE (549): n equals a,t,g, or c
  SITE (550): n equals a,t,g, or c
  SITE (551): n equals a,t,g, or c
  SITE (552): n equals a,t,g, or c
  SITE (553): n equals a,t,g, or c
  SITE (554): n equals a,t,g, or c
  SITE (555): n equals a,t,g, or c
  SITE (556): n equals a,t,g, or c
  SITE (557): n equals a,t,g, or c
  SITE (558): n equals a,t,g, or c
  SITE (559): n equals a,t,g, or c
  SITE (560): n equals a,t,g, or c
  SITE (561): n equals a,t,g, or c
  SITE (562): n equals a,t,g, or c
  SITE (563): n equals a,t,g, or c
  SITE (564): n equals a,t,g, or c
  SITE (565): n equals a,t,g, or c
  SITE (566): n equals a,t,g, or c
  SITE (567): n equals a,t,g, or c
  SITE (568): n equals a,t,g, or c
  SITE (569): n equals a,t,g, or c
  SITE (570): n equals a,t,g, or c
  SITE (571): n equals a,t,g, or c
  SITE (572): n equals a,t,g, or c
  SITE (573): n equals a,t,g, or c
  SITE (574): n equals a,t,g, or c
  SITE (575): n equals a,t,g, or c
  SITE (576): n equals a,t,g, or c
  SITE (577): n equals a,t,g, or c
  SITE (578): n equals a,t,g, or c
  SITE (579): n equals a,t,g, or c
  SITE (580): n equals a,t,g, or c
  SITE (581): n equals a,t,g, or c
  SITE (582): n equals a,t,g, or c
  SITE (583): n equals a,t,g, or c
  SITE (584): n equals a,t,g, or c
  SITE (585): n equals a,t,g, or c
  SITE (586): n equals a,t,g, or c
  SITE (587): n equals a,t,g, or c
  SITE (588): n equals a,t,g, or c
  SITE (589): n equals a,t,g, or c
  SITE (590): n equals a,t,g, or c
  SITE (591): n equals a,t,g, or c
  SITE (592): n equals a,t,g, or c
  SITE (593): n equals a,t,g, or c
  SITE (594): n equals a,t,g, or c
  SITE (595): n equals a,t,g, or c
  SITE (596): n equals a,t,g, or c
  SITE (597): n equals a,t,g, or c
  SITE (598): n equals a,t,g, or c
  SITE (599): n equals a,t,g, or c
  SITE (600): n equals a,t,g, or c
  SITE (601): n equals a,t,g, or c
  SITE (602): n equals a,t,g, or c
  SITE (603): n equals a,t,g, or c
  SITE (604): n equals a,t,g, or c
  SITE (605): n equals a,t,g, or c
  SITE (606): n equals a,t,g, or c
  SITE (607): n equals a,t,g, or c
  SITE (608): n equals a,t,g, or c
  SITE (609): n equals a,t,g, or c
  SITE (610): n equals a,t,g, or c
  SITE (611): n equals a,t,g, or c
  SITE (612): n equals a,t,g, or c
  SITE (613): n equals a,t,g, or c
  SITE (614): n equals a,t,g, or c
  SITE (615): n equals a,t,g, or c
  SITE (616): n equals a,t,g, or c
  SITE (617): n equals a,t,g, or c
  SITE (618): n equals a,t,g, or c
  SITE (619): n equals a,t,g, or c
  SITE (620): n equals a,t,g, or c
  SITE (621): n equals a,t,g, or c
  SITE (622): n equals a,t,g, or c
  SITE (623): n equals a,t,g, or c
  SITE (624): n equals a,t,g, or c
  SITE (625): n equals a,t,g, or c
  SITE (626): n equals a,t,g, or c
  SITE (627): n equals a,t,g, or c
  SITE (628): n equals a,t,g, or c
  SITE (629): n equals a,t,g, or c
  SITE (630): n equals a,t,g, or c
  SITE (631): n equals a,t,g, or c
  SITE (632): n equals a,t,g, or c
  SITE (633): n equals a,t,g, or c
  SITE (634): n equals a,t,g, or c
  SITE (635): n equals a,t,g, or c
  SITE (636): n equals a,t,g, or c
  SITE (637): n equals a,t,g, or c
  SITE (638): n equals a,t,g, or c
  SITE (639): n equals a,t,g, or c
  SITE (640): n equals a,t,g, or c
  SITE (641): n equals a,t,g, or c
  SITE (642): n equals a,t,g, or c
  SITE (643): n equals a,t,g, or c
  SITE (644): n equals a,t,g, or c
  SITE (645): n equals a,t,g, or c
  SITE (646): n equals a,t,g, or c
  SITE (647): n equals a,t,g, or c
  SITE (648): n equals a,t,g, or c
  SITE (649): n equals a,t,g, or c
  SITE (650): n equals a,t,g, or c
  SITE (651): n equals a,t,g, or c
  SITE (652): n equals a,t,g, or c
  SITE (653): n equals a,t,g, or c
  SITE (654): n equals a,t,g, or c
  SITE (655): n equals a,t,g, or c
  SITE (656): n equals a,t,g, or c
  SITE (657): n equals a,t,g, or c
  SITE (658): n equals a,t,g, or c
  SITE (659): n equals a,t,g, or c
  SITE (660): n equals a,t,g, or c
  SITE (661): n equals a,t,g, or c
  SITE (662): n equals a,t,g, or c
  SITE (663): n equals a,t,g, or c
  SITE (664): n equals a,t,g, or c
  SITE (665): n equals a,t,g, or c
  SITE (666): n equals a,t,g, or c
  SITE (667): n equals a,t,g, or c
  SITE (668): n equals a,t,g, or c
  SITE (669): n equals a,t,g, or c
  SITE (670): n equals a,t,g, or c
  SITE (671): n equals a,t,g, or c
  SITE (672): n equals a,t,g, or c
  SITE (673): n equals a,t,g, or c
  SITE (674): n equals a,t,g, or c
  SITE (675): n equals a,t,g, or c
  SITE (676): n equals a,t,g, or c
  SITE (677): n equals a,t,g, or c
  SITE (678): n equals a,t,g, or c
  SITE (679): n equals a,t,g, or c
  SITE (680): n equals a,t,g, or c
  SITE (681): n equals a,t,g, or c
  SITE (682): n equals a,t,g, or c
  SITE (683): n equals a,t,g, or c
  SITE (684): n equals a,t,g, or c
  SITE (685): n equals a,t,g, or c
  SITE (686): n equals a,t,g, or c
  SITE (687): n equals a,t,g, or c
  SITE (688): n equals a,t,g, or c
  SITE (689): n equals a,t,g, or c
  SITE (690): n equals a,t,g, or c
  SITE (691): n equals a,t,g, or c
  SITE (692): n equals a,t,g, or c
  SITE (693): n equals a,t,g, or c
  SITE (694): n equals a,t,g, or c
  SITE (695): n equals a,t,g, or c
  SITE (696): n equals a,t,g, or c
  SITE (697): n equals a,t,g, or c
  SITE (698): n equals a,t,g, or c
  SITE (699): n equals a,t,g, or c
  SITE (700): n equals a,t,g, or c
  SITE (701): n equals a,t,g, or c
  SITE (702): n equals a,t,g, or c
  SITE (703): n equals a,t,g, or c
  SITE (704): n equals a,t,g, or c
  SITE (705): n equals a,t,g, or c
  SITE (706): n equals a,t,g, or c
  SITE (707): n equals a,t,g, or c
  SITE (708): n equals a,t,g, or c
  SITE (709): n equals a,t,g, or c
  SITE (710): n equals a,t,g, or c
  SITE (711): n equals a,t,g, or c
  SITE (712): n equals a,t,g, or c
  SITE (713): n equals a,t,g, or c
  SITE (714): n equals a,t,g, or c
  SITE (715): n equals a,t,g, or c
  SITE (716): n equals a,t,g, or c
  SITE (717): n equals a,t,g, or c
  SITE (718): n equals a,t,g, or c
  SITE (719): n equals a,t,g, or c
  SITE (720): n equals a,t,g, or c
  SITE (721): n equals a,t,g, or c
  SITE (722): n equals a,t,g, or c
  SITE (723): n equals a,t,g, or c
  SITE (724): n equals a,t,g, or c
  SITE (725): n equals a,t,g, or c
  SITE (726): n equals a,t,g, or c
  SITE (727): n equals a,t,g, or c
  SITE (728): n equals a,t,g, or c
  SITE (729): n equals a,t,g, or c
  SITE (730): n equals a,t,g, or c
  SITE (731): n equals a,t,g, or c
  SITE (732): n equals a,t,g, or c
  SITE (733): n equals a,t,g, or c
  SITE (734): n equals a,t,g, or c
  SITE (735): n equals a,t,g, or c
  SITE (736): n equals a,t,g, or c
  SITE (737): n equals a,t,g, or c
  SITE (738): n equals a,t,g, or c
  SITE (739): n equals a,t,g, or c
  SITE (740): n equals a,t,g, or c
  SITE (741): n equals a,t,g, or c
  SITE (742): n equals a,t,g, or c
  SITE (743): n equals a,t,g, or c
  SITE (744): n equals a,t,g, or c
  SITE (745): n equals a,t,g, or c
  SITE (746): n equals a,t,g, or c
  SITE (747): n equals a,t,g, or c
  SITE (748): n equals a,t,g, or c
  SITE (749): n equals a,t,g, or c
  SITE (750): n equals a,t,g, or c
  SITE (751): n equals a,t,g, or c
  SITE (752): n equals a,t,g, or c
  SITE (753): n equals a,t,g, or c
  SITE (754): n equals a,t,g, or c
  SITE (755): n equals a,t,g, or c
  SITE (756): n equals a,t,g, or c
  SITE (757): n equals a,t,g, or c
  SITE (758): n equals a,t,g, or c
  SITE (759): n equals a,t,g, or c
  SITE (760): n equals a,t,g, or c
  SITE (761): n equals a,t,g, or c
  SITE (762): n equals a,t,g, or c
  SITE (763): n equals a,t,g, or c
  SITE (764): n equals a,t,g, or c
  SITE (765): n equals a,t,g, or c
  SITE (766): n equals a,t,g, or c
  SITE (767): n equals a,t,g, or c
  SITE (768): n equals a,t,g, or c
  SITE (769): n equals a,t,g, or c
  SITE (770): n equals a,t,g, or c
  SITE (771): n equals a,t,g, or c
  SITE (772): n equals a,t,g, or c
  SITE (773): n equals a,t,g, or c
  SITE (774): n equals a,t,g, or c
  SITE (775): n equals a,t,g, or c
  SITE (776): n equals a,t,g, or c
  SITE (777): n equals a,t,g, or c
  SITE (778): n equals a,t,g, or c
  SITE (779): n equals a,t,g, or c
  SITE (780): n equals a,t,g, or c
  SITE (781): n equals a,t,g, or c
  SITE (782): n equals a,t,g, or c
  SITE (783): n equals a,t,g, or c
  SITE (784): n equals a,t,g, or c
  SITE (785): n equals a,t,g, or c
  SITE (786): n equals a,t,g, or c
  SITE (787): n equals a,t,g, or c
  SITE (788): n equals a,t,g, or c
  SITE (789): n equals a,t,g, or c
  SITE (790): n equals a,t,g, or c
  SITE (791): n equals a,t,g, or c
  SITE (792): n equals a,t,g, or c
  SITE (793): n equals a,t,g, or c
  SITE (794): n equals a,t,g, or c
  SITE (795): n equals a,t,g, or c
  SITE (796): n equals a,t,g, or c
  SITE (797): n equals a,t,g, or c
  SITE (798): n equals a,t,g, or c
  SITE (799): n equals a,t,g, or c
  SITE (800): n equals a,t,g, or c
  SITE (801): n equals a,t,g, or c
  SITE (802): n equals a,t,g, or c
  SITE (803): n equals a,t,g, or c
  SITE (804): n equals a,t,g, or c
  SITE (805): n equals a,t,g, or c
  SITE (806): n equals a,t,g, or c
  SITE (807): n equals a,t,g, or c
  SITE (808): n equals a,t,g, or c
  SITE (809): n equals a,t,g, or c
  SITE (810): n equals a,t,g, or c
  SITE (811): n equals a,t,g, or c
  SITE (812): n equals a,t,g, or c
  SITE (813): n equals a,t,g, or c
  SITE (814): n equals a,t,g, or c
  SITE (815): n equals a,t,g, or c
  SITE (816): n equals a,t,g, or c
  SITE (817): n equals a,t,g, or c
  SITE (818): n equals a,t,g, or c
  SITE (819): n equals a,t,g, or c
  SITE (820): n equals a,t,g, or c
  SITE (821): n equals a,t,g, or c
  SITE (822): n equals a,t,g, or c
  SITE (823): n equals a,t,g, or c
  SITE (824): n equals a,t,g, or c
  SITE (825): n equals a,t,g, or c
  SITE (826): n equals a,t,g, or c
  SITE (827): n equals a,t,g, or c
  SITE (828): n equals a,t,g, or c
  SITE (829): n equals a,t,g, or c
  SITE (830): n equals a,t,g, or c
  SITE (831): n equals a,t,g, or c
  SITE (832): n equals a,t,g, or c
  SITE (833): n equals a,t,g, or c
  SITE (834): n equals a,t,g, or c
  SITE (835): n equals a,t,g, or c
  SITE (836): n equals a,t,g, or c
  SITE (837): n equals a,t,g, or c
  SITE (838): n equals a,t,g, or c
  SITE (839): n equals a,t,g, or c
  SITE (840): n equals a,t,g, or c
  SITE (841): n equals a,t,g, or c
  SITE (842): n equals a,t,g, or c
  SITE (843): n equals a,t,g, or c
  SITE (844): n equals a,t,g, or c
  SITE (845): n equals a,t,g, or c
  SITE (846): n equals a,t,g, or c
  SITE (847): n equals a,t,g, or c
  SITE (848): n equals a,t,g, or c
  SITE (849): n equals a,t,g, or c
  SITE (850): n equals a,t,g, or c
  SITE (851): n equals a,t,g, or c
  SITE (852): n equals a,t,g, or c
  SITE (853): n equals a,t,g, or c
  SITE (854): n equals a,t,g, or c
  SITE (855): n equals a,t,g, or c
  SITE (856): n equals a,t,g, or c
  SITE (857): n equals a,t,g, or c
  SITE (858): n equals a,t,g, or c
  SITE (859): n equals a,t,g, or c
  SITE (860): n equals a,t,g, or c
  SITE (861): n equals a,t,g, or c
  SITE (862): n equals a,t,g, or c
  SITE (863): n equals a,t,g, or c
  SITE (864): n equals a,t,g, or c
  SITE (865): n equals a,t,g, or c
  SITE (866): n equals a,t,g, or c
  SITE (867): n equals a,t,g, or c
  SITE (868): n equals a,t,g, or c
  SITE (869): n equals a,t,g, or c
  SITE (870): n equals a,t,g, or c
  SITE (871): n equals a,t,g, or c
  SITE (872): n equals a,t,g, or c
  SITE (873): n equals a,t,g, or c
  SITE (874): n equals a,t,g, or c
  SITE (875): n equals a,t,g, or c
  SITE (876): n equals a,t,g, or c
  SITE (877): n equals a,t,g, or c
  SITE (878): n equals a,t,g, or c
  SITE (879): n equals a,t,g, or c
  SITE (880): n equals a,t,g, or c
  SITE (881): n equals a,t,g, or c
  SITE (882): n equals a,t,g, or c
  SITE (883): n equals a,t,g, or c
  SITE (884): n equals a,t,g, or c
  SITE (885): n equals a,t,g, or c
  SITE (886): n equals a,t,g, or c
  SITE (887): n equals a,t,g, or c
  SITE (888): n equals a,t,g, or c
  SITE (889): n equals a,t,g, or c
  SITE (890): n equals a,t,g, or c
  SITE (891): n equals a,t,g, or c
  SITE (892): n equals a,t,g, or c
  SITE (893): n equals a,t,g, or c
  SITE (894): n equals a,t,g, or c
  SITE (895): n equals a,t,g, or c
  SITE (896): n equals a,t,g, or c
  SITE (897): n equals a,t,g, or c
  SITE (898): n equals a,t,g, or c
  SITE (899): n equals a,t,g, or c
  SITE (900): n equals a,t,g, or c
  SITE (901): n equals a,t,g, or c
  SITE (902): n equals a,t,g, or c
  SITE (903): n equals a,t,g, or c
  SITE (904): n equals a,t,g, or c
  SITE (905): n equals a,t,g, or c
  SITE (906): n equals a,t,g, or c
  SITE (907): n equals a,t,g, or c
  SITE (908): n equals a,t,g, or c
  SITE (909): n equals a,t,g, or c
  SITE (910): n equals a,t,g, or c
  SITE (911): n equals a,t,g, or c
  SITE (912): n equals a,t,g, or c
  SITE (913): n equals a,t,g, or c
  SITE (914): n equals a,t,g, or c
  SITE (915): n equals a,t,g, or c
  SITE (916): n equals a,t,g, or c
  SITE (917): n equals a,t,g, or c
  SITE (918): n equals a,t,g, or c
  SITE (919): n equals a,t,g, or c
  SITE (920): n equals a,t,g, or c
  SITE (921): n equals a,t,g, or c
  SITE (922): n equals a,t,g, or c
  SITE (923): n equals a,t,g, or c
  SITE (924): n equals a,t,g, or c
  SITE (925): n equals a,t,g, or c
  SITE (926): n equals a,t,g, or c
  SITE (927): n equals a,t,g, or c
  SITE (928): n equals a,t,g, or c
  SITE (929): n equals a,t,g, or c
  SITE (930): n equals a,t,g, or c
  SITE (931): n equals a,t,g, or c
  SITE (932): n equals a,t,g, or c
  SITE (933): n equals a,t,g, or c
  SITE (934): n equals a,t,g, or c
  SITE (935): n equals a,t,g, or c
  SITE (936): n equals a,t,g, or c
  SITE (937): n equals a,t,g, or c
  SITE (938): n equals a,t,g, or c
  SITE (939): n equals a,t,g, or c
  SITE (940): n equals a,t,g, or c
  SITE (941): n equals a,t,g, or c
  SITE (942): n equals a,t,g, or c
  SITE (943): n equals a,t,g, or c
  SITE (944): n equals a,t,g, or c
  SITE (945): n equals a,t,g, or c
  SITE (946): n equals a,t,g, or c
  SITE (947): n equals a,t,g, or c
  SITE (948): n equals a,t,g, or c
  SITE (949): n equals a,t,g, or c
  SITE (950): n equals a,t,g, or c
  SITE (951): n equals a,t,g, or c
  SITE (952): n equals a,t,g, or c
  SITE (953): n equals a,t,g, or c
  SITE (954): n equals a,t,g, or c
  SITE (955): n equals a,t,g, or c
  SITE (956): n equals a,t,g, or c
  SITE (957): n equals a,t,g, or c
  SITE (958): n equals a,t,g, or c
  SITE (959): n equals a,t,g, or c
  SITE (960): n equals a,t,g, or c
  SITE (961): n equals a,t,g, or c
  SITE (962): n equals a,t,g, or c
  SITE (963): n equals a,t,g, or c
  SITE (964): n equals a,t,g, or c
  SITE (965): n equals a,t,g, or c
  SITE (966): n equals a,t,g, or c
  SITE (967): n equals a,t,g, or c
  SITE (968): n equals a,t,g, or c
  SITE (969): n equals a,t,g, or c
  SITE (970): n equals a,t,g, or c
  SITE (971): n equals a,t,g, or c
  SITE (972): n equals a,t,g, or c
  SITE (973): n equals a,t,g, or c
  SITE (974): n equals a,t,g, or c
  SITE (975): n equals a,t,g, or c
  SITE (976): n equals a,t,g, or c
  SITE (977): n equals a,t,g, or c
  SITE (978): n equals a,t,g, or c
  SITE (979): n equals a,t,g, or c
  SITE (980): n equals a,t,g, or c
  SITE (981): n equals a,t,g, or c
  SITE (982): n equals a,t,g, or c
  SITE (983): n equals a,t,g, or c
  SITE (984): n equals a,t,g, or c
  SITE (985): n equals a,t,g, or c
  SITE (986): n equals a,t,g, or c
  SITE (987): n equals a,t,g, or c
  SITE (988): n equals a,t,g, or c
  SITE (989): n equals a,t,g, or c
  SITE (990): n equals a,t,g, or c
  SITE (991): n equals a,t,g, or c
  SITE (992): n equals a,t,g, or c
  SITE (993): n equals a,t,g, or c
  SITE (994): n equals a,t,g, or c
  SITE (995): n equals a,t,g, or c
  SITE (996): n equals a,t,g, or c
  SITE (997): n equals a,t,g, or c
  SITE (998): n equals a,t,g, or c
  SITE (999): n equals a,t,g, or c
  SITE (1000): n equals a,t,g, or c
  SITE (1001): n equals a,t,g, or c
  SITE (1002): n equals a,t,g, or c
  SITE (1003): n equals a,t,g, or c
  SITE (1004): n equals a,t,g, or c
  SITE (1005): n equals a,t,g, or c
  SITE (1006): n equals a,t,g, or c
  SITE (1007): n equals a,t,g, or c
  SITE (1008): n equals a,t,g, or c
  SITE (1009): n equals a,t,g, or c
  SITE (1010): n equals a,t,g, or c
  SITE (1011): n equals a,t,g, or c
  SITE (1012): n equals a,t,g, or c
  SITE (1013): n equals a,t,g, or c
  SITE (1014): n equals a,t,g, or c
  SITE (1015): n equals a,t,g, or c
  SITE (1016): n equals a,t,g, or c
  SITE (1017): n equals a,t,g, or c
  SITE (1018): n equals a,t,g, or c
  SITE (1019): n equals a,t,g, or c
  SITE (1020): n equals a,t,g, or c
  SITE (1021): n equals a,t,g, or c
  SITE (1022): n equals a,t,g, or c
  SITE (1023): n equals a,t,g, or c
  SITE (1024): n equals a,t,g, or c
  SITE (1025): n equals a,t,g, or c
  SITE (1026): n equals a,t,g, or c
  SITE (1027): n equals a,t,g, or c
  SITE (1028): n equals a,t,g, or c
  SITE (1029): n equals a,t,g, or c
  SITE (1030): n equals a,t,g, or c
  SITE (1031): n equals a,t,g, or c
  SITE (1032): n equals a,t,g, or c
  SITE (1033): n equals a,t,g, or c
  SITE (1034): n equals a,t,g, or c
  SITE (1035): n equals a,t,g, or c
  SITE (1036): n equals a,t,g, or c
  SITE (1037): n equals a,t,g, or c
  SITE (1038): n equals a,t,g, or c
  SITE (1039): n equals a,t,g, or c
  SITE (1040): n equals a,t,g, or c
  SITE (1041): n equals a,t,g, or c
  SITE (1042): n equals a,t,g, or c
  SITE (1043): n equals a,t,g, or c
  SITE (1044): n equals a,t,g, or c
  SITE (1045): n equals a,t,g, or c
  SITE (1046): n equals a,t,g, or c
  SITE (1047): n equals a,t,g, or c
  SITE (1048): n equals a,t,g, or c
  SITE (1049): n equals a,t,g, or c
  SITE (1050): n equals a,t,g, or c
  SITE (1051): n equals a,t,g, or c
  SITE (1052): n equals a,t,g, or c
  SITE (1053): n equals a,t,g, or c
  SITE (1054): n equals a,t,g, or c
  SITE (1055): n equals a,t,g, or c
  SITE (1056): n equals a,t,g, or c
  SITE (1057): n equals a,t,g, or c
  SITE (1058): n equals a,t,g, or c
  SITE (1059): n equals a,t,g, or c
  SITE (1060): n equals a,t,g, or c
  SITE (1061): n equals a,t,g, or c
  SITE (1062): n equals a,t,g, or c
  SITE (1063): n equals a,t,g, or c
  SITE (1064): n equals a,t,g, or c
  SITE (1065): n equals a,t,g, or c
  SITE (1066): n equals a,t,g, or c
  SITE (1067): n equals a,t,g, or c
  SITE (1068): n equals a,t,g, or c
  SITE (1069): n equals a,t,g, or c
  SITE (1070): n equals a,t,g, or c
  SITE (1071): n equals a,t,g, or c
  SITE (1072): n equals a,t,g, or c
  SITE (1073): n equals a,t,g, or c
  SITE (1074): n equals a,t,g, or c
  SITE (1075): n equals a,t,g, or c
  SITE (1076): n equals a,t,g, or c
  SITE (1077): n equals a,t,g, or c
  SITE (1078): n equals a,t,g, or c
  SITE (1079): n equals a,t,g, or c
  SITE (1080): n equals a,t,g, or c
  SITE (1081): n equals a,t,g, or c
  SITE (1082): n equals a,t,g, or c
  SITE (1083): n equals a,t,g, or c
  SITE (1084): n equals a,t,g, or c
  SITE (1085): n equals a,t,g, or c
  SITE (1086): n equals a,t,g, or c
  SITE (1087): n equals a,t,g, or c
  SITE (1088): n equals a,t,g, or c
  SITE (1089): n equals a,t,g, or c
  SITE (1090): n equals a,t,g, or c
  SITE (1091): n equals a,t,g, or c
  SITE (1092): n equals a,t,g, or c
  SITE (1093): n equals a,t,g, or c
  SITE (1094): n equals a,t,g, or c
  SITE (1095): n equals a,t,g, or c
  SITE (1096): n equals a,t,g, or c
  SITE (1097): n equals a,t,g, or c
  SITE (1098): n equals a,t,g, or c
  SITE (1099): n equals a,t,g, or c
  SITE (1100): n equals a,t,g, or c
  SITE (1101): n equals a,t,g, or c
  SITE (1102): n equals a,t,g, or c
  SITE (1103): n equals a,t,g, or c
  SITE (1104): n equals a,t,g, or c
  SITE (1105): n equals a,t,g, or c
  SITE (1106): n equals a,t,g, or c
  SITE (1107): n equals a,t,g, or c
  SITE (1108): n equals a,t,g, or c
  SITE (1109): n equals a,t,g, or c
  SITE (1110): n equals a,t,g, or c
  SITE (1111): n equals a,t,g, or c
  SITE (1112): n equals a,t,g, or c
  SITE (1113): n equals a,t,g, or c
  SITE (1114): n equals a,t,g, or c
  SITE (1115): n equals a,t,g, or c
  SITE (1116): n equals a,t,g, or c
  SITE (1117): n equals a,t,g, or c
  SITE (1118): n equals a,t,g, or c
  SITE (1119): n equals a,t,g, or c
  SITE (1120): n equals a,t,g, or c
  SITE (1121): n equals a,t,g, or c
  SITE (1122): n equals a,t,g, or c
  SITE (1123): n equals a,t,g, or c
  SITE (1124): n equals a,t,g, or c
  SITE (1125): n equals a,t,g, or c
  SITE (1126): n equals a,t,g, or c
  SITE (1127): n equals a,t,g, or c
  SITE (1128): n equals a,t,g, or c
  SITE (1129): n equals a,t,g, or c
  SITE (1130): n equals a,t,g, or c
  SITE (1131): n equals a,t,g, or c
  SITE (1132): n equals a,t,g, or c
  SITE (1133): n equals a,t,g, or c
  SITE (1134): n equals a,t,g, or c
  SITE (1135): n equals a,t,g, or c
  SITE (1136): n equals a,t,g, or c
  SITE (1137): n equals a,t,g, or c
  SITE (1138): n equals a,t,g, or c
  SITE (1139): n equals a,t,g, or c
  SITE (1140): n equals a,t,g, or c
  SITE (1141): n equals a,t,g, or c
  SITE (1142): n equals a,t,g, or c
  SITE (1143): n equals a,t,g, or c
  SITE (1144): n equals a,t,g, or c
  SITE (1145): n equals a,t,g, or c
  SITE (1146): n equals a,t,g, or c
  SITE (1147): n equals a,t,g, or c
  SITE (1148): n equals a,t,g, or c
  SITE (1149): n equals a,t,g, or c
  SITE (1150): n equals a,t,g, or c
  SITE (1151): n equals a,t,g, or c
  SITE (1152): n equals a,t,g, or c
  SITE (1153): n equals a,t,g, or c
  SITE (1154): n equals a,t,g, or c
  SITE (1155): n equals a,t,g, or c
  SITE (1156): n equals a,t,g, or c
  SITE (1157): n equals a,t,g, or c
  SITE (1158): n equals a,t,g, or c
  SITE (1159): n equals a,t,g, or c
  SITE (1160): n equals a,t,g, or c
  SITE (1161): n equals a,t,g, or c
  SITE (1162): n equals a,t,g, or c
  SITE (1163): n equals a,t,g, or c
  SITE (1164): n equals a,t,g, or c
  SITE (1165): n equals a,t,g, or c
  SITE (1166): n equals a,t,g, or c
  SITE (1167): n equals a,t,g, or c
  SITE (1168): n equals a,t,g, or c
  SITE (1169): n equals a,t,g, or c
  SITE (1170): n equals a,t,g, or c
  SITE (1171): n equals a,t,g, or c
  SITE (1172): n equals a,t,g, or c
  SITE (1173): n equals a,t,g, or c
  SITE (1174): n equals a,t,g, or c
  SITE (1175): n equals a,t,g, or c
  SITE (1176): n equals a,t,g, or c
  SITE (1177): n equals a,t,g, or c
  SITE (1178): n equals a,t,g, or c
  SITE (1179): n equals a,t,g, or c
  SITE (1180): n equals a,t,g, or c
  SITE (1181): n equals a,t,g, or c
  SITE (1182): n equals a,t,g, or c
  SITE (1183): n equals a,t,g, or c
  SITE (1184): n equals a,t,g, or c
  SITE (1185): n equals a,t,g, or c
  SITE (1186): n equals a,t,g, or c
  SITE (1187): n equals a,t,g, or c
  SITE (1188): n equals a,t,g, or c
  SITE (1189): n equals a,t,g, or c
  SITE (1190): n equals a,t,g, or c
  SITE (1191): n equals a,t,g, or c
  SITE (1192): n equals a,t,g, or c
  SITE (1193): n equals a,t,g, or c
  SITE (1194): n equals a,t,g, or c
  SITE (1195): n equals a,t,g, or c
  SITE (1196): n equals a,t,g, or c
  SITE (1197): n equals a,t,g, or c
  SITE (1198): n equals a,t,g, or c
  SITE (1199): n equals a,t,g, or c
  SITE (1200): n equals a,t,g, or c
  SITE (1201): n equals a,t,g, or c
  SITE (1202): n equals a,t,g, or c
  SITE (1203): n equals a,t,g, or c
  SITE (1204): n equals a,t,g, or c
  SITE (1205): n equals a,t,g, or c
  SITE (1206): n equals a,t,g, or c
  SITE (1207): n equals a,t,g, or c
  SITE (1208): n equals a,t,g, or c
  SITE (1209): n equals a,t,g, or c
  SITE (1210): n equals a,t,g, or c
  SITE (1211): n equals a,t,g, or c
  SITE (1212): n equals a,t,g, or c
  SITE (1213): n equals a,t,g, or c
  SITE (1214): n equals a,t,g, or c
  SITE (1215): n equals a,t,g, or c
  SITE (1216): n equals a,t,g, or c
  SITE (1217): n equals a,t,g, or c
  SITE (1218): n equals a,t,g, or c
  SITE (1219): n equals a,t,g, or c
  SITE (1220): n equals a,t,g, or c
  SITE (1221): n equals a,t,g, or c
  SITE (1222): n equals a,t,g, or c
  SITE (1223): n equals a,t,g, or c
  SITE (1224): n equals a,t,g, or c
  SITE (1225): n equals a,t,g, or c
  SITE (1226): n equals a,t,g, or c
  SITE (1227): n equals a,t,g, or c
  SITE (1228): n equals a,t,g, or c
  SITE (1229): n equals a,t,g, or c
  SITE (1230): n equals a,t,g, or c
  SITE (1231): n equals a,t,g, or c
  SITE (1232): n equals a,t,g, or c
  SITE (1233): n equals a,t,g, or c
  SITE (1234): n equals a,t,g, or c
  SITE (1235): n equals a,t,g, or c
  SITE (1236): n equals a,t,g, or c
  SITE (1237): n equals a,t,g, or c
  SITE (1238): n equals a,t,g, or c
  SITE (1239): n equals a,t,g, or c
  SITE (1240): n equals a,t,g, or c
  SITE (1241): n equals a,t,g, or c
  SITE (1242): n equals a,t,g, or c
  SITE (1243): n equals a,t,g, or c
  SITE (1244): n equals a,t,g, or c
  SITE (1245): n equals a,t,g, or c
  SITE (1246): n equals a,t,g, or c
  SITE (1247): n equals a,t,g, or c
  SITE (1248): n equals a,t,g, or c
  SITE (1249): n equals a,t,g, or c
  SITE (1250): n equals a,t,g, or c
  SITE (1251): n equals a,t,g, or c
  SITE (1252): n equals a,t,g, or c
  SITE (1253): n equals a,t,g, or c
  SITE (1254): n equals a,t,g, or c
  SITE (1255): n equals a,t,g, or c
  SITE (1256): n equals a,t,g, or c
  SITE (1257): n equals a,t,g, or c
  SITE (1258): n equals a,t,g, or c
  SITE (1259): n equals a,t,g, or c
  SITE (1260): n equals a,t,g, or c
  SITE (1261): n equals a,t,g, or c
  SITE (1262): n equals a,t,g, or c
  SITE (1263): n equals a,t,g, or c
  SITE (1264): n equals a,t,g, or c
  SITE (1265): n equals a,t,g, or c
  SITE (1266): n equals a,t,g, or c
  SITE (1267): n equals a,t,g, or c
ttttttttttttttttttttcttttctttttttttttttttttttttcttttttttttttttttttttttttttttcttttttttttttctttttttttttttttttttttctcttctttttttttttttttttttttttctttttttttttcttctttctttttctctcttttttttttcttttttcttttttcttttttttttttttttttcttttttttttcttctttttttttttttctttttttttttttttttttttttccnnnnnnnnnnnnnnnnnnnnnnnnnnnnnnnnnnnnnnnnnnnnnnnnnnnnnnnnnnnnnnnnnnnnnnnnnnnnnnnnnnnnnnnnnnnnnnnnnnnnnnnnnnnnnnnnnnnnnnnnnnnnnnnnnnnnnnnnnnnnnnnnnnnnnnnnnnnnnnnnnnnnnnnnnnnnnnnnnnnnnnnnnnnnnnnnnnnnnnnnnnnnnnnnnnnnnnnnnnnnnnnnnnnnnnnnnnnnnnnnnnnnnnnnnnnnnnnnnnnnnnnnnnnnnnnnnnnnnnnnnnnnnnnnnnnnnnnnnnnnnnnnnnnnnnnnnnnnnnnnnnnnnnnnnnnnnnnnnnnnnnnnnnnnnnnnnnnnnnnnnnnnnnnnnnnnnnnnnnnnnnnnnnnnnnnnnnnnnnnnnnnnnnnnnnnnnnnnnnnnnnnnnnnnnnnnnnnnnnnnnnnnnnnnnnnnnnnnnnnnnnnnnnnnnnnnnnnnnnnnnnnnnnnnnnnnnnnnnnnnnnnnnnnnnnnnnnnnnnnnnnnnnnnnnnnnnnnnnnnnnnnnnnnnnnnnnnnnnnnnnnnnnnnnnnnnnnnnnnnnnnnnnnnnnnnnnnnnnnnnnnnnnnnnnnnnnnnnnnnnnnnnnnnnnnnnnnnnnnnnnnnnnnnnnnnnnnnnnnnnnnnnnnnnnnnnnnnnnnnnnnnnnnnnnnnnnnnnnnnnnnnnnnnnnnnnnnnnnnnnnnnnnnnnnnnnnnnnnnnnnnnnnnnnnnnnnnnnnnnnnnnnnnnnnnnnnnnnnnnnnnnnnnnnnnnnnnnnnnnnnnnnnnnnnnnnnnnnnnnnnnnnnnnnnnnnnnnnnnnnnnnnnnnnnnnnnnnnnnnnnnnnnnnnnnnnnnnnnnnnnnnnnnnnnnnnnnnnnnnnnnnnnnnnnnnnnnnnnnnnnnnnnnnnnnnnnnnnnnnnnnnnnnnnnnnnnnnnnnnnnnnnnnnnnnnnnnnnnnnnnnnnnnnnnnnnnnnnnnnntcactacaacctccacctcccagccgcctgccttggcctcccaaagtgccgagattgcagcctctgcccggccgccaccccgtctgggaagtgaggagtgtctctgcctggccgcccatcgtctgggatgtgaggagcccctctgcccggccgcccagtctgggaagtgaggagcgtctccgcccggccgccatcccatctaggaagtgaggagcgcctcttcccagccgccatcacatctaggaagtgaggagcgtctctgcccggccgcccatcgtctgagatgtggggagcgcctctgccccaccgccccatctgggatgtgaggagcgcctctgcccggccgagaccccgtctgggaggtgaggagcgtctctgcccggccgccccgtctgagaagtgaggagaccctctgcctggcaaccaccccgtctgagaagtgaggagcccctccgcccggcagctgccccgtctgagaagtgaggagcctctccgcccagcagccaccccatctgggaagtgaggagcatctccgcccggcagccaccccatccgggagggaggtgagggggggtcagccccccgcccggccagctgccccatccgggagggaggtggggggtcagccccccgcccggccagccgtgccatccgggagggaggtgggggggtcagccccctgcccggccagccgcccggtccgggaggtgaggggcgcctctgcccggccgcccctactgggaagtgaggagcccctctgcccggccagccgccccgtccgggagggaggtgggggggtcagccctccgcccggccagccgccccgtctgggaggtgaggggcgcctctgcccggccgcccctactgggaagtgaggagcccctctgcccggccagccgccccgtccgggagggaggtgggggggtcggccccccgcccggccagccgccccgtccgggagggaggtgggggtgtcggccccccgcccggccagccgccccgtccgggagggaggtggggggggtcagcccccctgcccggccagccgccccgtccgggaggtgaggggcgcctctgcccggccacccctactgggaagtgaggagcccctctgcccggccagccgccccgtccgcgagggaggtgggggggtcagccccccgcccggccagccgccccgtccgggagggaggtggggggggtcagcccccctgcccggccagccgccccgtccgggagggaggtggggggggtcagcccccctgcccggccagccgccccgtccgggaggtgaggggcgcctctgcccggccgcccctactgggaagtgaggagcccctctgcccggccagctgccccgtccgcgagggaggtgggggggtcagccccccgcccggccagccgccccgtccgggagggaggtggggggggtcagcccccctgcccggccagccgccccgtccgggaggtgaggggcgcctctgcccggccgcccctactgggaagtgaggagcccctctgcccggccagccgccccgtccgcgagggaggtgggggggtcagccccccgcccggccagccgccccgtccgggagggaggtggggggggtcagcccccctgcccggccagccgccccgtccgggaggtgaggggcgcctctgcccggccgcccctactgggaagtgaggagcccctctgcctggccagccgccccgtccgggagggaggtggggggtcagccccccgaccggccagccgccccgtccgggagggaggtgggggggtcagccccccgcccggccagccgccccgcccaggaagtgaggggcgcttctgcccggccgcccctactgggaagtgaggagcccctctgcccggccaccaccccgtctgggaggtgtgcccaacagctcattgagaacgggccaggatgacaatggcggctttgtggaatagaaaggcgggaaaggtggggaaaagattgagaaatcggatggttgccgtgtctgtgtagaaagaagtagacatgggagacttttcattttgttctgcactaagaaaaattcctctgccttgggatcctgttgatctgtgaccttacccccaaccctgtgctctctgaaacatgtgctgtgtccactcagggttaaatggattaagggcggtgcaagatgtgctttgttaaacagatgcttgaaggcagcatgctcgttaagagtcatcaccaatccctaatctcaagtaatcagggacacaaacactgcggaaggccgcagggtcctctgcctaggaaaaccagagacctttgttcacttgtttatctgctgaccttccctccactattgtcccatgaccctgccaaatccccctctgtgagaaacacccaagaattatcaataaaaaaataaattaaaaaaaaaaaaaaaaatattccatgctcatggataggaagaatcaatattgttaaaatggccatactgcccaaagcaatctacacattcaacactattcctatcaaactaccaatgtcacttttcacagaattagaaaaaaactaccacaaaattcatatggaaccaaaaaagaacctaaatagccaagataatcctaagcaaaaagaacaacgacagaggtatgacattacctgacttcaaactatgctatcagactacaagaaccaaaagagcatggtacttgtacgaaaacagacacatagaccaatggaacagattagagagcccagaaataaagctgcacacctataaccatctgatctttgacaaagttgacaaaaataagcaatgggaaaaggactccctatgtaacaaatgatgttgggataactagctagccatatgcagaagaatgaaactgaaccccaacttttcaccatacataa

SEQ ID NO: 7711 - DNA, 118 bp, Homo sapiens
ggattacatactgttgccaactgaaggttggaataaacttgtcagctggtacacattgatggaaggtcaagagccaatagcacgaaaggtactgtttaataataactgactataaata

SEQ ID NO: 7712 - DNA, 1926 bp, Homo sapiens
aggcctggggcactgtggtagtgaccttggccacgctgatggttgtcactgtggatgccaagatctatgaacgctgcgagctggcggcaagactggagagagcagggctgaacggctacaagggctacggcgttggagactgtgagaatccagttgccccaaatcccatccaaaccctgagccacccgccacattcagacccaggccccttcttgtcctttatcacctctccaggcctgggcatgatcccttgagtcactccctgactgactatgctgagtagtttaactaactctaacaccaccaccattattgccttcacaaccatcacctccatctctgccatcaacaccatcactacaatcaatatcatcaccactgttaccatcatgaataccatcgctaccaccatcactgatgtctcaccagaatcaccaacatcaccaccactaaaccaagatcaccaccctcacaactgagatgacaaccatccctgtcctccccccatcctatccttccctattcccaagctctatacctactccctgcctcccttctccctgccccagggctgtgcatggctcattatgagagtggctttgacaccgccttcgtggaccacaatcctgatggcagcagtgaatatggcattttccaactgaattctgcctggtggtgtgacaatggcattacacccaccaagaacctctgccacatggattgtcatggtaagtcagcactggggacccactgaagccctgctgggccctactctcccacacatggagggcaaggttgtttaagccataatctcctgcaacaagagaaaaatgatgggaaaaggagaaaagttgcctgagctattaaagacaccatcctctacccctacccagactatcctgagaggttgtttaggacagaagagctcagagctcccaatcctcacccagaatggacactgcagttttcttagactcaggaaacaggaaacttacctccatgtggaacagagttagaaactgtcctgatttggggttgaggttacccaggccccgaggaaagaagcagagtgtctggttctagaaacagaaacagataacctccatgcagaaatgacagaactttccagataagactggtggtgttgaggacaaaatagaatagccgttaaagttgttcagtgttggccaaaatggtggttgaggttgtccaagacaggaaaaaatggagactgaggttatttggggccagcccaaatggaggttgaggttgtccaggaccagacagtatggaggttggggttattcataactagccaacatgacaatctagatcatccaggatcagtcaacatgagttaaggttgtacagaaccagctaacatggtgattaagatcattcataaccaactgacaagagaatcaaggtcatcaagaatcagtcaacatagtggttgaggttcttcaggccccaaggaacccaaaacccttgggccctccattcactgttatcctatccccagtgcaccagaccaccatgtccctctcttccccctcagacctgctcaatcgccatattctggatgacatcaggtgtgccaagcagattgtgtcctcacagaatgggctttctgcctggtaagttcatggggatggcccaggccatgggcagccagggatagtgtcactgccaccccatcaacctgtccacttcatcctctctcctttccttcatttcccaggacttcttggaggctacactgttctggccatgatttatctgaatggctcaaggggtgtgatatgcatgtgaaaattgatccaaaaattcatccatgactcagattcgaagagacagattttatcttcctttcatttctttctcttgtgcatttaataaaggatggtatctataaacaatgcaaaa

SEQ ID NO: 7713 - DNA, 1926 bp, Homo sapiens; identical to SEQ ID NO: 7712

SEQ ID NO: 7714 - DNA, 1926 bp, Homo sapiens
aggcctggggcactgtggtagtgaccttggccacgctgatggttgtcactgtggatgccaagatctatgaacgctgcgagctggcggcaagactggagagagcagggctgaacggctacaagggctacggcgttggagactgtgagaatccagttgccccaaatcccatccaaaccctgagccacccgccacattcagacccaggccccttcttgtcctttatcacctctccaggcctgggcatgatcccttgagtcactccctgactgactatgctgagtagtttaactaactctaacaccaccaccattattgccttcacaaccatcacctccatctctgccatcaacaccatcactacaatcaatatcatcaccactgttaccatcatgaataccatcgctaccaccatcactgatgtctcaccagaatcaccaacatcaccaccactaaaccaagatcaccaccctcacaactgagatgacaaccatccctgtcctccccccatcctatccttccctattcccaagctctatacctactccctgcctcccttctccctgccccagggctgtgcatggctcattatgagagtggctttgacaccgccttcgtggaccacaatcctgatggcagcagtgaatatggcattttccaactgaattctgcctggtggtgtgacaatggcattacacccaccaagaacctctgccacatggattgtcatggtaagtcagcactggggacccactgaagccctgctgggccctactctcccacacatggagggcaaggttgtttaagccataatctcctgcaacaagagaaaaatgatgggaaaaggagagaagttgcctgagctattaaagacaccatcctctacccctacccagactatcctgagaggttgtttaggacagaagagctcagagctcccaatcctcacccagaatggacactgcagttttcttagactcaggaaacaggaaacttacctccatgtggaacagagttagaaactgtcctgatttggggttgaggttacccaggccccgaggaaagaagcagagtgtctggttctagaaacagaaacagataacctccatgcagaaatgacagaactttccagataagactggtggtgttgaggacaaaatagaatagccgttaaagttgttcagtgttggccaaaatggtggttgaggttgtccaagacaggaaaaaatggagactgaggttatttggggccagcccaaatggaggttgaggttgtccaggaccagacagtatggaggttggggttattcataactagccaacatgacaatctagatcatccaggatcagtcaacatgagttaaggttgtacagaaccagctaacatggtgattaagatcattcataaccaactgacaagagaatcaaggtcatcaagaatcagtcaacatagtggttgaggttcttcaggccccaaggaacccaaaacccttgggccctccattcactgttatcctatccccagtgcaccagaccaccatgtccctctcttccccctcagacctgctcaatcgccatattctggatgacatcaggtgtgccaagcagattgtgtcctcacagaatgggctttctgcctggtaagttcatggggatggcccaggccatgggcagccagggatagtgtcactgccaccccatcaacctgtccacttcatcctctctcctttccttcatttcccaggacttcttggaggctacactgttctggccatgatttatctgaatggctcaaggggtgtgatatgcatgtgaaaattgatccaaaaattcatccatgactcagattcgaagagacagattttatcttcctttcatttctttctcttgtgcatttaataaaggatggtatctataaacaatgcaaaa

SEQ ID NO: 7715 - DNA, 538 bp, Homo sapiens
gggtttaagcgattctcctgcctcagcttcccgagtagctgggattacaggcgcccactaccacgcctgggtaatttttgtatttttagtaaagacggggtttcaccatgttgggcaggctggtcttgaactcctgacctcaggtgatccacccgcctcagtctcccaaagtgctgggattacaggcgtgagccaccacacccggcctaaagtatatttttaattgttgttttttaatggctatctttaaatctgtaacttcctataatttgataaacccttttgttcttgtatggcacttattctccattatgacaaaacagcgatttttaataatagtagattttattaatttttctatgagagtttggtattaaatctggagacatttttcctgagtatcatttccaaggactatgcttatttaattaattaaattgggtttcctttaatacctgcatctagatttatggtgaggtttggcttccaactgacagccctcataccttcaaggccacaaaaggtgcctctttagctg

SEQ ID NO: 7716 - DNA, 437 bp, Homo sapiens
tgctgctgcagagcgaggactcccactctctgtcctgggtatcctctaccgtcattccctacaggtgtgacctcctcatacagtaacctaagcagcaggtggctaggtgaaggagagtgagaagctgacaggtggctggtcccaccacagagtctgcatgatatgacattcccacccaaagacaatgagagaagcccccacgtggctggcgagtcatcattacaattgctcttatgatacattttatcaagaccacaaaagccttgccaattgtgagcggtcattttggaccagaagcagcaggtgaggctgacagagcaacagcacagaaggagccaggtctctggtgaccttggagctaccacactagccctggattacctgcctccaaaagaggaatctgcttccctcctcttgaagccactggtgtttgtggt

SEQ ID NO: 7717 - DNA, 136 bp, Homo sapiens
ctgtagtcccagctactcaggaggctgaggcagaagaatcgcttgaacccaggaggcggaggttgcagtgagccgagatcgcaccactgcactccagccagggtaacagagcgagactccgtctcaaaaaaaaaaa

SEQ ID NO: 7718 - DNA, 437 bp, Homo sapiens; identical to SEQ ID NO: 7716

SEQ ID NO: 7719 - DNA, 538 bp, Homo sapiens; identical to SEQ ID NO: 7715

SEQ ID NO: 7720 - DNA, 437 bp, Homo sapiens
tgctgctgcagagcgaggactcccactctctgtcctgggtatcctctaccatcattccctacaggtgtgacctcctcatacagtaacctaagcagcaggtggctaggtgaaggagagtgagaagctgacaggtggctggtcccaccacagagtctgcatgatatgacattcccacccaaagacaatgagagaagcccccacgtggctggcgagtcatcattacaattgctcttatgatacattttatcaagaccacaaaaaccttgccaattgtgagcggtcattttggaccagaagcagcaggtgaggctgacagagcaacagcacagaaggagccaggtctctggtgaccttggagctaccacactagccctggattacctgcctccaaaagaggaatctgcttccctcctcttgaagccactggtgtttgtggt

SEQ ID NO: 7721 - DNA, 2821 bp, Homo sapiens
gtcaactcaactgtcaaggtgtccattgtaccagctgggccatggatccctcccgcctgaaatctgactccacctgccaagagtctgagcctgcaggcctagatttcgactctgctggccaagattatttctctgcagcccaataattcgactctttctaccaagaattggacctggactctcttaacgaagatcttctttcccagtccatgccacatgccaggacagagacctctgtgggcacatatgaatcccactcgacttctgaactggaggatctgacagagcccgagcaaagagagctcaaaaccaaactcactaaattggaggctgaaattgtaaccctacgccacgtactagcagccaaagagagacgctgtggggaactcaagaggaagttaggcctcaccgccttggtagggctgagacagaatctgtccaagagctggcttgatgttcaggtctccaacacctatgtgaaacagaagacatcagctgctctgtccaccatgggcactctcatctgcaggaagcttggaggcgtgaagaagtcggccacattcagatcttttgaaggtctgatggggacaatcaagtccaaagtctcagggggcaaaagagcttggccctgactgtctttcttctgcggagggtggggttgatctgctctcagttttggggtgtggggaagacccactccagattccggggagtgggaatgagccactcccagttctggagagtgaggatgaccatctccactttctggaaccagaatgagcccccttggtaaccttgcctggtactaaaccagtgcaaggacccccttcccttattacatttgcaactctgcccaacaaaaacaagcaagcaaaccacaatggtaaagtggttaattcaggaaattgacagaatccagttttgagaaaagaacacagatatttgctgcttttaagatagagaacccaaagttttgtacctggttatttttcacttaagtttgtagacgaaatgtgccattatattagctttcctgagactgtatctaatgggcaagtcagtggctccagaggggtcttaggccaaagcccaaactctcttttggaaaactagcttattagaaagccaaagtagagttctgtttaagcttgaaagaggtatgaagtaatctgtagtgtttttttggtttgtttgtttgttttcccttccccatttccttccttccctcagtctcaaagtcaccttgaaagcttcacctggcctacaacttttattttaaaaagatgatcaagaaaacttcatcttctctgagactcagaaaaagaggggaaaatagtggtagtgcactaattgttacattactaatatagcttttgtaaaactcgtttgttttcaaaggtctggactaagcaaaacaacagtgtcagtttaggaaattattactactttgaacacaaactgaaattgcaactttgccttgtgctttgtttataatttctttatatatcaaaatgagtgttttaaagtttaacccttgaagcagcatgtctttgccatagcagcacttcacttaaaaggaagaaattgcctctctggcagcaattcctagttagttaccacctccagctgaggggctggaggaaaacaggtatagccaaattcaagaaagataaacccctgtctcaaggaacattttaaaaagaacgtctgtcccctgtgatgctggctgttatgcctttgaatggacctaactatacatctttgctcttaactccaagtctgcccttctttttaggaaaccctaaaggagaaggaagcagaatataaccctctggagagctcaagacagtaggaacctggacggtgcttgtttgaattttctgatatctgattttcacacgaatatactttttgtttgttttccttttccattttcaaaatgccaagatctgggagcctctttcactcctctagacacactgcctgagatagaagtttgcatcttattggctgtgggcagagactaggacccttatgggtacatttcagtaatctctcactgcctaaaatggtaatccctccagcctaagaggatgattctgttttgttgactcttgaatgctcccccaacattcctttggttttcctataagcaaaaccaaataccactataaatacaaaagcatctggtaaactgtaaagttactcatgtatcccaaccctccacagatttctgaagacaaagttttgcttggattaaaacaagatgttttactattttgcatgttcgatttttaatttgttgtgtttatcaaccaaaatggctttgtatgctggagaacaagaggtgagcctgcagcatacaagaaatgaaagtagtccaacaggcaaaggctttgacatatttcaggaaggcttgtgttagggacaatctcagactattatcatgggccaaacctgagagatgttatattttatttaataatttctacaacagtagtaagtttccccaataaattctcaactccgtaaaagtagtaaagtacatatttatttttgctgatcattgttttcccatttctggcttaggattgatcttcaataaatacacgttaaatcaaggaaggaattaacatcatatacttcagacatcaaatatggaatccaagagactatcaacaacatgaacttgttcacaagttccttctgcttttaaacaaaaatatcgtgtttattcaaagccaatctgagaccctactctgtatcaagaactgtcccaggttctgaaagcatagaattagacatcgtatgtgccctctag

SEQ ID NO: 7722 - DNA, 2821 bp, Homo sapiens; identical to SEQ ID NO: 7721

SEQ ID NO: 7723 - DNA, 640 bp, Homo sapiens
atagagctgtgtgccagagataaaagaagtcctgaggaaggggtgttcaactctgtcttggtaggtcagtaaagactttagagagacagaaagtcttagaggactaggagaagtttgccagacagacaagaatagaacattccagacaacatgcagaggaactgagtcacaaaggaatgtataagaatggcatattctaggaactaacactgtggctagagaggaaggggaaatggtgttacatgagtgagggaggggaaatggtgttacgtgagtaagaaaaaataagcagggggcaaaatcataagtagtcttacatactacattagatatcaatatttaagcctgtaggaaatgggaggcattgaagcacttaagtaaaaaagtaactatcaaatttttgttttagattactctggtcatcagagaaatagattaagtatttaagaggtagaatctctcagacttaggaaccaactgcatgaggcggggcttggggggataaatttgcaagataataaggatgtagaattgaaaaggcctgatattattgaagctggagttgcacattcattttgctttggcttttttgtatcagtggtcatgggcaccaaataaaatgcttccatgaacatttgga

SEQ ID NO: 7724 - DNA, 331 bp, Homo sapiens
ctatttttttttttttttttttttttttttttttttttttttgagacggagtctcgctctgtcgcccaggctggagtgcagtggcgggatctcggctcactgcaagctccgtctcccgggttcacgccattctcctgcctcagcctcccaagtagctgggactacaggcgcccgccactacgcccggctaattttttgtatttttagtagagacggggtttcaccgttttagccgggatggtctcgatctcctgacctcgtgatccgcccgcctcagcctcccaaagtgctgggattacaggtgtgagccaccgcgcccggccacattatt

SEQ ID NO: 7725 - DNA, 331 bp, Homo sapiens; identical to SEQ ID NO: 7724

SEQ ID NO: 7726 - DNA, 640 bp, Homo sapiens; identical to SEQ ID NO: 7723

SEQ ID NO: 7727 - DNA, 17324 bp, Homo sapiens
gccaagtggttaaataattaataagattaccaacagcgtgttaattacaaagaacagtgaggagctagaggtggtgaattttccaaacagggaaccaggatccacagccccaaggcccaggggtccggccacccaggcggggcagctccgtaataaataatggagttgggggcagggggtcagggctgctcctgcttcttcttgactgaaatccgcttctttctcgctgccagcatctcatagaaggggtccacactcacagccgccctgcagaaggggaggggtcccaggatgagggccaaggagtccaggcctccagcccctcctccctcatacccaggaggagtctcagacccccggcccctcctccctcagacccaggagtccaggcccccggcccctcctccctcagacccagcagtccaggcccccggcccctcctccctcagacccaggagtccaggcccccggcccctcctccctcacacccaggagtccaggcccccggcccctcctccgtcagacccaggagtccaggcccccggcccctcctccgtcagacccaggggtccaggcccccggcccctcctccgtcagacccaggtgtccaggcccctgcccctcctccgtcagacccaggagtccaggccccagcccctcctccgtcagacccaggcgtccaggccccagcccctcctccatcagacccaggcatccaggcccctgcccctcctccatcagacccaggagtccaggccccagcccctcctccatcaggcccaggagtccaggctcactggatggacttgatccactcgtccttctcctcctgcgtgggggccgagatccggtacaccatgtggtttccctccaccactcggccgtccgcctcagttttgcaggctttgatgagctgccccttgttgttggggatgtaaagttcaaagcagttctggggacgagagaggaagggcgcaggtaagaaccagccctgggcagaggaggccccgccctggcaggaaggtgtacagagagggtcttaccggtttccgggggtcgtccacctctcggatgctcagattctccagggggatgattcctcggggctccttgtcctgaagaagcaaggtggacagaactcagacttccaagtcctcaccccaccccacctccctcagccccaggagtccaggctcccagccactccgcccaggaccccagagcccgggtcgggtcacgctcaccgtggtgtactcaaagtagtagaggcagttgtctgtgaggataaaccagcgccgcttccacgtcttcacccggccccctgaaagggaaggggtgggagggggcctgggctcaacagggggacagggcctctgggagatgggaggggcgtgagaagcagagcaagagcggtagaggtggggctcctggggcctagacaaagccgctgcgttgggggagacagacaagcagggccaggcatgttggggctccaggaatcgtccacccccagcttggggctccacattttctgagtctgtcagtcccagcccaggagcctgagcccccagccccctcctcctgtgggcaggaggccagggcgccagggcgccagggcagccccctcccctcgtctagtgatgggagacaaagacaggtcgtgtacctacctcctggggcagacagcgagaaagcaggcaggaccaggtgcaggagaagggaaggcgggagaatggagcacccccaagagccgcaggcgacagaaacagggtgggcacagggaggggtgcgcaggggcaggacagagaggcaaacacaggagagagggaaagacgcagagaggaggggagggagagagagggaagaaaaccagttacatccacgagggtggggatggccggggctcctccctcccagagaggccaagggccatgagccccgggtggcagccttgaaaaccccttgcttcggtacagggccccagcctaccccctagggtctgtcctaggccaggagcatcctcccttgacatggtaaaagtgcctctgccctggaggaggcccccacaggacagaaggcaaaacccccagcccttggtctgaggtgggtgtgagggcccatctcagctcctgcacaaactggctgtgtgacctcagggcactctcttggactctctggactccagcctggagactcactcgggcctacaccttcctgtggcaaaatgacctgctgctggcttccttgtgggcccagggttaaacaatgacagtaagaatggcttttattaggcatggagtagcaaccaccatcaccaatctccactcctgtatttccatcttttaaggaaggggtccctctaactggcacaaagggaacagaggccctttggtcagagatgtccctggggctgggcagccttaggtggggctcagaaccaaactgaggcgtgagcctctgggaaatgggaaagttactgctcacaggagcagtttttgttttgttttgtttttttgagactgtctcgctctgtcgtccaggctggatttgcaatggtgtgatctcggctcactgcaagctccacctcctgggttcaagcaattcttgtgcctcagcctcccaagtagctgggattacaggtgcctgccaccacgcccggctaatttttgtatttttagtagagacggggtttcaccatgttggccaggctggtctcaaactcctgacctcaagtgatctgcctgcctcagcctcccaaagtgctgggattacaggcctgagccaccgtgcctggcctgacagcagttttgagggaagcagttcctcgtgatgctggcgccttcctgcttctctttctggcccgctcactgccaggggcacctcgaggactctcaatttcccccagcagtctgcctcccttggatcgaatgcagggatctggactggggtgttggctggacagtgatttgcatgttttattttatagagacggggtctcgctctgttgcccaggctggactgcagtggcgcaaccatgactcactgaagcctcgaccacttgagctcaaacaatcctcccacatcaccatgcctggctaatttttttattttttgtagagatggggggtatcattatattgcccaggttggtctcaaactcctgacctctaacaatcctcctgccttgtcctcccaaagtgctgaaattacaggggtgggcccctgtgccctgcctgacttgtgtattttacatttaccaggaaaccctggcatctgttgaggtggtgatgccctggtttaagagcacagttccacatggggaggcccccaagactcagaggccaaagctgccctgtccaacctccttccaagaagcctgaccttgactcccttcactgagctgaaagcttcctgtgggctctcctgctgccgcgggaagcctccactgctgtgctggactgtaactgcccagatgtgtctctctggagcagctgtgcaccgtgtctccattataaaccacatctaacacgcaggtggcacctactgttaccaggcacggctccaggccagtagctctcaaccttgactatgcattgggagcacccgaggagcttaaacgatgactgatggcccttctgctcctgagagcctgacttcaggagtctatggcccagccaccggagttttcgagttgcccaggcaaatctcatgtacagccagggctgagaaccactctagtccttgtgctaacccctcatcatgctacgatcctgtctgatccatgctaaccgaccttgaatgtgccagtgccacgtgttatgacgaagactcccccctccatctctgctgggtttcccgactcatctgcaccagccctggctattccctccacagctggaagccagaatctgggacaggtttcctggcctgtttggctcttttctgcctgtgggtggtgtttcgggaaggatggcacctggatcagccaagtgctctgggcctgatgcctcggagtgcggggtcagtcctgcctggaaccctgggagttcttgccaaggggaatagattccaggggtttggctccctcgggctgggttaacgcagtggaaagaagcctgagtgaactcttctcccacgaaaggacaatgtcagctgcctctcactgcctcctcagcccagctcagggcctggcacagaagggctccatcaacatttgtgggtcaagagaaggggttgggaagtacttactacaggccaggcccagcacacaggcctgattttattttcagccccattttttgggtgtggaaaactgaggttcagagaggtcgaatcatttgcctcagttcaggcagcaggtgtgtgcggaagctgagtccagggcccaggcccacaaatgtcctcctgcggagggaccagcggggtcgggagggcacgtacccagcttcaggagccagccctcccggtccgggttgaagaaggtgtgggtcaggtcattcccgtcatcctcaggaatcttgaagggctcatttcggatgctgtcgtacaggttctgaggagtaaaggctgcattagccattcgagccccctggggccccccagggttactcagggtggggggcagcgagaccagggatgggatgactcatagtggggaagagagaggggtagtggggaggagagggaagtgaaaggcagagaagtggagggaggctgaggtggcggaggaaagaagagatgccctggtgataggtggaggagccggctacgtcctcagagaaacagacagatggggaatgaggccaatcgagggccggaaagcccaacagccagagacagagaagacagacaggccaaaattgtcagggccaaagcctgagagagacagtcaagaagagaagcacccagagagagagaaaaagatcacacacgagttggcatgatcgcaccatcttgggggtgagggcagacagcttgggcactaggagaccacaggtggggcgggggtgtctgtggcaggaagaggggcagggctgaggggcagggaagggggactgaccctgagcagctcctcaggcaggtccccgccctcgttgatgccccggttcatggccacaaagcgctccaggcccggcttgtcccggacattgggattgtggagactggtgttgagcatgatgacggcgaaggacagcacatagcacgtgtctgcaccggacagggcaggtggtgacgacccaggcatgtcagtccccagtgcccccattccccaggacccaggattcccagctcccagccccctccctccctcagacctaggagtctgggccccagtctcctctttcccaggacccaggatttggggcccgcacctgtggactggaaaaccccagggttgcacaggcagtatcgctgggcgaaggcctccatcatccggtcaattttctgggcctctccgggtaggcgaaagctccatagaaactgcctgggttggggaggggccaggaatggatgccagggctggtgggagcctgtccccactctcagtccctgtgttaggaactggtccacgaggaatcccgaccttccggcctcagcagttgtttcaggtatggtcacatgatccagtctcaccaatgggcattggccacgggagtgttgtgaatccctacagaaatagcctctttctgctaagttcgctagacaggtctgggggttggttgaggcttgttatcaggtaagcgggtctgcagagagcaatgctgacacagtggcaaatacaagaggcaaagaaagtcgactttctgaccaccatttgagctcctggatatagccatacctgaaggaggccataaccctgaacttttatggtgcaggacacactcagttccctagtttttgtttctgttttgcttgtttctgtttttttcttgagtaaggtttgtcacttgtaactaggaaggccctgacaggtacattcctggcgttccaaacccctccccctcactcacctgagggcctgcaccagattgaggtcggtgaactcatgcagatccacaaaagcatggagcactgccaggttcagttcttccctggaaggatgggacaaagacacatacagtttggaaaggatggggcaggaatgggcaaagggcaatgccctggggaagtcgtgccccctctactgcaccacagctgcccactgccgagggtgaagtttcctgctggactcccacacaggcctgcccccagggtgggggatgctcagaacacactcttgggaggaatatctggcttgggaaccctgcttaggccagacctttgtacagttgggagaaatgccgcaaacatgtatgctacctactgtcacctctctcaaatgatccccatgctccccaggtatccagacacagcccccacatcccccagacatccagagatgcttcccaagcaccccagatctctataaatccctgattcccagacgtccacagatggcctccaatcatctgatgtccagtcctgtgcaccctaggcttccaaatgacccccacaactcctaagctcccacaagggcccagcggtccccacagctcccagatggccacccagtgcctatgcacagccatggtctacccacggttctcaagctcccatgatccttgagagatgttctctacccttctcagacataaatggatgcttccccacaactgccaggtaattccagaaggccccacatccccagatgctctcggttggccgcaggctcccctagcccatgtcagtccattctgtcacagtccagtcagaaggctgatctgccagggcccctctgcggggaggctgcagggctgttccacctgtgagctgccagtgtgagggcaggagctgggtctggggggtgggagggaggggccccacaggagctgagtggtgaccgtacctctcccccaggtagtccccgatggctgtcttgttcagcccctcgcccttgtacaggaagcgggcgatctcctcgggtgtgttctgcagcagttcattctccaccaagaactggatcccctggtgggtggggacaaggtctcagtgctgagggccagaaagccaccccactcacctccctgggaacctcagcatccagacctacccccaccctcaacagaccagggccaggtttcattttcagccttctcacaggtcttaaatagcattcttcccaactcatggcctttgcacttcatggcctaccctctctgcctttgcctggttaattccagcaccaacaacagggtctggcaaggcacaggtgctcagtacattttctcttttttctgagacctggtctcgctctattgcagactggagtgcagtggcgtgatcacagctcattgcagcttcgaactgctgggctcaagggatcctctcacttcggcctcctcagaagctgggactataggcatgccccaacacacctggctaatttatttatttatattttttctagagatgagttatcactatgctgcccaggctggtctcaaattcctggcttcaagcaatcctccctcctcggcctctcaaagcactgggattacaggcataagccaccgaacccagccaatcaatgtttgttgaatgactgaacagaattccaattgcttcaggaaagaataacgtgacaacctgttagcagacgcagtccttcaagggctgtgaactcgaagccctggctagactggaggtttctctcactctctgtgctacgaagacctctctactactgctttatctcactgtgaactgtggtatcggtgtccaagggctctctgagcacaaggcagcatctaattcttctttgggtccccagcattgccctacacaggatcagactcttgagaggcctcagaaaatgggtgttaaatgagtatgtgaacaggccaggcacggtggctcatgcctgtaatcccaacactttgggaggctgaggcgggcggatcacctgacgtcaggagtttggaagcagcctggccaacatggtgaaaccccatctgtactaaaaatacaaaaattagctgggcatggtggtgggagcctgtaagcccagctacttgggaggctgaggcaggagaatcgcaggaggcggaggttagtgagccgagatcacatcgctgcactccagcctgggtgatagagcaagactctgtctcacacacacacacaaagagtaggtgaacaaaagcctttcctccacctggtgaacacctactcatccttcaaacccgacctgaatgtctcctcctcaaggaagccctccctgactccaccagcctgcctcctccagaggtccactaccctgataccttcctccgtcacggcacctttgtgggagagaggtcaactctcctttgtgcatgtcactttgtccacagcccctacaagactcgagctcatcttgggaccagaaatgcgcccatacaagtagaaagtggaagacgaccttccaggcaggggacaaaacagtcaggagggctggaacacttggtcagtgttcagtgttcagaaaacaaatggacagccagtatctgaatccagggattaggaccaagtctgtccacctagaatagacccggcaccatcacgcttctggaacccggaggtgccagaagcccctgcctggatgtttgcccagctgatcccagtcctgtggccccaagcaccttcttggggtccatgttgaacttcttcctgcccattgccatcttccggttccgttgcaaggtcttactgcaggagcagagagcagggttgggggtggagggtcaatgcctgggcatccctggcctcagccaaccccacgccccctaggtcatccgccccagccctcacctgccctcattggcctccagcccctccacctcgctcatggcttcactgagctcctcccgcaggcgctgaatctccaccagcagctcctgcttccgccgccggatgttctccagctccatccgctcctccggagtcaggtctgggggttctagggatcggggtcaaggtttaaaagtcagtgctaggggccgtgagcctgaattcctgcaatctgggggcggacagagctgggagaggatgtgtaaggggcttcctatgtctgcacagaagaatgggctgggggcctggattcctccctgcagaggagaaagagctggggctctaaactcttgagtcctgggggacaaggggaattggggcccggattcctgagtctgagggagaaggggaatgggtgcctgagctcttagatctgagggaagaaagggctgggggcctcggcttctaggtccattacttggaaggggactgaggccttggttttctgactccattactggcgaggtagctggggacctggttatccggactactgggtccatgaaaagtcactacagccgggggaactgatgacagctcaggagagttgggaaggtggggcgggacatcgaaggcccccgccccccaagatttctcccctccccgcaacccaagcgcccctccccggccccggcaggcgctgggctcgcccgcccctccagcgggaatggttccgccccggcctcgcctccaccactccatcccgcccctcccgccgccaccggaaacaggctcagcccaaacaatggcctggaacgcccggctttcgggccccgccggaagcccgtccagcgcccaacaaaagcggcgcgacaagtctacgactgagccgaacgcttctgggcgccgcgcgccagggggaaacgttcgcggcggaacgttcaggagaaaacgctccagcaactcccagccgaccccgcccctccccgacctaccatagacgccgtcctccatggcggctaggaaggcccgcggggaatccggggcggtcccgccagtcgggcctggatccgcgttggcccgcgggctcgggtgagcccgctcaaacgccccgggagccaccgccgcctcctcagcgccagtcctcagcgctgaaaagactcttcccttcgtcgcccaaccgccccttcagtagggaccgcccctctttttgacactgtccaatccacagtgggcgctttcgtcctccccgccctcgccaccaaaggatcgttctccagggccaacagtcgtacaaaaagccggtgtaggtatgtccggccagaggtagacggcccgcggggccaatcggagtgcaggcagggcagcaggccccgcctccgaaacaacagaaagcacttgacaggcttgctctccaatgagaagccccggaaaagtgtcgcgcggaggcggagccacgcggtacagccacctctgcgcctgctcaaaggccctggacacttggagtctaggtaaaccgagccccgcctccgataatacgttgctagggggcggtactttgttagtcttgttgctaggaggcggggctagaactggcttgtttccgtaagccacacctcctagcaggccatgctggcttctgaccgcaaaggttgccatgcaaccgggagcggctttaggcctccttttcttttgcatttcttctccgcgtatttcccctcctctcagccccttcttaccgccgaactccttctttatcaccatctatgccctccccatccccctcagcctcttcggagtcgtggagtggtgaaacaaaagacttcttcgttttttcttttttttttttttttgagacagagtcttgctctgtcgcccaagctggagtgcagttgcgcgatctcggttcactgcaacctccgcctcccgggttcaagcaattctcctgcctcagcctcccgagtagctgggattacagggttgcaccatgatggtgcatgcctggctattttttgtatttttaatagagacgggcgtttcaccatgttggccaagctggtctcgaactcctgacctcatgatccgcccaccttggccctccaaagtgctggggttacaggcgtgagccaccgcgcctggccaagatttacttttttctaaatgctatgctatttggtatcggtcatggggaatggaacaggggaaggtgaaatttagtgaaagcacaggctcggccttcctggcaccttctgccgctcagactcctccctcatttctccaaactccttcctttagcttagcatcctcctaagactcctcccttccccaagcatcctcctgctaagacaactcccctttcctcagcatcctcccacctctctgattccttctcccatctcagaggccttttttcctctctggctcccctcacgtcacggtcccccttgtcctctcatactcttgccctttttttttttttttttttttttgagacagagttttgctcttttgcccagtctggaatgaactggcatgatctcagctcactgcaacctccacccacaaggttgacgcgatactcctacctcagcctcccaaggagctgggattataggcgcccaccaccatgcccggctaatttttgtatttttagtagagacggggtttcgccatgttggccaggctggtctcaaactcctgacctcaggtgatccacccgcctcagcctcccaaagtgctaggcgtgagccaccgtgcccataggcgtgagccaccgtgcccagccacccttgcccttcttaaactcctccctcctctgaggccccttccccttccccttccccagcctctatgtcccattatttgtaacggaatgtggtcaagggactggctggaatagggaacccaggcacccctgtaaagagggaagccgtaatgggggctgaagtggtgtctgggcctcgtcctcatttgctgtccctgggctgggcaggtggagacggattcagggccaggacctagttaagctgtcggattagacatggaggctcctaatcccctcactgacctttatgagtggcccaggccctgccctccccagtggaaacccaggctgggctgccctgctcccatactcctttcaaacgaaaccccctccctgccccttcacttccaacttaacatccttccccaaccctgcgtttccattgcccccatccctacctaccccagacaccctgagctgagagagcagccagctaattaatcccatccggttattacatggggattctgagggataaagggagatggagaagctggagggggcatttgggttgatgcagcacttgtgaaggctgaatggcaatgacagtggctgccctcggtccagaacacggggtgggaacacgtcctcctcactgtcactggctccctctgcagttggctcccagcctgcggggcacttaggtagatggtagcatgggcagggggccaggtcggaggacccatgctcgagaaacacattcgcagacacatccgctagggctcccagttctttaatctgggggacaggtctccccctaaaacactcactctcccacaatgggaagaaccctggtgtccagagctacctcctcctccccaggtccccaagctaggccagggaagtgactctggctgttagccacagcccacgcctacccttgccctgtgattcagacacccgagttcagagccagcctccaagagtatcttacatcccagcgtctcctggaaggccgtatgatccagcactggggagaggagggaaatccccaggactcgaatgcccatcccacccttggtgtagtgaggactcatcctgctggaaaggcccctgaagaacttcaagttccaatatcccgtttttacagatggggaaactgacatgaagaggagtccaaagtgacacagtaagttggggcagcattgggatttagagcaaagcttctggggtccttgaaaaggacctcattccaattagctagcactccatctctaagcctgttgtagggaccaagggaaaaaatagatagatatctgtatttatattacatatatataatatacatatgtataatatctttaagaaacagacacacggctgggcatggtggctcacacccgtaatcccagcactttgggagaccgaggcaggtggatcatctgaggtcgggagttcaagaccaacctcgccaacatggcgaaaccccgtctctactaaaaatacaaaaattagccaggcatagtggctcatgcctgtaatcccagcgactcaggagactgaggcaggagaaacacttgaagccgggaggcggaggttgcagtgagctgagatcacgccattgcactccagcctgggcggcagagcgagactcagtctcaaaaaaaaaaaaaaaagaaaaagaaaaagaaatagacacacatcactaggtgtagggttccagagcattctagactcaccagccctgggcctcccccttcccttgtccactaattagccctgtgccctacagggtctcaccttcaccttcaccttccaggtcaggccagaaatgttgcttctgaagtcctgagtccacctcctagcactgccaagcagtccacctggaggtgatgagaacttccaggctttggtaatggacaactctgtatccctggagccttcattccttttggcattacagaaccacaagaagtcatctagaatcattgagattctcaactccattgggcaaactggaaccagcaaaatctcagatatctagaattgccactgcttccttgactctgtgatcagtctacagccacagaatcctgattccctttggacattctagaatggcactttaaaaaaaaacaacccacccagtggatcctttcaaagcactgcttattctcttggctgggtgctctacagccagaagttggagttatctaatatcaagaactcttaatctgtcacttcagtctttctaaacccacagactaacaatgttttgtgcattctagaaacattactctttagtttctggagtagttcaactctccacgtaaaatctgtcctagactcaccagtgcttgcctctgtggtcaacctagactcacagaatctcaactaatgagctttctggaaccacaggtcttttttttttttttggtctttggtcaatcaagatgatcttgaatacttggggcattccataaccttccctccttaggtggtctagaacaaatgatttgctactcagttggctgagttgagaagcaacactcccttgaatcttaggtgaatccagacctacaaactcttgatatctgatgctgttcaagaactgccaacttgcttccccagaggcagtctataccattggcttctcaccctggtcaacaatccaggtctccccatatagaggaatctagaactgccagtcttttcctcttgggtgatccagaattctggtgagactgaggaatcaggctcataaagggttctcaggagggagcacagaagcagaggaattaaggtccagtatgtccatggtgggtcaccaggcatggcagaaccttaccacctagtcatttacccagcaggcctgtcggtattcaggaacacctgcccccatcccaggagagagccccatccctccatcttgctaccttggggaagggggcatacacggggaaggggacatcagtttgcatcatggaggcagggtcagcgccagggttggtgtgagaactcgggggctagcagccccatcttctgtttccaccccattcccttcctcagtctcatcgtcctcatcttcctcctggcagcagctcagagcaagttcattctcataacaaaatgcagtcagagagccggggaaactagacttgaggctgtgggaagcctgctctgcccgttcatccagctccttagcactgcagaccggtgtccctgggacctcataagtgcgatggaagtggcgatagtcgacctcatactgggagccacgctggaagagaactggctcaaaacgatggccccagagcagttcaccagggaggtaggacgagcgacactgtgtggtcatggctgtggcctcaaccatcccctcgagaatgaccaccagctcaaagtcagccctggccagctcggcacgtcctagctcatacagaggactggcagagtcgatctcatggacgatggtgatgggggacacgaggaagatacgatcggtgcctccatcaaagcccacatccacatcctggtggtccagcgggatgtactcaccctctggggtcacacggggctgcagcaggaggcgaggagccaaagacagcagggagcacagagacgggcagagacgaagtgagagagaggaagagatgcagagaaagaaggcaaagaccacaggagtgaagaaaagggtgagaacacagatcaagagatggggccggcaacccagagagagaggaagtcagagaggcaggggagggcacagaaacccagtaagggagccagagacccaggaggggaggatggaggtccagagaaaacatgggacatgggacagagacccagagataaagagagaggaaagagactcagggtttgggggtagaaaacgggaagaggggcgtggtgggggaagaggagagagggacagagtgatattggcatagagacacagaaatcagcaagacagagatgaaatcaaagcgacaacggaaaataaggatgacattcaacagagaattggagaaggagcgggagagaaaaatggcttttagtatgtggccagagaaagataaatcagatgacaagaagggggagttagggcaacctaggtccaacattctgcacccaccactgcctcaggcttatccctgggctctcccctgagctatcctagctgtcagggcaactgcaaacccttccatgtcattctgtgtgtgagcacgctttgtgggggtgtgggtatttcacccccgcctacccgctggttccatagccacctcccaggccaagtcactgccccaccgacttctgcaagagccagtgtccctcctattcatgaatcctggtatctcaaagcttcaggcaggagattgaagtgggaggtgggcatctatcctcctcttgtaagtgtctctggaagccccaagtagaggaaccccagaggcggctgggagttgcagctcccaccacccccgatcctctccaagtccagcctcagcccagagtcctaaagtcactttacttgggccacggcagctgccggcccagagtttcttgggaacggagatgtttgagcaatttgaccacaattctaggaacgctaaggccccttcctcagggcagggagggagccagtaccccaggggccaatgggaggtgcagtttcgtttcgttgccacctccaccctgctctcagaggttaggaggctggtgggacacaatgggccactgaggtggggaatgaattctcccacagatgccgcaggaccccacacctagaggcctggagaactgtgctccacagcgatgagctgcacccattccagggcctgcttctcccgggggcctcaagtcacaggcctccgactgtgccacagtgtccagtgggaattgtacacccgagtaatagaacggtcacgcaggccctccaccaccccctcgcaaagctgcatctgaggccaccccatctttggacaggtcccttgacccagaggcttctgggaattacggcccagagccttgacaggccaggcgtggcccttttggggtctacccacaggcgggcaatcctcaagccacaggaagctctgtatgccccaaatccaggcctccaggaagagctggtcacatacctttctgttgggtttacatccccagctgcccagtgacccattcgcaggccccaggcccaagaggctgctgggagttgtagtccacgccccctccaggaccgcacgcccctcgccctcgggcctacatctcccacaatcccccagggctcacggaagtccccgcctctcctcccgggcgcacctgcagcagctgggcacgcacgtgggcctcgaccaggtggctgcggcgcaggttgccgacgcgccacatgaggcagaggcggtggtcgcgcagcgccacgacggcgttctcgctgaagaccagcgtctcgttgcgcttcttgggtttggccatcttggccatgacagcacccacgacgaaggcgtcgagcacgcagccggcaatgcactgcagcaccacggcggccacagcggccgggcactcctcggtgacgctgcgcacgccgtagccgatggacgtctgcgtctccagcgcgaagaggaaggcggccaggaagctggccacgtgtgagaagcagggcgcgggcggtggcggggcggccaggtcgccgtgc

SEQ ID NO: 7728 - DNA, 1468 bp, Homo sapiens
aaaaacaaaacaaaacaaaacaaaaaacaaaaaaaaaaacctacaaaaaaaatcagaagcgtgctgggagcttgggggtcctgggcgaggagggagccggacgcaaaatcctcaggtcctgggggaagatggactgtgggcaatgctgaaggtcagtgtgacgtgatgcagcctggctggaatgttccacaggcatctccagcttaatttggtcaaaacggaatgcctgatttccccttaaatactccctttcgaccacctcagtcatggcaccgtcattcaccagctgcggcggctctcagcaagtccttttggctcctctttcaagactcctagcgtggcccaacgttctccacctccacagccacgccatcctgcaccgcacagcttcctctcacctccccgctcgcctccaaattattctccctgaagcagccaggggcccctcctgcaacctcaatccaaacacgtcaggcccctgcctcctgcccttgcacggcttccatctgctaagaatccagccagaggccctcctggggcggcccaggccccacgcgaccggccgcctgcctctgccctcccctcccgccgcactcccctcttcgccaccagcgggctccgcgcctcttcctgcctctgcctgccacggagccggccgccctgcatgcagttcatccggggaggcggcaggaaagggtgacatagtggcgggacccgctgtttaccctgggacctcatctcccacgaccttcttgggtcgatgactccgtttccctggcacctgtgggaaagagaagtggggaattctattttctcatttggaactccatttcccaccagcccccggggccgcggcggtcaaagcctcctctaccctccacaaaagtacgggatctgactaagaaaaagaagacaaacgccgccacggagtctcgggaaactgcgacgcccggaaaaacctcgggtctgggtcaccgtggctttggcgccgcacagcctgccgataactgtagtccaccttcccgcggaggggcgcagggtacccccaccgcgggggccttcaggccggcaggtgcctgtggccaagggcgggacagggatcaaagcccgaaattccgaagcgccgcatcccatcggagagctcaaaagcgaacacagcgggcaggagggactacaactcgcggcacgcctcggggccacaggcgcctctcccacccgcgtcccggtccctgctgggacttgtagtttgttaactaaagagcgcctcagcttcaaaggcgggcatgggagagtgacatgggacctcccaatccgccatcgcaccctgctcgggatccacgagcccttgttctttggggacaccacacataccccaactggagggcaaaaggtcacagaccttagcccaggattcaggggtaccccacatgccaagacttcaccttcatagaggcgatcctcgaatttc

SEQ ID NO: 7729 - DNA, 583 bp, Homo sapiens
tactatagaagatacttgtacaacaacaacggaaaatactataacaataacgatattatagcaagtgccacaataattacagcatgcatttatacagtgctaaatctatgtactgaattcataatttgtgttctatcaattatactgtttatacaatttggaggttgttgtaagtactttacatgaatttacatatttgaacctcagagcaagcctatgaggcagacatcattatccccattttctagatgaggaaactgaagcacagaaagtttaagcaacttccccaagactgccgggtgtggtggttcatgcctgtaatcccagcactttgggaggccgaggcgggcggatcacctgaggtcaggagttcgagaccagcctgaccaacatggagaaaccccatctctactaaaaatacaaaattagccgggcatggtggcacatgcctgtaatcccagctactagggaggctgaggcaggagaatcgcttgaacctgggaggtggaggttgcggtgagccgagatcgtgccattgcactccagcctggacaacaagagtgaaactctgtctcaaaaaaaa

SEQ ID NO: 7730 - DNA, 370 bp, Homo sapiens
ccctggcctcagctgtcaatgaagtgctgagagctgaactccgacccctacctggtaataatgaggtaatgttccagcaccccactttcccctgctagagtggtatcagagaactccagctaaaacaaaagtttaaataagattcagtctcgtaacataatgcttcaaaaatccccatttcaatagtaaatcacttgtcatgccaagaactaggaagatctcaaactgaatgaaaaaagatgatatcaactcctagatgacaagagagtttagaattatctggaaaatattgtaaatgagccaccataaagatgtttagatgagcaattacaaacatgcctgaaataaattttaaaaaatagaaagtttc

SEQ ID NO: 7731 - DNA, 371 bp, Homo sapiens
gagtccctgacctgagctgtcaatgaaggctgagtactgaactcctacccctacctggtaataatgaggtaatgttctaccaccccactttccctgctagagtggtatcagagaaatccagctaaaacaaagtttaaataagattcagtctcgtaacataatgcttcaaaaatccccatttcaatagtaaatcacttgtcatgccaagaactaggaagatctcaaactgaatgaaaaaagatgatatcaactcctagatgacaagagagtttagaattatctggaaaatattgtaaatgagccaccataaagatgtttagatgagcaattacaaacatgcctgaaataaattttaaaaaatagaaagtttc

SEQ ID NO: 7732 - DNA, 371 bp, Homo sapiens; identical to SEQ ID NO: 7731

SEQ ID NO: 7733 - DNA, 12103 bp, Homo sapiens
attgcgaggaatgcaaaaaaccaattgaatctgattctaaggtaagtctcacctcaatttacagaattactgcctatgaacagcaaacaagtgggttggagtgcctcttttcatttagtgttgactttcaacactatttctctgctactggatatataaggatcttaaaagttaccagcagtcaagctccagccactacacttagcactatgaaatacaacatatgcttaatcctcacatgatcttctaaggtagctgagaatgctaaagattaaaggggttaagctatttgtccaaagttacacagctagaattttcctgctgtttccaagctctcagtaaccttctgggtgtgtttgttatttctggaatgacaagggtataaataaatgcataaagaattgaagttgaaaggattcaaaatctgttttctgatgtaaaatcagcttcatttcttactaaaccctattgatacctctcacacctaccaccccttcctccgacatgcttattctttctttctttctttctttcttcttttcttccttccatcctccgattattttcctctctctttctctctctctctctctctctctctgtctctttcttccctctttctgcctttgttttacttaggtgatgttattttttgtctgtttagttacatctcaaagagtaatagaacattgcaccctaaaatttttaaaaatcattccatgaaaaacctctattatagtttataaaaagaatataggcaaattttgaagacacagcagagaatgtatttgttttttcccagctgccttaagtgacccaccaagaaagccctgggctctagctcttaattaccccagagagtctcctctctatgggtaacagtttcagtaacaactttccctcacgctactagcacaacctactgacatgagagtcccaggagtgttcagttttgtttcataaaatggcctgtattgtcacaaccacatttaattaacttttatttactgtctcaaaggatctttgttacaaagaccggcactggcatgaaggatgcttcaagtgcaccaaatgcaatcactctttggtggaaaagccttttgctgccaaggatgagcgcctgctgtgcacggagtgctattctaacgagtgctcctccaagtgcttccactgcaagaggaccatcatgcctggtagggtctcaagggggctcctgtctctaactgaagctgtgatgcttttcattaagtcccagcacatgaggagtgcagcagctcccaaaaccctggttttgagaaagatatctttcttactctctcaatcttcttccgtgtactttagaaataaaaagattattcattcattatccttgaacaggtaaattacagtgttctgtgtattttcatatagtctaattcatagaaacatttcaaaccagaatcttacccataaaataaagacaaaatgtataccaataacactacattaaacacagtgccctaggcacaatcaatggcatcagaaagagtgattcatcataggcgattggggccaactgccattttgtagcttgacacaaactgttttgaggatcggttattgttattctctcttagggaagacagggttcatgtatatcattccacttttggcaaggactaattctttatattttgatcttctcaatctctatggtcagcagcataagaacataattcattctctgccactcttgctctctcattttcttattatggattcagagaatttctagaaggccataactgcacagtatagtctcagtagttgtgctctgggcatttttaatacccttgtaatgattattatggcccaatttatccaaaccatgtgaaaccattaggagtctccattaaaagtacttttacatctccagattataggttatgcagagcttgaaaaagttttcagtctaagagtgattctccatcatcatggctaaactttattaaccatttttttttctccagatgaatgggtttttttgaacctgaaaaaatactatttttctaaaaggacaattcatttatcatcttaacttaaaacgtttttaagtaatttgatctgtatttgcttaaaaaataaaattatgcttgacttatactaacatggccttacttttggagtacaggttcccgcaaaatggaatttaagggaaactactggcatgaaacctgttttgtgtgtgagaattgccgacaacctatagggacaaagcctttgatctccaaagagagtggcaattattgtgtgccatgttttgagaaggagtttgctcactactgcaacttttgtaagaaggtaattttctaaagagggtgaagcttgtggaaactcagactatttctttttagctgtatcatatatttagaatgaactgatactattatgttatatctgtaatcaacacacccatggtagtttggactttcaacatgtccaaaccactagttgtcacgatgagcatgaccatcttttttttttttattaaccataaaattccagccacaacaagaatttaatattccaaacagctcaagtgatttggtattccagttcatttcactgttttttgttgttgttgttgttttatttttttgggatggaatctcgctctgtcacccaggctggagtgcagtggtacaatctcggctcactgcaacctctgccttccaggttcaagagattctcatgtctcagccttccaagtagctgggattacaggtgcgtgccactgtgtccagctaatttttgtatttttagtagagacagggtttcaccatgttggctagtctggtctcgaactcctgacctcaggtgatccacctgccttggccttccaaagtactgggattacaggcatgagccaccacactcggcccattcactgcttttatacaagatctcacgtattctgggagaaagcacaggtctctctttgaatacagatgtttcttaaaaaataatgtttgatctattcagtattaactgtttcagagaaatatggatttgcctcacaaagtgactaagggaaccaagttaaacaggatgtttaacttctcacattctttctcagcaatgcaaatgtcttcttgacttgaagcttttgtatttcctatgagtagggcaatcggctcaagagagtgccaagatcatgggggaagttcagtagacaaaagacagaaagaagactaagagcagcaagttccttcactccagttccaggatcatgtagggccttctgacttggcttcccactcaaaaaaaacattttctaagagaaaaaaaaagtaatatttttgaagtaaacttcatccaattctttttttatcctctaagcttttatgtgaaaaagtagctctaacaccttgatgaagcctgtctgcattccataaaatatatatggaggttctcaaagaaatccttgacctgcgaggcatcataagtttaaaatgacaccataaattgtcatgagaaagctgaatcatgaaaatacattggattagtatagtggtttcaaagtattttttatctgtgggttactttggcagaactcttaagcccatttgtatatctggacagctggaagtcacactaccactttctatgcacacatatgtgaacacacatgcacatacacacacacacacacacacgcagttaactgtttaacatacataaccaataccactactgcatttaaagaggcagcaatacactatgctaagttatcattattaaattacactatgttgatggctgagaattacaattgatcacatgacataaaataatcttatgactgagaccttcattactctaccaaaacactggcttagaaggtgactttacaagcagcaatcaagccatatgacatatgaagctccaaagaattaccagggtcaatgacggcatttaaaaacatgctggagctgggcatggtggctcacgtctgtaatcccaacactttggaaagccaaggtgggaagattgcctgaggccaggagttcaagaccagcctgggcaacatagtgacaccctgtctgtataaaaaaaaaaaaaagtttaaaaattagccaagtatggtgacacgtgcctgtagtcccagctacttgggtggctgaggcaggaggatcacttgggcccagaaattcaaggctgcagtgagctatgattgagccactgtactccagcctgggtgacaatgagatcctatctctaaaaaatatacaaaacttaaaaactaaagaaaataaaatcttgctggaaataaaatgaataggtttatctcactgttttgagagacaactgagttggccaattttaggctgcatttcttaaagacagactaaaacagtaatgatatttgtgagaattatcctaaaatcatttatcagacacaataatgaagactctttcaatgctataacaattcaagagtgaaacttctttagtacatccatgctgagcactgtctgggccaagtgctgatgtttcccaggttattggagcctgtaactatatttaggatatgatttgaagtcatcaaaaatttacaaaatatttatattgggtagtagacagattatgacatgccagattattttttatttagtttttaaaaccacaagtccttttctaaaaagctagatttgtttttgatcaagatgatccaatctaaacaatttttttcaacccaaaccaaagaccaaatattttcttaaaaaaaggaaaaactacttgacaaccaggctgttagaacttttaagctttaaaatccatagattttattttgttaaactaagatttattttctgccagaaagcaaatgattttaaactacaagtgcttcaaattcaaactcctcaaggttcaaaaggagttaaacgtcttcttcgatttttcatctgtcacataatgagtgcaaaatcattattgcccccactttttcacagaacaaacttgttctaaatcctgagatcaatcagtggtgaaaaccaagcttagatattagactttatcttaccttcctacctcttcaaaaggaatataatcacaagcaaactatttttgatgttccagaatttcttctctctaattaaacagtctttggtgtatatatcaagttttattttgctgtgaatacatttttcaagtttcagatcttttaagcattgcctgctaatcatcagaccaaacaaatcaaaggaatcatgaattctgctgtgtctgctgtaaggcattggaagtcagtaggaggtattttaaattgctttacttccatcacaacattatgcttcccatttacttattcagaatagtatgcttttttccctctaggaaaatatctttcatatcaaatatctttaatttctaagatatttgttataagattaaaaatacctttagaataattttttcacaagtctatgtaacagacaaataacatttttgagttcgtaaacaacgaggcggcttaaaataggctctaagtttttactacctagttaatttgatacaaaggttataggaaccacctcagataccccattgcttcagtcattataaaacacttacaaaaacacattccagtatctacagcaattctaagagctcattagctgtgaattcaaaaggtgatgtggcttaaaaatagttacatgagaaaaaatgcccaagatttatccatctgattctaactaaagatttctcagccttttaaaaagtagaattcatggattaaattggtttagaaagaaaatattatcttatgcagaactaattacatctcaggcaaaacactgcacatcacaccttaaggctcaatgtacaaccagggcttattccattgagttctaattcccacagcaccccactgctagatacaatattggaattgctttccaactattttttcctttggcatttattcattcattcaacaaggattttcaactgcttatctgtgtaaggtaaccttgactcagtatggcactgatggtgatgcacacaggctgtggaatcagaccatgcaggtttgaatcctagctcactatggccatggcaagtaacttaatgactgtaaccctcactagttgctcatctgaaaagagggaaagataatagtctgtagtatgtagaggtgttgagaatattcagaagagatcatccttagcacggtggtaaggactgaaaaaacacttaagaaatggtagttgttattagcaaataatggtgcttaccaattccattcagaattactgctgttggatattcttggacctggtgtaaagcattcaggaaaaagaagaattcttttaagcatccctaaagttagacaggtagttataagaacatagtatagaaaatagctctaacggcagatctttaaaaaccaaaattaagaaaattcagagaagtatgaggaagtgaaaaaagaacctgtgtggtttttctcccccatcttcctgagtccaatatggccctgcctctgttctatttcattgtaggagaaaaatatacaataatttccatttctttctacttctaattaattcctatagcctttggcttctcatattattaatttttaatgactttttgaggaaaagaacatcctaacataaggtgaaaatagagtagccaaaagcaccagttgtggcatagaagacatgaaatgatcttttttttttctttttgcttccttttctccccagagatactaggatctcaaaagaatcatgaaatgatctgaattgtaatggctcccatggtcattgccttttctgtggtctttggcaggtgataacttcaggtgggataacattttgtgaccagctatggcataaagagtgttttctgtgtagtggctgtaggaaagatctctgtgaagaacagttcatgtccagagacgactatccattctgcgtggactgctacaaccatctttatgccaacaagtgtgtagcctgttccaaacccattagtggtgagttcttcagttcaatatgatcatgccatgagacagttatgactttatgaaacactatctagttaatttaggaaaagcaattaaaaaatgggaagctttcctttatatttccttttgagataaacacaagtgggtgcatatatatgagtataaatattacatggattcctcaaggaaagtacaagagtataatttgggtgactatactctgtgaaggtaactacatactaaacctaatggtactgactctaacattcaaggaaggaggagaacaggatgagctgagaggttagtgcaggccttcacgaggagatctgcttgcagcctcattaagttttgagtgggaggagaagagtactaataaatcaaaatcctgcttaattctaaaataggaccaagcatcctttagttaggaaggttttaattaaattccactattgtatagaacatctgaagctgtaataattaaggtagcataggtcagtaattaattaaacttcattttaagatgcttctaacaaatgtattactctcttttctctattcacttgcaattatgaagtgtgtttatgagtagatgaaagaaaacaagatagcattttactgaaaaaaaaatgtgacatgatttgaaaataacataatgataaatcaatccatgttaaagaggttttcaaggtaaaaagaaatacatcttttcctcagagacacttttaaaatgctaatcctataataaaggaactgaaactagcatgacacttgagaaactcagcagctattctttctggcaatttataatcacttaataatgtgtcagaactgtatatctactttctattcctagtattcttagaacatatttcaatttttagttgttcatataccatagaattaaagatcattttatccctttcctccttcttcatcttcaaatatgtggcaaaataaaagttgagtcttcatgcactttccaaccaaaagaaaaagtttcacagcaaaccccaccttggcaggctttcactgacttgcaaagggagggagggtgtcaccagaaaaaaacagcatggtcttatttgtctatatggagcaccatctgtgtcaggatctcacactggctcacgggctacatctggcaagcaggctgttgatgtttggcctgaacatgtttggaaataactaatgtaaaatccatctctgcagctaaaagtagaggaagagcctgccattgggtgagcagactgcctccacattccccagcagggtcaccatcatatggaactcgtggctgtccaattgcatggggcatgccctctctgtcccttgcaccctgtctgcatcactcagctagatcacctccctggcccttgcaagaacttgccttagcaatcccacaccactcggctccagggtccatgcttttaattaccctgctctcctgccttctacaaatttgacaattcctatagccaagagatctccactgattttagttagaaaatgggactttcagatatccaacaatacctggagctccagaatctcccaagtaaaatctgcaatcacagtccatttattttataacaacacttatcttgaattgggacagaaaaaaaaaggggacttcaatgagaaaataaggaaattaacaactcaaaataagtttcaaaattctctggagatccagatggctaatactgatctgcaaaaagcctacacaagccctgaacttgagtttcaattctggtatatcacagattcatgtgcctaagtgatttttttcatagattgttccagatcaatcactgggcccagctttttaaagttgagatggaaaaacaacgttgttctgcacaaaaacatgaggatgatcaaaagtaaataatctgacccaaaagtaatctaaattttacccaaaagtaatctaaatattatatatttaatttagactcatcagtccacaggaaatgtctaataactatcttaatcttttttttaactttgtgattgagacaccagaggctgaaatgcctgcaaaaacttacaactcactttactatttcttcatctaattgttaaatatctataggccctgaagtactgcttctttaaaattgagctatttgaactgatgtaccattgggaattctgatattgtcacacgtcttcggaaaattggcattaatctgattattatgtcactttaaaagctaggtattcttggtcaaaggatacacaatttcagttaaacaggggaaataatttcaagatctattgtacaacatagtgactatagttaacaactatgtattatatacttgaaaattgctaagagaatagatttttaaatgttctcaccacacacacaaaaaagcatatgataaggtaatagatatgttaattgccttgatttagccattccacaatgcatacatatacaaaaacatgttatataatatatgtacaatttttatttgtcaattaagattaatcaattatttttttaaaaagctctgagaaatctacccataaatcaccaagtgtaatttttaaaacccatcacattgaactgcttcatttgaacaaactccagatatagctaccatattttctcctcctttgagataggattaacctcttaaactatcagggataaatgaagctgcttgatgcagtgaaaggtgctctggactgaggagcaaaagacttggtcctccctgcccccactgctgtgtcaccatgggtgactaactcacctcaggggtggggggccttcatttgccttatttataaaacaagcagttgagcaggttggctttcttccatctctgtttatttcaaggaaaaggaatttcaaatgttgtggcttcttcagagagtgatgctgatgttcctgatcatattctttaccaaagataaactcaaacttagtttcatgaggttaaaagcagagactctaaagacagatggccctggcctgtgcttaaatcttagatctgctgcttactagctgggtgacctggggcaagcggttaaacttctcacttctcagtttttgtctgcaaagtggggctgatgctaatatctgaccccatgaaggtaaggtgagggctgtatacggtaacacacataaaggacttagaatagtaattggcacacagtcaagcactcaacaaatgccagctcttattctactgacttgtcagaaacctatgaaaccagataacacaggtgtcaaagacctgcttcatgaatggctttcttactgcaaacaaccctcatgacctaagggagtaaacatattccttttggaacagtttacatacatctcacatgttggttcagccctttcttaaagttgccagatgcttctactttttcttatttgtaaaattccggaagaattgcttttatatttgccacttgtacaaggcttactaataaaattaagaaaaactcatgagcatcaaaatgctagacatgtaataattagttttatgaacagcataatttatgtatatacagaacattactcttgcagtcagcttattaatgttttgaataacattaagggaattaagtagtacataattaatttacatttattaggaagtaatgttgatagcatcatagataagcaagctataaatttaatcaaggaaagtagagaaatttgatgcaattttctgtatgaactactaaattatatatgaagacatcaaataagtttgttaggatggaaacaaaagttcattatcctatttaagaagaatgtatctgaaatagaatgctattcaccctttcacttcaccattccaaatggagtatttggaaattacatatgaattacataactcttttagcctcactccatggatgataagcaaataatagcactaagattactgggagaaaacatgaaataaataaagacccaagcctagggcatctcaacctcttcccaaaccctaacattttctcctttaatgtaacttctcaaaatcaatttcttgaactataccctggaatcacattaaggagacagagatcagaccctcaccgaagattcaaattcgactactttttaaagaaacagtatggttcaagtgaggcccaagttaaagtggaggaggctgacaaagctcttagaaaccaatcacgtgataacgtggcttcattggccagattcaacaaaagctgaagctggctctgagcaaggtaataaggccatcacgttaggatggctgaatgattagacaaaatcctctatttggttatgctttctagaaatagtgtcccaaaccgtataaccccaggacatattctaagtacaactaagcacagaaaaatgaggggaaagaagaaaactaaaactcattacaacattggacatcaaactaggaagcatacatttatttccttttatcttcattttgcagctaagaaaacttaaagtcatatagagaaaaaggggaaatgtattcatacttagatatctctgacttcacaacctataccttctttccactatgctacactgtattgtcttatctggcttagacaaccttatctgtttccaaaaatacctgacttgcatattagcattctgccttcttctgttgattatggcagaatttggctgtgaatctggttgggtggcataggtgtaactttcctacagtggatagttccagatggacacagggccaggaagcagcattcttttttgggttatttgcctctgcgttgttttgctcatagctctatctccagttcctagaggagcatctgctagaatgctcaatctgttccttgaaaggatagattaatctttttctccaattcctttacaggtctcacaggtgccaagtttatctgctttcaagacagccagtggcatagcgaatgctttaactgcgggaaatgctctgtctccttggtgggtaaaggcttcctgacccagaacaaggaaatcttctgccaaaaatgtggctccggaatggacactgacatctaggagacagtccttgcccacctaaaatccattttgccttcgttgtcactaaagccagaactcag

SEQ ID NO: 7734 - DNA, 173 bp, Homo sapiens
ttcttttttttttttttttttttttttttttttttttttttgagacggagtctggctctgtcgcccaggctggagtgcagtggcacaatctcggctcactgcaagctccgcctcccgggttcacgccattcttctgcctcagcctcccgagtagctgggactacaggctgtgc

SEQ ID NO: 7735 - DNA, 791 bp, Homo sapiens
tttttgacttaagttttagaaaatattcatgtagtttagagtggaaaagtttttgcacacattttgatcgaactatattctaagcacacaaaaagcacagtagaacagaaatgaatatatgctaaatcacaaagacaactctccttgcaaaatactgcactctgctgttagaagcagaggaaaatatctcttcataatcaaatatatgacatatacctaggagctgtggatgtaattactgaagaatgaggtttttcatacctgaagagtaaaagaaaaactaagagatcaaactgagaggtatacatgaggctagtgtttgcattcctggttatatgtaatgtgataaattagctatgaatggtaaaagaacaaaactgatcagagtaaattcattagcaattatcacatttaagaattgttatcatttaaaaatcatcctttttttcacacatactgactgtagaattaaaaaacaaagctacaatttgccctcatacacactgcttccacagcttgctagttctgtgtttactcaatggaatatgagaactgaggacattatggctctcataatctgcataggtataaagaggatcatttctacctagggatagccaaagcatgggtttcaacacgttttgtattaaatatattttcaaagtccacagtgatttttctaaacgcttacagattccatgaaataaaagtctattctttcaagtggagctaaccaggataatctttgtccccaaaggcaaacctttaaaataaatagatcattaaatctt

SEQ ID NO: 7736 - DNA, 600 bp, Homo sapiens
atttttttttcccttttctcttaggagcaagctgccttcaggaatcacacattctgttcccttcatccatgcgttatttttcaaagttcagtgtgagtatggcctttggttgaaagattaatttctctaatcctggggtttagtattaggaagttcacttgcctgctgaataagtcaattctctattatttatttcatcagtaatagaggggatgtttattctctatatgtgatgtctttggtcttatttctcaattgcttcatattatttaatgagcttctgtatggtcataacatctggtgcattagccaaaatcatcaagaaataagacaacaaaaaggaggtggatgggagatcaaacacacagagggactgagacttttagagtcagctgtataagtagctttaaatttttatggtgcttttgtgagcacaaaccatgtgaattcttgaccttggtctttgaggcttctattctgcaacctgacagattttttacagttacacagtttgctgctgtgctgtgctgtctgtgagtgtctttaaatcttaggtcttatgaattcattcactttggtggactactaaaatttataata

SEQ ID NO: 7737 - DNA, 600 bp, Homo sapiens; identical to SEQ ID NO: 7736

SEQ ID NO: 7738 - DNA, 197 bp, Homo sapiens
gtgaaaccccatctctactaaaaatacaaaaattagccaggcgtggtggtgagcgcctgtagtcccagctactcgggaggctgaggcaggagaattgcttgaacccgggaggcagagatgcagtgagctgagatcgcgccagtgcactccagcctgggtgacagagcgagagtccatctcaaaaaaaaaaaaaaaaa

SEQ ID NO: 7739 - DNA, 4106 bp, Homo sapiens
aagtgagagtgttcgaaacagaagaaagagaaaagggagtgatgatgatggaggtgattcacctgttcaagatattgataccccagaggtagatggaagttttttatgcttaatgtaaatcctaagtagtgcattctgaagcctttataaaaagatatgaacaatcttttaagtgtttaaaacatttgagaaatctgaaaatgaaagcaaaattaaatatagccagttgacatgcatttacacagtttgaattgttacattttagattgacaatttttgcagctctgttgtcacataacttactctttttttgacctcagtttatattatttatccccaaaagattaaattctttaataatttatgttggattatataaattttttaaattttttttgattttggaagtaaattttattgtgctgaagttaaaatgtttgttattatacatatcaatgataaattttcaacaaattgtatgaactcatttatacatgttaattttttctaggttgatttataccaattacaagtaaatacacttaggagatacaaaagacacttcaagctaccaaccagaccaggacttaataaagcacaacttgttgaggtatatatgagttttaaactatttgaactatctgcacaaccgagaggttattaagtgctaatggaagttttaatgtagtgtatgtaacagtacattttaattagaaagaacaaagttaaaaaatctgttgtggaagaatctagttgtgtagaaatgtttgtctgccacttaggaaattcctttttgtaatgactgcttagtagattgtgtacagcaccttctgatactggctttcaaaatgtgttgattgttttttgagacagaatctcactctgtcacccaggctggagtgcagtggcatgatcttggctcattgaaacctctacctaccaggttcaagcaattctccagcctcagcctcccaagtacctgggacttcaggtgtgcaccaccacaccaggctaatttttgtataatatttttagtagagatagggtttcaccatgttggccagacttgtttcaaactcctgacttcaagtgatctgcccacctcagcctaccagagtgctgggattaccagtgtgagccaccgtgcctggccctcaaaatgttgaatgagagtttttttaatcctcactttagaaatctattaattttaaaactccgtttaaccagtaaacatttgagcacctaattgaggcataataaaattaattaacaagctttaatgtccttattagaatttatattttaaagtggtggaataggcctacaaatcagaccctaaacagtatttttataatttgctgacttaactatttcaaaatttgtccttgttgatgtttgttttattagagacatccatgtttttttcacatctagaagaggcaaaagcttttcttttacccaagcttttacttgtagtttgctttgatagaggacttctagtcagtcactgagttgtgaaaagttaacggagcatgcatatgttttcaggatataatagaaccaagaaatctgtgcatcttattaagatgtttatagatttatatatatatattttaatcatatttaaaataaaaatttttacttgcagctactgaggaggattgattaagcctaggagtttgagtcaccatgggcaacatagcaacactccatctctaaaaaaagaaaatttggcctactagacaaaatagaagtgtagaaatataaatcagttttctcatattctttgcatggatttagtagttacccaacattttctaaaatgtgcctattgaataaaatgaaatatgaatagaagttacatttatttggcagaatgctttttaacattgttaaaatctaatatattaactatttagctaaaattttttatccttggttgggcaacacagatctaattaatttttctttaattttgatttaaaagatcaagttcttttggggttgtacaatacattaatgtaacataaatatagttattgcccaccatgatgaaatatttcaataggtactaatggagtgaaggcacccctgttttgggacaaatgagaaccaaagaactgattattttaaatgttatatttaggtataaattaaacctgtaatttttgataaactgaccttctaagaacagttatattatttccagagctattttcttttttatacataagagatagccatgagtgttatattttacttaatcagaaatgcagatattagcaagttaaggaatgtgcagatgtagtacatatattttaagagaggggtccccaaccccagggccatggactggtactggttggtggcctgttaggaacgggtccgcagagcaggaggtgagcaccagctagcaagcattactgcctgagctccgcctcctgtcagatcagccacagaattagattctcagaggagtccaaaccctcttgtgaagtgcacatgtgagggatctagattgtatgcttgttataagaatctaatgcctgatgatctgaggtggaacaatttcataccaaaaccaactccgccaccctcaatctgtgcaaaaattgccttccgtgaaatctatctctggtgccaaaaaggttggggaccactgttttaagggaatccagggttgtatgactaagtcttaagtctcttaattattgtgtggatgaacttttttcttaagaaattttattttctggaatctaaatatgcatgtcagcaccccaggtaagtctattattcttctattagtaattgtagtatgcatgttatgttagcacaatgaaaaagcaaggaagcaggtaaacatccttcattgaacatccctctttctcctctcatttccattcataatttttattcagaaaaattttcaaggaaccttaaccaaagaatgctaccaaggtgtgaatgaatgaatataatttgcagcaaacaatttatatgttattgttggtttctctactagcaaaagttttcaacttcatacttctttttctatcagtagagtctaaaccattgcaggtttaatgatgcatgtgatctcttacgtctgttttatctcatttaaagtttaaaagtaaaatcatttattccctattctagattctaattataaaatttattatttttattttatttatttatctttttttgagacagagtcttgctctgttgcccaggctgaagtccagtggcatgatctcagctcactgcaacctccaccttctgggttcaagcaatcctcctgtctaagccttctgagtagctaggattacaggtgtacaccaccaggcctatctaatttttgtattttttttggtagagatggggtttcgtcatgttgctcaggctggtctcaaactcctgggctcaagtgatccacccacctctgcctcccaaagtgctgggattacaggcatgagccaccacgcctggcccaattataaaatttaaaataaataaaaggaaaatatattttctaatcaatgtatattaaattgagtgggtcaaagggtcctttgaaatcacactatctcttgttcgtaacattttattcttgaatgctttctgtcttgttgatattttgttaaatataatttttaaaggaaatagcccttatcacatagcactttttcttttgatgaaaccgtattttttacgtagtttatgaaacctgttatatctaaaatttaatttccttaatttttcttttctttgtagatagttggttgccactttaggtctattccagtgaatgaaaaagacaccttaacatatttcatctactcagtgaagaatgacaagaacaaatcagatctcaaggttgatagtggtgttcactaggagacgtggaattgagactaataacttggatgttaacactgtttactgttttttcacatgtagaaatgttctttgtgtattttttctacagaggattttctctgattttattttctttgtttctgactctaataattagttggaaactcatataaaatgagctttcctaaattaaatctattttaaataaaggttattactattat

SEQ ID NO: 7740 - DNA, 470 bp, Homo sapiens
gtcagcacctcttccaatctccgccgggagggcgaccgcacgctcctttcccgttcggaagattccttctttgtgtcggcgggggcagtccttccggagctggaaaccgagggaccccggcaggcgtttccagctggactgtcgccatcttgtggcaggactgggtggccacactggcccaacggccagatccgcatgcccacaactttcttgggttccaaacgtacctttccttctttccccaacctgctaggaactggattttaaaatcacgttccctgaagatacctcggttctgtcctctcccaattgcacgggcgttgtcttcctaaaagctaccctgctctttggagagtccagtgcaagcctcactgaggggctctgtgttaaatccatcaaaaccaactcgtacgaggcgtcaatcctccaccaatttcccatgagacaaaccaatgattaagagcacagag

SEQ ID NO: 7741 - DNA, 467 bp, Homo sapiens
gtcagcacctcttccaatctccgccgggagggcgaccgcacgctcctttcccgttcggaagattccttctttgtgtcggcgggggcagtccttccggagctggaaaccgagggaccccggcaggcgtttccagctggactgtcgccatcttgtggcaggactgggtgcctacagcccaacggccagatccgcatgcccacaactttcttgggttccaaacgtacctttccttctttccccaacctgctaggaactggattttaaaatcacgttccctgaagatacctcggttctgtcctctcccaattgcacgggcgttgtcttcctaaaagctaccctgctctttggagagtccagtgcaagcctcactgaggggctctgtgttaaatccatcaaaaccaactcgtacgaggcgtcaatcctccaccaatttcccatgagacaaaccaatgattaagagcacagag

SEQ ID NO: 7742 - DNA, 470 bp, Homo sapiens; identical to SEQ ID NO: 7740

SEQ ID NO: 7743 - DNA, 408 bp, Homo sapiens
  SITE (36): n equals a,t,g, or c
gtccactccaagtgtgtacagggtctgctggcacanctgggccaggccccgggcatgtcctcccaagaattcgtggcagtgagtctttggcgagccaccctccagatgaatttcttagtggagggagagtctgactctggaagaacagtttgtgacttgagggatgttttcatccttttatttctgctcacccttgtcagttgctctgttctcctctcctgcgcagtctacctgagtgaagtcactctgccctattatttcccatgccctcaggtcccatgggcatgtgattacctctttgctgattgcaaggctgtggagttccctaatcaccttgttctcagcctcttatttccctgctgagaagtggagggagtgatggggttcctcctgctcttgggagatgct

SEQ ID NO: 7744 - DNA, 543 bp, Homo sapiens
gggggctgcagggagaggcacaagttacttgcatatagcggtgataagcctaagtgaggcaaactgaagtcctcagggttttctatgtttttgttttccatgtggctaaaaattctgtgatttttgtatactactgcagaaatacagaatcaggtcttttatttcataacttactgacactggcttaatttctttgcagagttctaccctatttccaaaaagctaaagagaggaatgtgctagaccaccctccctgcctcactatgccatagtctcttttgggcacacattatattcctatccatgacaagcagccagggcagaagagctctctacatatgtgccaccttgtctccaaaacctgctgtcccctttggacagactggcccatccctgaccactgttctcccctgtcttcaattcctgatggcaacaagagagattctctgactgtttccaaggatgtcattctcagcctcacctccaagtttgattttatagaacaaccaataaatgtggtttcaccttccttgagttcacaac

SEQ ID NO: 7745 - DNA, 393 bp, Homo sapiens
ctgtagtcccagctactagggaggctgaggcacaagaatggtttgaacctgggaggcgaaggttgcagtgaaccaagatcgcgccactgtactccagcctgggcaacagagcaagacagagactccatctcaaaataaataaatagaaggctctccaggacattttgatgcccactgggatatgggaactcctgccatggggaggagggcgtctttaagaaggaataggccctattgagatgccagctgtagacctctaggagttgaccatcgagcctgagaaggtaaggagagggtggtaaggagacccctgactctgacctccaccctctcattcctctccagggcagtcccgcactctgatggccacatctggtgccaggtagtttctcg

SEQ ID NO: 7746 - DNA, 391 bp, Homo sapiens
ctgtagtcccagctactagggaggctgaggcacaagaatggtttgaacctgggaggcgaaggttgcagtgaaccaagatcgcgccactgtactccagcctgggcaacagagcaagacagagactccatctcaaaataaataaatagaaggctctccaggacattttgatgcccactgggatatgggaactcctgccatggggaggagggcgtctttaagaaggaataggccctattgagatgccagctgtagacctctaggagttgaccatcgagcctgagaaggtaaggagagggtgtaggagacccctgactctgacctccaccctctcattcctctccagggcagtcccgcactctgatggccacatctggtgccaggtagtttctcg

SEQ ID NO: 7747 - DNA, 391 bp, Homo sapiens
ctgtagtcccagctactagggaggctgaggcacaagaatggcttgaacctgggaggcgaaggttgcagtgaaccaagatcgcgccactgtactccagcctgggcaacagagcaagacagagactccatctcaaaataaataaatagaaggctctccaggacattttgatgcccactgggatatgggaactcctgccatggggaggagggcgtctttaagaaggaataggccctattgagatgccagctgtagacctctaggagttgaccatcgagcctgagaaggtaaggagagggtgtaggagacccctgactctgacctccaccctctcattcctctccagggcagtcccgcactctgatggccacatctggtgccaggtagtttctcg

SEQ ID NO: 7748 - DNA, 220 bp, Homo sapiens
agtttcgctcttgttgcccaggctgcagttcagtggcgcgatctcggctcaccacaacctccgcctcccgggttcaagcaattctcctgcctcagcctcccgagtagctgggattacaggcatgtgccaccaccccggctaattttgtatttttggtagaaacggggtttctccatgttggtcaggctggtcttgaactcccgacctcaggtgatccgcc

SEQ ID NO: 7749 - DNA, 292 bp, Homo sapiens
tttttttttgagacggagtttcgctcttgttgcccaggctggagttcagtggcgcgatctcggctcaccacaacctccgcctcccgggttcaagcaattctcctgcctcagcctcccgagtagctgggattacaggcatgtgccaccaccccggctaattttgtatttttggtagaaacggggtttctccatgttggtcaggctggtcttgaactcccgacctcaggtgatccgcctgcctcagcctcccaaagtgctgggattacaggcatgagccaccgcgcctggccca

SEQ ID NO: 7750 - DNA, 210 bp, Homo sapiens
tcactctgttgcccaggctggagtgcagtggcgcgatctcggctcactgcaacctctgccttccgggttcaagtgattctcctgcctcagcctcctgagtagctgggattacaggcacacgccaccacgcccgactaatttttgtattttttagtagagacggggtttcaccatgttggtcaggctggtctcaaactcctgacctcgtga

SEQ ID NO: 7751 - DNA, 290 bp, Homo sapiens
tttttttgagacggagtttcgctcttgttgcccaggctggagtgcattggcgcgatctcggctcaccacaacctccgcctcccgggttcaagcaattctcctgcctcagcctcccgagtagctgggattacaggcatgtgccaccaccccggctaattttgtatttttggtagaaacggggtttctccatgttggtcaggctggtcttgaactcccgacctcaggtgatccgcctgcctcagcctcccaaagtgctgggattacaggcatgagccaccgcgcctggccca

SEQ ID NO: 7752 - DNA, 1601 bp, Homo sapiens
ggccatcgtccccagtggtgaccagccctgccatgggaaactatagttcccacaaaaggaccaaagcacccaagcaggcccgcaaggagaggccggctgacatggacaaggcctggtggaaatcgttcctcaaccacctcactcggaagaagccggctgtgagggcgggggatggggagcagggctggggaggcagctggggggcagagaaagctggacaagtgggtgggaagggatgctgggagtctaggccttgtatgcagaagtcctagggggtgagggaggaattcgaaaatctctcccaaggatgaggatcccaggagcccatatgggtgtggatgggggtcctttcaaggtggctcacgcctgtaatcccaacacgttggtaggccaaggtgggtggataacttcagcccaggagtttgagattggcctgggcaacatagggaggccccatctctacaaaaattaaaacttagctggttgtggtggtgaatgcccgcagtcccagctactcagaagactgaggtggactacgtgagcccaggaggtcagggatgcagtgagccgttgacagcaccactgctccagcctgtaggacacagcaagaccctgtttgactcagtcttaaacaaaaaaagcccagaagggagggcagagattccagaaccagaaagtggatgagacttgagagccccggggggtgagcatgagtgggattctctcccaaccctggacgaacgggtggagatcccaacacggagaatcagttctagttggtactactggagctagaggcagggggaattccctagtgtcctctcttcagctcctaggctcagaacttccctgtctccctctcaaatgagcagaagccctggaccaggcgggggtgggaggtgctgaaagcccctgacatagggcctggaagggatctcataaacttagacggagctggtctcaggaagtcagcctgggatggatgagggtttccagaaaggaggcggagtccggggcgccacgcagggaagggcgggcttccccgcggcctgaattggacaggggtcccctccagccctgtgcacgagaggatgacaggacccgggtggacgacaggacccgggtggacgagggtcccaggagaagcgcggagcggccccgggtcgtgggctcggccctagcgcgctctcccgcctcacgcccctgttccacccccagaccaggatcgtgctgattctccccctggacaagcggcagccgctggccaacgctgggcaacggattgactacgcgtccggcgctgggctgggctccccggcggcacccagattgcgcggagcgggcgaaggtagcgagcgcgagccgaggatgccggtactgctgctgctgcggcggcaagaggcgcggcggccggaagagggcggggccagggcagctctgagctggccgcggctgctctcgcgcttccggtccccggggaaggctccccgcgaagccggccccgccgaggagcagccgcgcaaacggtgccgctgccctcgcccgcagctttaaacgcttggcccggaccccgcccaataaagagtgcgtggcaaccctgg

SEQ ID NO: 7753 - DNA, 3270 bp, Homo sapiens
tggaagggaccactgcctttattgcctctgtgctggggtcccagcctggggttcagaggcctctgggggcaataggtgaccctggacccaaattattgctacttggccaggtcaccttggggcttcccatactgccctgagaatgggtgggatgagggcatgcaaacgatatgcaaatgacatgcaaaccaacccagaggcctctggcacatccatgggtgctggaagagtcagagcctagtggcctgggagggcgacggggcacccagctcaggcccagcctcggaggcaaggtttgagggttggggggtccctgagcatcagccctgcttctgccgctggctgaggaggagcagaagcctggtcccaagacagcaggaagaaagcaggaccctcgctaggcggccagatggcctgaggcccacccagacagggacgggacctgccctgggtcgctcagccaggcagggacagcagggaccagaatccaggtctcctgagccaggcagaagccaaagtagcttggaggctgaagtgacaaacaataaaatacagggataaataaatcaataataaatagaaagcaagcagcccagtccctgatccctgggctgagagcccttccaccaggcccaagtccaggaggagacaagtcctggtctttgcgctgggctggccagtccagaaggctccagagggaggcaggcagggtcccggggccctcggcgtgtgcaggtctggctcagttgttattcattatccaccaggaggctgggggtcagaggcagggggtcaggagccctcaggagcccactgcccctccagggccacagtgagtgggggtccaccgcatacctgggaagaacacagtggtgagggtgtccggggcccgcaggtggtcgatgaggatgcgctggaaggccttgctgccaggcgactgctggtgcctgcagagacccaggctacagtgacctcgctctccccactcccgccccatcctgctgccaggatcagaccccggcccttctcacactgcctctggagcctcagtcctctcccctgtgacacggggaagctgtgtgggtggaatgaagggcactgcacacggtgcttggcataggcattgtcacatacatggtgacaagtgtgtattcactgagtgcctcctgtgtccctgtgctgtattcagctcttcccagtcacctcctttagcccataggagttggaactgttatcacttccattttggaaaggactcgggggctcgggcaggtggggtcactcatctgaggtcacagagccagtgagcgggagagcagaattagaaccctggcctgactcactccagggccacattccatggtgttagcggccagactggcactcataccttctccaggaggcctcatcctgccagaactcatacagggtgaaggaggcaccgtccagcatcttctgggcggacacactgtagggccaaagagatgggcaggccaggccagggctgccaccacctctgcctccccggcctggggcctcatgggaaccctgacccacccaggatggccagccccagcacccctctctgctcaccccctccccactggccatcccacctgccagctggggactcactgcagacaatggctctgggcccctgtgaagtccacatagcagcgcagggctcggtggaagtcctgcaggccttcctctgccacctggacctgcctctgggccatgaggatgtgctggtgggagaggcagccggtcagctggtgcggggccgggcacaggggagggactggctgtggcctccaggaggttctcagctgtttttctgtttgtttgttttttaagacagggtcttgctctcacccaggctggagtgcagtggtgtgtgggatcacggcttactgcagcttctatctcccaggctcaagtaatcctcccaccttggcctcccaaggtgctggaattacaggcatgagccatcacacctggcccctagccttcttgactgatgccagatccaacctaccctttagctgggttcctgccgccaacctgccccccagcctccctgtctccatcctcttctccctgtctccaagggtgctgcttgatccagccactgttcctcctcctgcagtatgccaccacttccttccaccctccagcttccgtccacactgccccagacctggctttcggaaatgctgatggggaaccaaagcccagagaaaggtggtggttcctgcaggttctcagaacccggcacctgcttgccaggcctgggggcggggcacatgcgcactgcagagggttggtgggcaaccggccccatgaatccccaattcatgagcacccccagacacggccatccagccgcttgcccctctcctgggctcaccaagtcaggccccttggccaggtcctcttcacgcaggggttccagccggggggcctgtgagggcacagagtgtgggccgggcctccagcatgggcctggctctggtggataccaggagggtcctcccttgtggggccctggccccacggccctcaccttgcactcgagctggtcgatgagctcctggaggcggttcacctggagccgccactgcatctcggcctctgagctgcgccctgtgtgtggggcccgtgcagggtcaggcaggggcctctcaggtcccgcaggtgctcagaatgaagtgaggggcagtgaaggagcgggccctgggggaaggggggatgcggtgcctgcctcggccaggcctcccaccccaccccaggcgcacctgtgtcagaagagccgggggaccaggtggatgaccggctgacactcctcagggctcggcgtcctgcccgccggctgccgcagagcctgctctgcgcctccacgctctctgcatctgacctagaggaagtgaggctcacagggccgaggactggggccccaggacgggataagcctgggtggggaagacaagcctcctgggactccgaggcctagccccaaagccagtctcatttcaccccgccatggctaccctgccatggcttccccgcccgaaaatgcaggctccaggatgctgggactgtggggatttggaatgggggtacaatgggcgcttgtgcactagccccacaggttgacagcacccttacataccgccagccatgggcctgggcctccagggtatctgacgccccctccagcgagctctgaagggcttgcagctggctcaccgtctcccgcagcaggaagcg

SEQ ID NO: 7754 - DNA, 411 bp, Homo sapiens
catctcctccaccttgcctgcaccaggctggaggctgcaagagctataacatcactcctgctaattgtgagaactgactcttccctaccatccacatggttacaatcagggtaaccatgttcttccatggggctgcacctcctgcccatacagtgattggcccaagctggtcctgtcagcccctccccctaggactgtgattcaggagctgtaagagaccatgttctctacttgaacatgcacaggctaagccagccttcagaataaaaacacaatgcaggccaagcgcagtggatcacgcctgtaaacccagcactttgggaggctgaggcaggcagatcacgaggtcaggagatcgagaccatcctggctaacacggtgaaaccccgtctctactaaaaatacaaaaaa

SEQ ID NO: 7755 - DNA, 712 bp, Homo sapiens
  SITE (526): n equals a,t,g, or c
  SITE (544): n equals a,t,g, or c
gaagaggccaacaatgtattcaagattgcaaacaattatttcacatggaacaaaacacaaacaatatcactgcaaacatcattgaaacaaggttaagacaaacaaaaaacctctataatatagacgagaaaaaatgttgccacatttttttcttatgcaattagaatctgtttgtttaaaaatatatccaagcgtttaattttcaatcttcaatgtcttccattaaaactaattaggactaattctaaaagtcaaaactcaattctctttagcagaataaacaatctgtgggttaagaatcataatttgttctgaaacaactgatgattctggggagacatttattaggttttgtcactggagaaattttcaaaagcactgaatctctatgctagagatagaaaagattctagaagttaaaaataatataaatcaaacacctcatttaacagaaagagtttctgactcaaagataattctaaccttaagaatcaaggcagagtaaggagtaagaaaccaagacttnctgatccttctttctttntcatacccctaccgactccaccaccaaaaaaagcagagccctcaaacttatttaagtttgattaaatgatggatactaatttgtgttggctatgtggtcttactgagaagcacttcaacaacctaaaactgacttaagtttataggaaaaaggggaagataattaaaa

SEQ ID NO: 7756 - DNA, 712 bp, Homo sapiens
gaagaggccaacaatgtattcaagattgcaaacaattatttcacatggaacaaaacacaaacaatatcactgcaaacatcattgaaacaaggttaagacaaacaaaaaacctctataatatagacgagaaaaaatgttgccacatttttttcttatgcaattagaatctgtttggttaaaaatatatccaagcgtttaattttcaaatcttcaatttcttcccattaaaactaattaggactaattctaagagtcaaaactcaaatctctttagcagaataaacaatctgtgggttaagaatcataatttgttctgaaacaactgatgattctggggagacatttattaggttttgtcactggagaaattacaaaagcactgaatctctatgctagagatagaaaagattctagaagttaaaaataatataaatcaaacacctcatttaacagaagagtttctgactcaaagataattctaaccttaagaatcaaggcagagtaaggagtaagaaaccaagaacttctgatccttcttcctttcaataacccctcccaaccccaccaccaaaaaaagcaaagccctcaaacttatttaagtttgattaaatgatggatactaatttctgttggctctgtggtcttactgagaagcactacaacaacctaaaactgacttaagtttataggaaaaaggggaagataattaaaa

SEQ ID NO: 7757 - DNA, 711 bp, Homo sapiens
gaagaggccaacaatgtattcaagattgcaaacaattatttcacatggaacaaaacacaaacaatatcactgcaaacatcattgaaacaaggttaagacaaacaaaaaacctctataatatagacgagaaaaaatgttgccacatttttttcttatgcaattagaatctgtttgtttaaaaatatatccaagcgtttaattttcaatcttcaatgtcttccattaaaactaattaggactaattctaaaagtcaaaactcaattctctttagcagaataaacaatctgtgggttaagaatcataatttgttctgaaacaactgatgattctggggagacatttattaggttttgtcactggagaaattttcaaaagcactgaatctctatgctagagatagaaaagattctagaagttaaaaataatataaatcaaacacctcatttaacagaagagtttctgactcaaagataattctaaccttaagaatcaaggcagagtaaggagtaagaaaccaagaacttctgatccttcttcctttcaataacccctcccaaccccaccaccaaaaaaagcaaagccctcaaacttatttaagtttgattaaatgatggatactaatttctgttggctctgtggtcttactgagaagcactacaacaacctaaaactgacttaagtttataggaaaaaggggaagataattaaaa

SEQ ID NO: 7758 - DNA, 3297 bp, Homo sapiens
tcaagaccaatcagtgtgctgtattcaggagacccatctcatgtgcaaagacacatataggctcaaaatagagggatggaggaagatctaccaagcaaattgaaagcaaaaaaaaaaaaaaaaaaaaaaaaaaagagcaggggttgcaatcctggtctctgataaaacagactttaaaccaacaaagatcaaaagagacaaagaaggccattacataatggtaaagggatcaattcaacaagaagagctaactatcttaaatatgtatgcacccaatacaggagcacccagatacataaagcaagttcttagagacctacgaagagacttagacttccacacaataatagtgggagactttaataccccactgtcaatattaaatggatcaacgagacagaaaattaacaaggatatccaggacttgaactcagctctggaccaagaagaccgaatagacatctacagaactctccaccccaaatcatcagaatatacattcttctcagcaccacatggcccttattctaaaactgaccacataattggaagtaaaacacttctcagcaaatgtaaaagaacagaaatcacaacaaactgtctctcagaccacagtgcaatcaaattagaactcaggattaagaaactcactcaaaaccacacaactacatggaaactgaacaacctgctcctgagtaactactgggtaaataacgaaatgaaggcagagataaagatgttctttgaaaccaatgaaaacaaagacacaacgtaccagaatctctaggacacatttaaagcagtgtatacagggaaatttatagcactaaatgcccacaagagaaagcaggagtgatctaaaactgacaccctaatatcacaattaaaagaactagagaaacaagagcaaacaaattcaaaagctagcagaagacaagcaataactaagatcagagcagaactgaagaagacagagacagaaaaaaaacccttcaaaaaaatcaatggctttttgaaaagatcaacaaaatagatagacagctagcaagactaataaagagagaagaatccaatagacacaataaaaaatgatgaagtggtcatcaccaccaatcccatagaaatacaaactaccatcagagaatactataaacacttctatgcaaataaactagaaaatctagaagaaatggataaattcctcgacacatacacccttccaagattaaactaggaagaagttaaatctctgaacaggacaataacaggttctgaaattgaggcaataatagcctaccaaccaaaaaaagtccaggaccagatggattcacagccgaattctaccagaggtacaaagaagagctggtaccattccttctgaaactattctgatcaacagaaaaagaggcaatcctccctaactcattttatgaggccagaatcatcttgataccaaagcctggcagagacacaacaaaaaaagagaattttaggccaatattcctgatgaacatcgatgtgaaaatcctcaataaaatcctggcaaaccgaattcagcagcacgtcaaaaagcttatccaccacgatcaagtcggcttcagccctgggatgcaaggctggttcaacatacgcaaattaataaacgtaatccatcacataaacagaaccaacaacaaaaaccacatgattatctcaacagatgcagaaaaggccttcgataaaattcaacagcctttcatgctaaaaactctcaataaactaggtatcgatggaacgtatctcaaataataaaagctatttatgacaaacccacagccaatatcgtattgaatgggcaaaaactggaagcattccatttgaaaaccgccacaagacaaggatcccctctctcgtcactccttttcaacatagtattggaagttctggccagggcaatcaggcaagagaaagcaataaaacgtattcaaatagggaagagaggaagtcaaattgtctctgtttacagatgataagattgtatatttacaaaaccccatcgtctcagccccaaatctccttaaactgataagcaacttcagcaaattctcaggatacaaaatcaatgtacaaaaatcacaagcatccctatacaccaaaacagacaaacagagagccagatcatgagtgaactcccattcacaattgctactaagagaataaaacacctaggaatacaacttataagcgatgtgaaggacctcttcaaggagaactacaaaccactgctcaaggaaataagagaggacacaaacaaatggaaaaacattccatgctcatggacagaaagaatcaatatcgtgaaaatggccttactacccaaagtaacttatagattcaatgctacccccatcaagctaccactgagtttcttcacagaattggaaaaaactactttaaacttcatatggaaccaaaaaagagccggcatagccaagacaatcctgggcaagaagaacaaagctggaagcatcacactacctgacttccaaactttactagaaggctacagtaaccaaaacagcatggtactggtaccaaaacagatatacagaccaatggaacagaacagaggcctcagaaataacaccacacatctatcaacatctgatctttgacaaacctgacacacacaagcaatggggaaaaagattccctatttaataaatggtgttgggaaaactggctagccatatgcagaaaactgaaactagaccacttctttacaacttatacaaaaatcaactcaagatggatcaaagacttaaacgtaagacctaaaaaccattaaaattctagaagaaaacctgggcaataccattcaggacataggcatgggcaaagacttcatgactaaaacaccaaaagcaatggcaacaaaagccaaaattgacaaatgggatctaattcaactaaagatattctgcacagcaaaagaaactatcatcagagtaaacagacaacctacagaatcggagaaaatttttgcaatctatccatctgacaaagggctaatacccagaatctacaaagaacttaaatttacaagaaaaaagcaaacaaccccatcaaaaaatgggcaaaggatatgaacagccacttctcaaaagaagacatttatgcagccaacagacatatgaaaaaatgctcatcatcactggtcattagagaaatgcaaatcaaaaccacaatgagataccatctcacgccagttagaatggcgatcattaaaaagttaggaaacaacagatgctggagagg

SEQ ID NO: 7759 - DNA, 1852 bp, Homo sapiens
cagtgccagcagtagttgtagtcagggttgtggtagaagctgcagcatttacaacagttggagcaacaggaatggtcactgccgtaggaacactgtccttttctttctcagtactatcctcagcccacaaacgatttgaggtactatagcatcataagcagcaacacaaaaaagagaaaaggaaaacagctaaacaatgaaagcactttctagcagctgaaaacacatgactacagggatggatttttttaaaacgcaaggtgagacatccttaaattatgaaccaaaaagctcacccagagttgtcaaagagagaaatttacattttaagcagtctaattcaaggaaagttcatagttcaggaacttaaaatttcccccagacatgcataattgcctcattttggaaccaatttttgtctgcaaataaatttaacaagataaatgaaaaaatccagagccccacaatcttctaaacaaaaacgcatgcacatacataagcacacagtagacctgagcacaaaatgtatctgtgacttacctgctttgtgtgcctgctgaggaagaacccgttgtaatctttgtagtagtgcttgtgctggaaagcaggcttttctgaagcccagctgcagaggtaactgttggtgttgatgtggtgcttggaacactagaactaatcaaatcatcttgtcttctaccaaaggagcaactaaacaaaagagtcatatctatataggatgtgtttgtatgtgtattctatagttaatgtctatacattatataaattacaaggctagaaaaaaaatttaaaaactgtgttcctaaatacaccaccagctccagcaccaagagttgcatctacaacttgctagagtttagaagatttcacttaattcggtagtgtatcattttagtgcctcctcccaactttctcaacaagacaaagatgatctgatatttcatatttttgaaactattccacaccatatggtcatgccaggctgagcctgaaaaacacactttggttttgtattacccagggaaaacaagacgttgacatttttttgaaggaaattatttcagcaatgggtcagatacctcggaagtaaccaatgcctacatgatacttgttcacatcttattctttttggttgcttttagtaaagaaattgtttatagggcttttttttcctcttcaatatgatactaccaacattccaactgaaggcatttccatagctctgagttctagggcaagccaaatctttccagatcaacaatgacaactagatccattaagacactggcctgtttaagttgttctagtcaaggagttccttctaaaggagttccttttaaatatgtaacaatccaaaaaacatttcataatatttgaagcttaattatataataggcataacaaattatcacctatctttaaatatatatcctgtgtttagagtaagttttaaacaacaaaaactcgtatttaataaaaacacatatttgtttaaaatgatgttaaactgagggctccaaacaaattgcctcatatttttataaatgaatacataaaaaccgcttaagaatagtattattaccttttatgatacgttgatccttcattaactgagctattttttttaagatcatcttcccattttctccttgtatatgaactacttgttcgcaaacttgaagaatctctgttaaaagaacacccttcagattctggtacataattttaaaataggattaagaaagcggtacactagtaaatattagtataagctgaaactagtaaaaacctttgggaggacacttaggaatactaatcaagaagataaagtaat

SEQ ID NO: 7760 - DNA, 1850 bp, Homo sapiens
cagtgccagcagtagttgtagtcagggttgtggtagaagctgcagcatttacaacagttggagcaacaggaatggtcactgccgtaggaacactgtccttttctttctcagtactatcctcagcccacaaacgatttgaggtactatagcatcataagcagcaacacaaaaaagagaaaaggaaaacagctaaacaatgaaagcactttctagcagctgaaaacacatgactacagggatggatttttttaaaacgcaaggtgagacatccttaaattatgaaccaaaaagctcacccagagttgtcaaagagagaaatttacattttaagcagtctaattcaaggaaagttcatagttcaggaacttaaaatttcccccagacatgcataattgcctcattttggaaccaatttttgtctgcaaataaatttaacaagataaatgaaaaaatccagagccccacaatcttctaaacaaaaacgcatgcacatacataagcacacagtagacctgagcacaaaatgtatctgtgacttacctgctttgtgtgcctgctgaggaagaacccgttgtaatctttgtagtagtgcttgtgctggaaagcaggcttttctgaagcccagctgcagaggtaactgttggtgttgatgtggtgcttggaacactagaactaatcaaatcatcttgtcttctaccaaaggagcaactaaacaaaagagtcatatctatataggatgtgtttgtatgtgtattctatagttaatgtctatacattatataaattacaaggctagaaaaaaaatttaaaaactgtgttcctaaatacaccaccagctccagcaccaagagttgcatctacaacttgctagagtttagaagatttcacttaattcggtagtgtatcattttagtgcctcctcccaactttctcaacaagacaaagatgatctgatatttcatatttttgaaactattccacaccatatggtcatgccagctgagcctgaaaaacacactttggttttgtattacccagggaaaacaagacgttgacatttttttgaaggaaattatttcagcaatgggtcagatacctcggaagtaaccaatgcctacatgatacttgttcacatcttattctttttggttgcttttagtaaagaaattgtttatagggcttttttttcctcttcaatatgatactaccaacattccaactgaaggcatttccatagctctgagttctaggcaagccaaatctttccagatcaacaatgacaactagatccattaagacactggcctgtttaagttgttctagtcaaggagttccttctaaaggagttccttttaaatatgtaacaatccaaaaaacatttcataatatttgaagcttaattatataataggcataacaaattatcacctatctttaaatatatatcctgtgtttagagtaagttttaaacaacaaaaactcgtatttaataaaaacacatatttgtttaaaatgatgttaaactgagggctccaaacaaattgcctcatatttttataaatgaatacataaaaaccgcttaagaatagtattattaccttttatgatacgttgatccttcattaactgagctattttttttaagatcatcttcccattttctccttgtatatgaactacttgttcgcaaacttgaagaatctctgttaaaagaacacccttcagattctggtacataattttaaaataggattaagaaagcggtacactagtaaatattagtataagctgaaactagtaaaaacctttgggaggacacttaggaatactaatcaagaagataaagtaat

SEQ ID NO: 7761 - DNA, 314 bp, Homo sapiens
taataatcttgttattaaaatttaagaaacattaattctgggatataagaggggcttgttatagaaaatgattgcataaattagggaaatgctatacattctaaccttctctaggaaaatcacaataaaatattgaaaggtctgtgatacaatcagagatataacctatattaacttggcttaactcagtacttcccaagaccatttaaatagagaatcctccacccctgacccattttgtggcatattcagtaaatatagaaaagtgctcctaagaacatcagcctggaaaatgtccaatggctattttttcc

SEQ ID NO: 7762 - DNA, 510 bp, Homo sapiens
ggcagcaagtacaaggtgatgaatgactgcactggccattgcttcatgaagagccacgaaaaaacagagccggtttctcagcaggtggctggctgctcagtcacaaaggacctctttggacaggctttatggaaatactgtgcctaggacagtcgctcaaaggcaggagggagagaaaatgcatctgcaagctcactttgtcttctttcttctgctggtcaaaatttgctggctggggcagttaacgccctcacacatccgagttgtgtcacctggcccctttggtagccactggggaagccagatctaggcatgtggcctgatggctcctgcggtggaaccacatgctcacactcagtcagtcaccactgggatgccctgggcagggcaggctgagtggctgggagatagctgagcctaagatatctaagcaagcacctgtgatgtatgcactgcagtgtccaaatgtgaaaaagcaagaaagggagatagaagcatatttttttctgg

SEQ ID NO: 7763 - DNA, 3601 bp, Homo sapiens
ctgtcctgatcttttcagttgagagacttcagctgttcattgctcatttggacttagttcaaggtcatgtcaaagaagaaggtgcacttacgctagttgttagctctgtcttttgtaaccatcaagttccatgcgattgatcagatttaggagggggcgttgggggataatcgtaagtgaaggacagtttgcaaccttgtgagtaggcaacgcttactcatctcatggcttcttccatcttaggtggccgtttttcagctgagtttcattttctagttctctgtggtaattctgttgtcattgttgtctccatagaattttgggtgtcaccaggtaaacagagccctcagcatctgaatagaaactgaacaggaacaggtaggtggtccctagcacatgatttgttgggccttggtagcatcattttttgggcaaaactttgaagtggatgaaatgcatcctttaggttcctacatctattttctgaattctgattcctttttctatccctctccctaggttttgttgtcttttctttccttttcagtgctttttctccccttcttcaccgaagctcctcctttctaattaaaaatatcttgcagataaaagtataactgagatgaaccaataggatgtatcctcagagtaatttcattcaatagggatcaacaccaaattcaaatgaattgtgacattttagacattcgtagtttgggtgtgtgtgtatctatatctatctatctgtatctaaatatgtatatacatatatattatacagatatataggatcagagtctcattctgttgcccaggatggagtgcagttgtgtgatcacagctcactgcagtctcagacttttgggctcaagaaatcctctcctctcagcctcccgagtggctgggactataggcatatgccaccacaactggctttttgttgttgttgttgttgtagagatggattctcactatgttgcctaggctggtcttgaacttctggcctcaagtgatcctcccgcattggcctcccaaagcaatgagaccacaggcatgagtgactgtgcccagccaggtatatttttttaaagggcacctcttagcagtttcaaataaaacctaggcagctgtgaatgctgcccacttgaaatatatgtctcagaaagactggaaatttctgccctgctcttcttcctgtttatctttctcctcctggtctttctgtttccctattgtcacctcactactgatgtcaatggtataggatatagaagtttaggaaacaaaataaattccctataaatccctcatcctttctgccttcaaaatgtatcaggtctttggtcaaggcatccttggacacacacctggacacatatacttaattcttaataatctatcaataatccatcaacccaattaaggcttatgtatcttggtgctaggtttttcctctagtttctcacacagacattttaaattcaaatataattttttaaaagttcatacataataacatcaaatgagtggtataagaagggaatgataagaagttcagagaagttggaaatggatttagtagacttaagcggtgatgaaacatgtaaaataaagaatgagatctgaactgggctttgaaggatttcaagaggcaggaaagaatagccattcaagaaagaagctaagtgggagagatggcatagggtatattaaaaaaagagtcacactgattgactagggcaggtttgtgtagcaaaataatgggagataaatcccgataggcagattgagatgagagcaagtggagcattggctcctgggctcaggggatcagacttcctactgtgagcaaagaggaatgtttcaaaaattctgagtgttgttgcaagttatgtttttagaaaagtagtgtatagaagaaattggagggtcaggaaggggtgattaggagggaagtaagggtaataatgtaggagatcaatgtagaagggatggtggctttagaggtggaacataaaaaagaggaaaatagaatcattctaaagagagagaaataattattaacttaaataaggtttctttagggattttccaggattgacctcaactaaaggattttatatactagtaaggtcatgttatgttgttaacaaatagtgttgagaaattagtgtgtgtgcagtaattacacacactaaataaaactcaggcagctatgaatgctgcccacttgaattacatgtttcagaaagactgagaatttctgctctgctcttcttcctgtttccttaacatctactctttagcactatagtaaactcttgattatttatactaactggaggagtgaagaatgcaaaattgtggataattccattaaaatttataactgatcctggagtgcagattctttattaatctacagttcattatttgattctatatgaataaaagtataaataatcagaaactgtgtttcaggctcgaggaatttttagcctaacaagagggagaaaagattaacatgaattgactaactggaaaaatgaaaaagatcatataaaatgaagtgcaacttaatctgtgctgtagggtttcagaaaacaaaaaagtcatgctgggttttggtataaatagacagaaaatatttcacagaataagaagcaatggtactgcccaggtcattgggattccgactgccaaatgggcactttgttcagttctccctgagcttccttggttccacgtggtctcctgagtcaatctcatacaaccctatctacccctctgttgcccctccttccctcagttagacacaacagcagaaactcccaggaaacaaacacgatttcacttttagctctgcaacaaagtggaatcttcctctacaggatcaacttgccgaaggaactggtaaagacagaaatcttatgaatgagaatgggtggcaaaagaaatgagagatggggaaatggcaatgtgtgttttattttgttttcgagtggctaccatgtgccaggttctatatgaggctataggagatacagtaatggtgagggaatgtgttgagtgagaatcgtgacccaccatggagattatacaccccaccaatgagattatagaccaagggaaaaggataagaaacaaatacttggttgtagatctttaaacatgtcaccttacgtaattctcacaatttttttcagatggggaaactggagttaaataaggttgaataaattataagcagaaaagcaggaatttgaacatgagtcttcagactccacagctgattgtctttctattatatcatagttccattcacagatataaaaattttaacctacatgtaggggtccctaccaggaataactgtcaggaggaagaaagaactacctctttaatcttcttattttatctttcatttattgtctttactgcagaagagattacactacatctgagatggagacctttcctctgctgctgctcagcctgggcctggttcttgcagaagcatcagaaagcacaatgaagataattaaagaagaatttacagacgaagagatgcaatatgacatggcaaaaagtggccaagaaa

SEQ ID NO: 7764 - DNA, 3602 bp, Homo sapiens
ctgtcctgatcttttcagttgagagacttcagctgttcattgctcatttggacttagttcaaggtcatgtcaaagaagaaggtgcacttacgctagttgttagctctgtcttttgtaaccatcaagttccatgcgattgatcagatttaggagggggcgttgggggataatcgtaagtgaaggacagtttgcaaccttgtgagtaggcaacgcttactcatctcatggcttcttccatcttaggtggccgtttttcagctgagtttcattttctagttctctgtggtaattctgttgtcattgttgtctccatagaattttgggtgtcaccaggtaaacagagccctcagcatctgaatagaaactgaacaggaacaggtaggtggtccctagcacatgatttgttgggccttggtagcatcattttttgggcaaaactttgaagtggatgaaatgcatcctttaggttcctacatctattttctgaattctgattcctttttctatccctctccctaggttttgttgtcttttctttccttttcagtgctttttctccccttcttcaccgaagctcctcctttctaattaaaaatatcttgcagataaaagtataactgagatgaaccaataggatgtatcctcagagtaatttcattcaatagggatcaacaccaaattcaaatgaattgtgacattttagacattcgtagtttgggtgtgtgtgtatctatatctatctatctgtatctaaatatgtatatacatatatattatacagatatataggatcagagtctcattctgttgcccaggatggagtgcagttgtgtgatcacagctcactgcagtctcagacttttgggctcaagaaatcctctcctctcagcctcccgagtggctgggactataggcatatgccaccacaactggctttttgttgttgttgttgttgtagagatggattctcactatgttgcctaggctggtcttgaacttctggcctcaagtgatcctcccgcattggcctcccaaagcaatgagaccacaggcatgagtgactgtgcccagccaggtatatttttttaaagggcacctcttagcagtttcaaataaaacctaggcagctgtgaatgctgcccacttgaaatatatgtctcagaaagactggaaatttctgccctgctcttcttcctgtttatctttctcctcctggtctttctgtttccctattgtcacctcactactgatgtcaatggtataggatatagaagtttaggaaacaaaataaattccctataaatccctcatcctttctgccttcaaaatgtatcaggtctttggtcaaggcatccttggacacacacctggacacatatacttaattcttaataatctatcaataatccatcaacccaattaaggcttatgtattcttggtgctaggtttttcctctagtttctcacacagacattttaaattcaaatataattttttaaaagttcatacataataacatcaaatgagtggtataagaagggaatgataagaagttcagagaagttggaaatggatttagtagacttaagcggtgatgaaacatgtaaaataaagaatgagatctgaactgggctttgaaggatttcaagaggcaggaaagaatagccattcaagaaagaagctaagtgggagagatggcatagggtatattaaaaaaagagtcacactgattgactagggcaggtttgtgtagcaaaataatgggagataaatcccgataggcagattgagatgagagcaagtggagcattggctcctgggctcaggggatcagacttcctactgtgagcaaagaggaatgtttcaaaaattctgagtgttgttgcaagttatgtttttagaaaagtagtgtatagaagaaattggagggtcaggaaggggtgattaggagggaagtaagggtaataatgtaggagatcaatgtagaagggatggtggctttagaggtggaacataaaaaagaggaaaatagaatcattctaaagagagagaaataattattaacttaaataacctttctttagggattttccaggattgacctcaactaaaggattttatatactagtaaggtcatgttatgttgttaacaaatagtgttgagaaattagtgtgtgtgcagtaattacacacactaaataaaactcaggcagctatgaatgctgcccacttgaattacatgtttcagaaagactgagaatttctgctctgctcttcttcctgtttccttaacatctactctttagcactatagtaaactcttgattatttatactaactggaggagtgaagaatgcaaaattgtggataattccattaaaatttataactgatcctggagtgcagattctttattaatctacagttcattatttgattctatatgaataaaagtataaataatcagaaactgtgtttcaggctcgaggaatttttagcctaacaagagggagaaaagattaacatgaattgactaactggaaaaatgaaaaagatcatataaaatgaagtgcaacttaatctgtgctgtagggtttcagaaaacaaaaaagtcatgctgggttttggtataaatagacagaaaatatttcacagaataagaagcaatggtactgcccaggtcattgggattccgactgccaaatgggcactttgttcagttctccctgagcttccttggttccacgtggtctcctgagtcaatctcatacaaccctatctacccctctgttgcccctccttccctcagttagacacaacagcagaaactcccaggaaacaaacacgatttcacttttagctctgcaacaaagtggaatcttcctctacaggatcaacttgccgaaggaactggtaaagacagaaatcttatgaatgagaatgggtggcaaaagaaatgagagatggggaaatggcaatgtgtgttttattttgttttcgagtggctaccatgtgccaggttctatatgaggctataggagatacagtaatggtgagggaatgtgttgagtgagaatcgtgacccaccatggagattatacaccccaccaatgagattatagaccaagggaaaaggataagaaacaaatacttggttgtagatctttaaacatgtcaccttacgtaattctcacaatttttttcagatggggaaactggagttaaataaggttgaataaattataagcagaaaagcaggaatttgaacatgagtcttcagactccacagctgattgtctttctattatatcatagttccattcacagatataaaaattttaacctacatgtaggggtccctaccaggaataactgtcaggaggaagaaagaactacctctttaatcttcttattttatctttcatttattgtctttactgcagaagagattacactacatctgagatggagacctttcctctgctgctgctcagcctgggcctggttcttgcagaagcatcagaaagcacaatgaagataattaaagaagaatttacagacgaagagatgcaatatgacatggcaaaaagtggccaagaaa

SEQ ID NO: 7765 - DNA, 3602 bp, Homo sapiens
ctgtcctgatcttttcagttgagagacttcagctgttcattgctcatttggacttagttcaaggtcatgtcaaagaagaaggtgcacttacgctagttgttagctctgtcttttgtaaccatcaagttccatgcgattgatcagatttaggagggggcgttgggggataatcgtaagtgaaggacagtttgcaaccttgtgagtaggcaacgcttactcatctcatggcttcttccatcttaggtggccgtttttcagctgagtttcattttctagttctctgtggtaattctgttgtcattgttgtctccatagaattttgggtgtcaccaggtaaacagagccctcagcatctgaatagaaactgaacaggaacaggtaggtggtccctagcacatgatttgttgggccttggtagcatcattttttgggcaaaactttgaagtggatgaaatgcatcctttaggttcctacatctattttctgaattctgattcctttttctatccctctccctaggttttgttgtcttttctttccttttcagtgctttttctccccttcttcaccgaagctcctcctttctaattaaaaatatcttgcagataaaagtataactgagatgaaccaataggatgtatcctcagagtaatttcattcaatagggatcaacaccaaattcaaatgaattgtgacattttagacattcgtagtttgggtgtgtgtgtatctatatctatctatctgtatctaaatatgtatatacatatatattatacagatatataggatcagagtctcattctgttgcccaggatggagtgcagttgtgtgatcacagctcactgcagtctcagacttttgggctcaagaaatcctctcctctcagcctcccgagtggctgggactataggcatatgccaccacaactggctttttgttgttgttgttgttgtagagatggattctcactatgttgcctaggctggtcttgaacttctggcctcaagtgatcctcccgcattggcctcccaaagcaatgagaccacaggcatgagtgactgtgcccagccaggtatatttttttaaagggcacctcttagcagtttcaaataaaacctaggcagctgtgaatgctgcccacttgaaatatatgtctcagaaagactggaaatttctgccctgctcttcttcctgtttatctttctcctcctggtctttctgtttccctattgtcacctcactactgatgtcaatggtataggatatagaagtttaggaaacaaaataaattccctataaatccctcatcctttctgccttcaaaatgtatcaggtctttggtcaaggcatccttggacacacacctggacacatatacttaattcttaataatctatcaataatccatcaacccaattaaggcttatgtattcttggtgctaggtttttcctctagtttctcacacagacattttaaattcaaatataattttttaaaagttcatacataataacatcaaatgagtggtataagaagggaatgataagaagttcagagaagttggaaatggatttagtagacttaagcggtgatgaaacatgtaaaataaagaatgagatctgaactgggctttgaaggatttcaagaggcaggaaagaatagccattcaagaaagaagctaagtgggagagatggcatagggtatattaaaaaaagagtcacactgattgactagggcaggtttgtgtagcaaaataatgggagataaatcccgataggcagattgagatgagagcaagtggagcattggctcctgggctcaggggatcagacttcctactgtgagcaaagaggaatgtttcaaaaattctgagtgttgttgcaagttatgtttttagaaaagtagtgtatagaagaaattggagggtcaggaaggggtgattaggagggaagtaagggtaataatgtaggagatcaatgtagaagggatggtggctttagaggtggaacataaaaaagaggaaaatagaatcattctaaagagagagaaataattattaacttaaataacctttctttagggattttccaggattgacctcaagtaaaggattttatatactagtaaggtcatgttatgttgttaacaaatagtgttgagaaattagtgtgtgtgcagtaattacacacactaaataaaactcaggcagctatgaatgctgcccacttgaattacatgtttcagaaagactgagaatttctgctctgctcttcttcctgtttccttaacatctactctttagcactatagtaaactcttgattatttatactaactggaggagtgaagaatgcaaaattgtggataattccattaaaatttataactgatcctggagtgcagattctttattaatctacagttcattatttgattctatatgaataaaagtataaataatcagaaactgtgtttcaggctcgaggaatttttagcctaacaagagggagaaaagattaacatgaattgactaactggaaaaatgaaaaagatcatataaaatgaagtgcaacttaatctgtgctgtagggtttcagaaaacaaaaaagtcatgctgggttttggtataaatagacagaaaatatttcacagaataagaagcaatggtactgcccaggtcattgggattccgactgccaaatgggcactttgttcagttctccctgagcttccttggttccacgtggtctcctgagtcaatctcatacaaccctatctacccctctgttgcccctccttccctcagttagacacaacagcagaaactcccaggaaacaaacacgatttcacttttagctctgcaacaaagtggaatcttcctctacaggatcaacttgccgaaggaactggtaaagacagaaatcttatgaatgagaatgggtggcaaaagaaatgagagatggggaaatggcaatgtgtgttttattttgttttcgagtggctaccatgtgccaggttctatatgaggctataggagatacagtaatggtgagggaatgtgttgagtgagaatcgtgacccaccatggagattatacaccccaccaatgagattatagaccaagggaaaaggataagaaacaaatacttggttgtagatctttaaacatgtcaccttacgtaattctcacaatttttttcagatggggaaactggagttaaataaggttgaataaattataagcagaaaagcaggaatttgaacatgagtcttcagactccacagctgattgtctttctattatatcatagttccattcacagatataaaaattttaacctacatgtaggggtccctaccaggaataactgtcaggaggaagaaagaactacctctttaatcttcttattttatctttcatttattgtctttactgcagaagagattacactacatctgagatggagacctttcctctgctgctgctcagcctgggcctggttcttgcagaagcatcagaaagcacaatgaagataattaaagaagaatttacagacgaagagatgcaatatgacatggcaaaaagtggccaagaaa

SEQ ID NO: 7766 - DNA, 301 bp, Homo sapiens
ctcgccgggcgcggtggctcacgcctgtaatcccaccactttgggaggccgaggcgggtggatcacgaggccaggagatcgagaccatcctggctaacacggtgaaaccctgactctactaaaaatacaaaaaattagccgggcgtggtggcgggcgcctatagtcccagctactccggaggctgaggcaagagaatggcgtgaacccaggaggcggagttgcagtgagccgagatcgcgccactgcactccagccggggcggcagagtgagactccgtctcaaaaaaaaaaaaaagaaat

SEQ ID NO: 7767 - DNA, 591 bp, Homo sapiens
tcagcatgtccaaggatgatatgtcttccacattactgacattcagaagtttacattataatgaccccaagggaaacagttcgggtaatgacaaagagtgttgcaatgacatgacagtctggagaaaagtttcagaagcaaacggatcgtgcaagtggagcaataacttcatccgcagctccacagaagtgatgcgcagggtccacagggcccccagctgcaagtttgtacagaatcctggcataagctgctgtgagagcctagaactggaaaatacagtgtgccagttcactacaggcaaacaattccccaggtgccaataccatagtgttacctcattagagaagatattgacagtgctgacaggtcattctctgatgagctggttagtttgtggctctaagttgtaaatcccacagagctttaggactagggtcttactaaagaaggacctcttcttgttcattcttgtttaaacctttccttaatatctactctttagcactatagtgaactcctgattatttattctaactggaggagtgaaaaatccaaaattgtggataattcaattaaaagttatgactgata

SEQ ID NO: 7768 - DNA, 591 bp, Homo sapiens; identical to SEQ ID NO: 7767

SEQ ID NO: 7769 - DNA, 177 bp, Homo sapiens
cactttgggaggccgaggcgggtggatcacgaggccaggagatcgagaccatcctggctaacacggtgaaaccctgactctactaaaaatacaaaaaattagccgggcgtggtggcgggcgcctatagtcccagctactccggaggctgaggcaagagaatggcgtgaacccaggag

SEQ ID NO: 7770 - DNA, 293 bp, Homo sapiens
ctcgccgggcgcggtggctcacgcctgtaatcccaccactttgggaggccgaggcgggtggatcacgaggccaggagatcgagaccatcctggctaacacggtgaaaccctgtctctactaaaaatacaaaaaattagccgggcgtggtggcgggcgcctatagtcccagctactccggaggctgaggcaagagaatggcgtgaacccaggaggcggagttgcagtgagccgagatcgcgccactgcactccagccggggcggcagagtgagactccgtctcaaaaaaaaaaa

SEQ ID NO: 7771 - DNA, 591 bp, Homo sapiens; identical to SEQ ID NO: 7767

SEQ ID NO: 7772 - DNA, 1047 bp, Homo sapiens
tggaaactaggggggttttaatgaagcttacttaaagcccttcaaactggagacctcacattcactattaggatggaggtaaaacatttattttcaaatgtcatagaaacaatatttataagtcctcttctccacctcttgtgtggtgatttactgatttctctctttctttccttctttttcttcagcttgcttcccatccagtcatcctttttcacaaacattccctggggcatcttgctgtcttctgcagagaaactgtaaaaaaagtagaaacattcccagctgtgggaatccagaacattccaaagtcatcttttcttttgttgagggggaaggtgggttccctgctcatagggtgaggcccaacctggagaaatcgggggacagactttctggttaggagtatctgaacaccacccctcagttggtcctcaagcccaccactcctgtcacctacccagtgcttcttaagccttatttcttgctacccggtccagttgatcttctgttttcattaaatcaagaggacctgtcccatgttacccctggagtttcagctctctacatgtgtacgttaaaagtttaagtggacgaagccagtgagggagcccaggaactcggtttaagccgcactttgacagtctgtgaatctgtttgacaactttctcccctctctgcctctgtgaacgcctgtgcaccaacgaaatagccacctagatccgctgtggtcagcgtcaggaaaacagcaagacccagctatgaatctgttgtcttcgtcctcctttaaatctcagcaatatttcagagagagagagagggagaaaaaaaatactgttcagctcaaaaatttcctctaaatgatacaaggaaaacgccgccgttccgtttgtaccctagatgtgggctgcagggctgcctgggctctgctaacaaaagcacaaagcgtgaatggcctggtgatggctgttttttcgcccatggacggagagatgagatcacgattttcacgaagagaagaaaccgccgctgccaggcggttgaggc

SEQ ID NO: 7773 - DNA, 1820 bp, Homo sapiens
cctttcccacccttcctccccacaaggctgtctgagatgccaccttccacctaaacatcatctcccaaattttaatccttaactttggtctctgacttctgcttgattccacagtctccacccacatttgcacaaaggaccatcacctgtccttcctggaatctctaaagttttctgctttccttctgtcctgatggccagctctgctaagtcagctgagatgcccaccatctccaaaaccgttaaccctactcctgatcctcatcaagaatatctggaccctaggattaccattgccttattcgaaattggatcacattccccttcctcctggggctctctccctttcctaaagaatagcagccatcaagttacagaacaacagactgcacagaagtttaacaatctcttaaaagaaattaaagatattcttaaaaatatggcaggttttgaagagaagatcacagaagcaaaagaactttttgaggaaaccaatattactgaggatgtgtcagcccacaaagaaaatatcagaggacttgacaaaatcaatgaaatgttatcaacaaacctgcctgttagtttagccccagagaaagaagacaatgaaaagaaacaggagatgatattggaaaccaatattactgaggatgtgtcagcccacaaagaaaatatcagaggacttgacaaaatcaatgaaatgttatcaacaaacctgcctgttagtttagccccagagaaagaagacaatgaaaagaaacagcagatgataatggaaaaccagaactctgagaacaccgcacaagtttttgcaagagatttggtaaatcgtttagaagaaaaaaaagtccttaacgaaactcaacaaagtcaggaaaaagcaaaaaacagacttaatgttcaagaagaaactatgaaaattaggaacaacatggagcagttactacaggaagcagaacactggagtaaacaacatactgagctcagtaaactgataaaatcctatcagaaatctcagaaagacataagtgaaactcttggaaataatggagtcggtttccaaacccagccaaataatgaagtgtcggctaagcatgagctggaggaacaggtgaagaaactgagccatgacacctattcattgcagttgatggcagctttgctagagaatgaatgccaaatcttacagcagagagtagagattctcaaggaactccatcatcagaaacagggaactctgcaagagaagccaattcagataaactataaacaggacaagaaaaatcagaagccatcagaagcaaagaaagtagaaatgtataagcagaacaagcaagcaatgaagggtacattttggaaaaaagacagatcctgtagaagcctggatgtttgtcttaataagaaagcttgcaatacccagttcaatattcatgttgcaagaaaagctcttaggggaaaaatgaggtcagctagcagcctaagatagaaaataccaaaagcagatgaaaaggtgaatccttaaaaaactacatctgttacctccaacttgtcagtcatgatcaatcatcaaaccttgggcagatctgctggttcaaccaagaaagagctatagaataaggagattgacacttatattactcattacttcagcagttatgtaagtctggtctttaatgaccattgtgtctacatcaagttcataacttttcacctttacaatctgcttgttttttttgtaattattagatagacagcctagagtgagaagttaaaggtccaattaagtaaagatctaaataaaaaccagaatacaagggaaa

SEQ ID NO: 7774 - DNA, 530 bp, Homo sapiens
agcctggacctgggatcaggaaggggttgcagggagggatggaggggctgaaaaccctgggcccctgcggccacccccacccccagtgtcccccaaccccagcctccagcagccatggaggaggcctggaccagccctgccagggatttgtagggtggccctgcctgggccccatctcctctgctcactcagtgcagtcccagagacctttcccagtcccaggggcagggggcagtgggcccacagtggagggcgaggctcccgggctctttctgtccagccaggagcagagagcgagagacactgaggggccgagacaaggagacctggaggcagggcttgggtggggctggcccctgcacccagggtcgaaccagggggctcccaggcaggggggatccattggctcagggaccagaccctgcccatgcccacccctgtcacgggagggaggggccctggcctcgcccagggtagccctgtcccagcttcagtgcgggctgctgggctctgcagaacagtccttcctg

SEQ ID NO: 7775 - DNA, 530 bp, Homo sapiens; identical to SEQ ID NO: 7774

SEQ ID NO: 7776 - DNA, 530 bp, Homo sapiens; identical to SEQ ID NO: 7774

SEQ ID NO: 7777 - DNA, 1197 bp, Homo sapiens
gagatgcacatggccctgaacaaccaggccaccgggctcctggtaggtccccacagggcagcacccagaaggacggggcccggcgggcgagaggccacggagggcggggcgaggggcctgctgtgcttacctcctctggcccccagaacctcaagaaggacatccggggcgtgctggaccagatggaggacatccagctggagattctcaggtaacacgggggcaggggccgggccagctgagcagggtctcagaaggtgtcctggtcaggacagggcagacccatccttgaccccccacctccacagcaccgagccagggggtgggtgccaggctgggggtggagggtgtggggtcctgacagtgaggcccccgcagggagcgggcccagtgccgcactcgagccaggaaggagaagcagatggcaagcatgtcggtgagccccccacgccccactctgggtctggagaccagccccccacccagggccctgcttgggcgagagggagaaatgggctccaggagggcaggtccagggcagggggcatcggaaaagtggctgcaggagcctgtccaggaggaaggggccagggctgcggtgcggggagccctgtctgaggagggtttcccaaagccagggatccctgccctcagcctggacactcggggtgggctctgatccagcccctccccgacagaaagggaggccaaagctgggaagctccaagggcctggcaggccagctctggtaggtgactgcacggcagagcccagcccccaggccccccgcgcgcccctgcccctgaccaccgccgcccgcaggctgctgaccctgaggctgctgctgggcgccctgctggtctggaccgctgcctacgtgtatgtggtgaaccccacacctttcgaggggctggtgccacccctgctgagccgtgccaccgtctggaagctccgggccctgctggaccccttcctgcgcctcaaagtggacggcttcctgcccttctaggccagaggcccagcggccccagcaaggaagccaggcgaccagcactgccccggatgcccagtggccgtgccagccccctgcacatggcaccactgtgcaccatccttgccagaagctgcagagaagggtggaggtggggtctgtcctgagggctgggcctgtggctggacatagaatcatgacataag

SEQ ID NO: 7778 - DNA, 311 bp, Homo sapiens
aggccaggcgcggtggctcacgcctgtaatcccagcactttgggaggtggagatgggtggatcatgaggtcaggagatcgagaccatcctggctaacacggtgaaaccccgtctctactaaaaatacaaaaaaattagccgggcgcggtgacaggcgcctgtagtcccagctactcgggaggctgaggcaggagaatggcgtgaacctgggaggcggagcttgcagtgagccgagattgcgccactgcactccagcctgggcgacagagcaagactccatctcaaaaaaaaaaaaaaaaaaaacagaggat

SEQ ID NO: 7779 - DNA, 1197 bp, Homo sapiens
gagatgcacatggccctgaacaaccaggccaccgggctcctggtaggtccccacagggcagcacccagaaggacggggcccggcgggcgagaggccacggagggcggggcgaggggcctgctgtgcttacctcctctggcccccagaacctcaagaaggacatccggggcgtgctggaccagatggaggacatccagctggagattctcaggtaacacgggggcaggggccgggccagctgagcagggtctcagaaggtgtcctggtcaggacagggcagacccatccttgaccccccacctccacagcaccgagccagggggtgggtgccaggctgggggtggagggtgtggggtcctgacagtgaggcccccgcagggagcgggcccagtgccgcactcgagccaggaaggagaagcagatggcaagcatgtcggtgagccccccacgccccactctgggtctggagaccagccccccacccagggccctgcttgggcgagagggagaaatgggctccaggagggcaggtccagggcagggggcatcggaaaagtggctgcaggagcctgtccaggaggaaggggccagggctgccgtgcggggagccctgtctgaggagggtttcccaaagccagggatccctgccctcagcctggacactcggggtgggctctgatccagcccctccccgacagaaagggaggccaaagctgggaagctccaagggcctggcaggccagctctggtaggtgactgcacggcagagcccagcccccaggccccccgcgcgcccctgcccctgaccaccgccgcccgcaggctgctgaccctgaggctgctgctgggcgccctgctggtctggaccgctgcctacgtgtacgtggtgaaccccacacctttcgaggggctggtgccacccctgctgagccgtgccaccgtctggaagctccgggccctgctggaccccttcctgcgcctcaaagtggacggcttcctgcccttctaggccagaggcccagcggccccagcaaggaggccaggcgaccagcactgccccggatgcccagtggccgtgccagccccctgcacatggcaccactgtgcaccatccttgccagaagctgcagagaagggtggaggtggggtctgtcctgagggctgggcctgtggctggacatagaatcatgacataag

SEQ ID NO: 7780 - DNA, 311 bp, Homo sapiens; identical to SEQ ID NO: 7778

SEQ ID NO: 7781 - DNA, 1197 bp, Homo sapiens
gagatgcacatggccctgaacaaccaggccaccgggctcctggtaggtccccacagggcagcacccagaaggacggggcccggcgggcgagaggccacggagggcggggcgaggggcctgctgtgcttacctcctctggcccccagaacctcaagaaggacatccggggcgtgctggaccagatggaggacatccagctggagattctcaggtaacacgggggcaggggccgggccagctgagcagggtctcagaaggtgtcctggtcaggacagggcagacccatccttgaccccccacctccacagcaccgagccagggggtgggtgccaggctgggggtggagggtgtggggtcctgacagtgaggcccccgcagggagcgggcccagtgccgcactcgagccaggaaggagaagcagatggcaagcatgtcggtgagccccccacgccccactctgggtctggagaccagccccccacccagggccctgcttgggcgagagggagaaatgggctccaggagggcaggtccagggcagggggcatcggaaaagtggctgcaggagcctgtccaggaggaaggggccagggctgcggtgcggggagccctgtctgaggagggtttcccaaagccagggatccctgccctcagcctggacactcggggtgggctctgatccagcccctccccgacagaaagggaggccaaagctgggaagctccaagggcctggcaggccagctctggtaggtgactgcacggcagagcccagcccccaggccccccgcgcgcccctgcccctgaccaccgccgcccgcaggctgctgaccctgaggctgctgctgggcgccctgctggtctggaccgctgcctacgtgtacgtggtgaaccccacacctttcgaggggctggtgccacccctgctgagccgtgccaccgtctggaagctccgggccctgctggaccccttcctgcgcctcaaagtggacggcttcctgcccttctaggccagaggcccagcggccccagcaaggaggccaggcgaccagcactgccccggatgcccagtggccgtgccagccccctgcacatggcaccactgtgcaccatccttgccagaagctgcagagaagggtggaggtggggtctgtcctgagggctgggcctgtggctggacatagaatcatgacataag

SEQ ID NO: 7782 - DNA, 314 bp, Homo sapiens
aggataacaggccaggcgcggtggctcacgcctgtaatcccagcactttgggaggtggagatgggtggatcatgaggtcaggagatcgagaccatcctggctaacacggtgaaaccccgtctctactaaaaatacaaaaaaattagccgggcgcggtgacaggcgcctgtagtcccagctactcgggaggctgaggcaggagaatggcgtgaacctgggaggcggagcttgcagtgagccgagattgcgccactgcactccagcctgggcgacagagcaagactccgtctcaaaaaaaaaaaaaaaaacagagg

SEQ ID NO: 7783 - DNA, 8148 bp, Homo sapiens
gggtttcatcatgttggccagcctggtctcgaactcatgacctcaggtgatttgcccacctcgtcctcctacagtgctgggattacaggcaggagccactgcacccggtctctaagtggacattctgagaaacagtttaaacacaaccgctctaggtcaaagccactgaagataacctttcagccccctctctgtttccttcaggtcgagtcccagacaccagaagtctgaatttggagaaggctggggtagatactagccccgacactcagaagatcctggtggactcccgggaagccacctctgtgccccacatctacgccattggtgacgtggtggaggtacggcatgcgtcccgggaccagggcccctgcccctgcctgctccaccacccctgctcgctgggctccggctgctgccgtcctgtaggagagaaacgacactttctctgatgacagaggctctgggccaaaccccagggccagcctgtctggagttctggggcaacctggacatgggcctcggctctctgcctttcctttcctttctgtggtgggagtgtggatggtctaaagacagctgcaagcaccagcagcagacgcctgctgggaatggggcatgggtcagctctgcacgcaggcctcaacccctggcaggtaggctagaggcataggcttagaaatgccaccatggccttggggccgtcctgtccccacagggttgagaggcaggtctagttcgggcccacctggccccgccctccccgcctcagtatcctctggcttgcctctctgggcatcacaccggggcaggtcctttgctctcagctgctgctgctgctgtgaagtggagaccggtgccagtctttcctgggtgggggctctggagccctccttacacatggccccagtaagggactgtggtggtcagtcttgggatactgcaccctggcagcctcaggagtgctcggcctgtcctgcatgtgtccagcacctgctgctgaaagtggctctggagggtcgctgagagcttctttgtagcgagacctgtcagtgtctgcgtcctggggctgtggtaccaaatcaccacacacgggtggcccagaacaacagacatggattatctcacgtttggggggcagtagtctgaaatgaaagtgtcagctggggctgggtgcagtgtctcatgcttgtaatcccagcactttgggactccgaggcaggcagattacttgaggtcaggagttcaagaccagcctagccaacatggtgaaaccgtctctactaaaaaaatacaaaaattagccaggcgtggtggcacgtatctgtaatcccagctacccgggaggctgaggcaggagaatcatttgaactcgggaggaggaaggcggaggttaccgtgagccaagattgtgccactgcactccagcctgggtgacagagcgagactccatgtcagaaagtgtcagctgggccaggctccctcggaagcctctggggtaggatgccccaggcgtccctcgggttgtggctatatcactcctctctctgcctcatcgtcatgtgacagtctcctgggtgtgtctctgggccctgatttgcctcttacagtttctctgcaattggacttagggtccaccctaatccaggatgacttcatttccatccttaccttaattgtatctgcaaagatcttatttccaaataaggtcacactctgaggctccaggcagaccctgcagggtcctgtagggcccatctagccgacccgattgtgtggacagagcatgtggctccatgtgcctcagccaccctgcagccccagcttgcttagctggatggttcagctgctcagtgatttctgcaagcgcagcctctgcctgtggaccatgtaggtgcagtggtctctggttgcagggtctgttgaatcctgtgggcgctgcaccctgagacagtgccatgtgcatctctgtgcacagcgggaagcctcccttctgtctgggaatctgagttttccctctgcaagtgtgtagctcccaggctcctgtgttggaaactggaacatttcaaaccgttttgccagaaatgcatggcgcacacaaaggcattctttatttaaacattaaatccactctgtcagaaaggtcgttctgaatagtccaaagagttaacacccaaccagtggtcccttgagcggctgggaagagcctgtgggcggggcgggggctattgtttaatgagatgttgtgtgctgtgcgccgcccgccgggatgtttccgtagttagtcaggcctgctggaatgcgcaggctgcgctctgagtttatctccacggatctctatgcatttctggaatgccaaacaacatctgcatttcctgctgccatggtgattggcagcccatcccagaggacggtgctggaacccccaaggctgggcacaccctgggacggagggatctccagcacagcgacattctgatttggaatttgttatggactgtgacgtgcagatcaagctgcacgtcaggagcacatggaacgctttggggtccctttttagccggggattccagtgaatgaaaacggtagcaggggctcttttgagcttggtcatggggcagccctccgaggtcagcaatgtgcagaaggggtttggagagaaggcttgagcatgtgagggtggcacggccagcctcatcagcagcggactcctttcccagggcagagtggagggcagcaaacaggagaatgagcaacctacctaggtccttgggatgcccctcaggaggacgagctctagggggaatgctgtacgtcaccatgctcggtgccagtgttggggattttctaaagggagatgcccactcggagggcaaagggtgatggcataggggctgcatataaccccggacatggtgctgacgtggcccccctgtgccttccccaaggggcggcctgagctgacacccatagcgatcatggccgggaggctcctggtgcagcggctcttcggcgggtcctcagatctgatggactacgacaatgtgagttctctagcaggacgccacgtgcagcctaggacaggctgagttcgaggctagctcttctggggtgaggggcctttgtgcgctgtgtgtctgcatgtagatgtgggcatgcgtgtgtgtgcgcttatgtgggtgtgttgtacacacgtgtgtgtgcatgcatgggtgtgtggctcagttctgagagtgtggcgcaggcgtgggcaggtgggtcgcctactgtgcttgcagcctgctctgggcgcatctggtcctggtctgtgatcgctgctctttgtgtcacatgcagtggggaacttcggttttcggggcccaagggccctccctgactccagacctgctttcaggttcccacgaccgtcttcaccccgctggagtatggctgtgtggggctgtccgaggaggaggcagtggctcgccacgggcaggagcatgttgaggtgaggcctgggagcagcacagctgaggacagtggcgactccacgacctcaccccatgctctgggcggaggccttgtgagcagggtgccaaggtctctcctttccaggggccctgagcagtggctgtgtgtagcgggaagggacacgttgggggcagcctcagaagtgggggtgcctgggctttggcagccttggggtgactgggcttaggtgcctctggtctctgccaccatgtgtcacagcagtgaggggaaggcccttggctgccttgttctgagggcaaggagaagccctgtggcccagaagcccccagccccaccccagccatgctgcaggggtgcccagcaccagcagggtcaccaccacggtgccacccgctcccctgctgaggtcagctgagcactggccccactccagcacacagcagcttgtccctgaaagcaccagggccccgaagatgcctctgtgctgtccccaccttgcagggccatgaatctcactctacccagaaaagtttctcccaggggcctccgacctctgcttccacccccaccccccccaccaccctgcacctcgtcttcctggactgcccagggtttctcccaggcgagagccccccgccccccgccccccaccacatcctgatacccatcctcttccagcttcttccaggctcaggcactcacccttgaggaaaggggttttcatcgagcaagcctgctttgggggtctgctctggcaggtggctgtggctccggggtggcctggagggatgcgggggctctgaagcctgccgggccgtggtagctggaagccttcggtgcggtttcatcttgctgccgctgcagcttgcaggcacccagagaaaccggagcctgcagcctgggcggtggggcctgcggcctttggggatgagacactgggctccagggctggccccttccccctgcaccccagaactctccatcaacaggacgggcctgacaggccagccttccccgaggcactttatttgctatttttgtttgattcatcacaagtgtgctgggacatatgttcctggcattttataatgttgttttatgtttcacaatgttgaatggccaaatactctgtttgttttcttttcaattctgtcttagttagaacaatattctctgaagttccattaattaataatggctgtacagcacatgtgagggccccactcattttttacttggccgcagccccggacacgctgtcgagcccttcaggggtgctgaaagcctttgtccaacagctccggctccggtgtggccacagcggccttgctccagtgagggccaagcaaacaccagggtgcctgagggagcccaggtggcctcctgctcacccattcttgcctccaccatttgttgtgggtgagctacgtccacccaggtttgctgtgcctggcctggctgcttggattgcctgatgcctgctctgctgctgtggtttacgggggtcccaggcctgggtgggacagggtctgtcctgcagagcatggctccagccactggctgcctgcacgtgagagggcctgcacacaccccgtggccagccaagccctcatccccatcccagaccagaccttcaggccagatggatggttcctgcccgccatgaccctgccttgcccatgcagcctgtgggagctgcaggtgccacgaggtttgtttgtcgcagcactgatccagggttggtatcctgtcctcaggtctatcacgcccattataaaccactggagttcacggtggctggacgagatgcatcccagtgttatgtaaaggtgagcatccctgtggcccagggtgctgaggatgagagggagggtggcaaagagcctggcagggtgaacacccgaggactggccccacccatgcctcccaggcagggtgcagggtggatgcagggtggacgcaacccagccccctcctgggctggtggctgagatgtgcggctttcagatggtgtgcctgagggagcccccacagctggtgctgggcctgcatttccttggccccaacgcaggcgaagttactcaaggatttgctctggggatcaagtaagtcccgaggaatgcaggctgcgatgcgatgtgcagctgggtatccctcgagtgccggcagtcctacagtggagagctgctgccactcttgcggcatttatgtggccttcgtgggtttgcagcagagattcctcaggcccctcagacagggcgggttttagggggacaagaggcggttctgccccagccagacgctgttgagccagccagagccaggtgaggtgtcccctgtggccccgggtcgctgctagggcccttgcccacctggccaagcaccacgccaccatgagcagagtgccagtacctggagagccaccccagggctgctgtgtgtcttctggagctggggccattgcctgggtcttgggctcaggctgtgtgttttcggggtcccggggtcaaaggaagccatggcaaaggctctgggtgggttgacaggggtagttggaggttgggacattgtgcatggcctgagagaggtggctggctggatgtggggcctgggaggtggtggtgtggtgaggccaggatgcgctgtctgtgggtaaagcagagagcagaggcctaaggcaggactgtgcctagcaggggaggatggaacagcaggaagccaggccagggcaagccagggcgtggctgggtgggaggtgggctggacgagcactaggcatctgctgggagggaggtggatggcacccacgggtgtgggcaggggtcctggctgctggctgggggtcaggggacagtgaggagaccagcagcctctgaggccctcctcttcccgggggtgggatgctgtggacccccctccctgtgctgaccccgcctgcctcccccatcccccatgtgcaggtgtggggcttcctatgcgcaggtgatgcggaccgtgggtatccatcccacatgctctgaggaggtagtcaagctgcgcatctccaagcgctcaggcctggaccccacggtgacaggctgctgagggtaagcgccatccctgcaggccagggcacacggtgcgcccgccgccagctcctcggaggccagacccaggtatgcaggtggggctggctctgtttgaggacagggcatgtggcaggggtgcaggagccctggccatgggctccctccaggtgtacagcaaggctacacctgccacgccacccagaatgggtgctccatcctgtaaccaggccacagcggtgacaggcagaaggggaagttcccaggggcccaaacctccccgggggaccccagaccccggcctggccacagctgctccccacacacaggaggtatcaagaaacggggctcatccttagcagcctatcccaggtggatgttggcgtggaaggtgtcccgggtgggctaaagtcgggcatctcaagttgctgccccacagggggctgcagtcgggaagctggcctcccaccgaggcctcccaccaaggcctggctcctgcagagttcagcgcccgctcatttccctatctcccagaaggtggagacgctgccctgtgatggccggccctgcccagcctgccctgcacatctggttctgttccagctctgcagagccaggctgaccggggggcatgttgttcatcgtgacctcttctggggaggaagaaactggcaagggctcctggcctctgccccagggatgcctgtgccagagccccctcgcctcgtggtctaatagtgcatcctccggcctgggctgcagggcaggggccggggcagggtgggccctcagcccgtgccatccagcccacctggggcacccccatggctgtcagcccctcccagggttggggtgtttgggctccatctctcccccggggctgaggtggagaccaggcagagcagtgggctccccccaagatgcctgtggacaggctctagggtctgcatggcgccgaggggctctggggaggcctctctgggggtactcagggccccctgcttcaccgtggccgcctccccccggcggggccgcgctcgatagggataaacaaagggcatcctgaggaaactcttatcagaacattacacctcccagagctgttttgttaggagcctgctataaatttttatcatttcaaaatatttttgtagcaccgcgtcgctccctgtgacgcatcgccctggggtggggccattctctgctgggtttatttctcacccatctcccttgggggtccctgggtgtggcagtgggagacatagctaggctgatgtgaggggtgggtggctgacctgtgctgaccttcctgttgttggcaggatggctgcaggccaggtttggggggcctcaaccctctcctggagcgcctgtgagatggtcagcgtggagcgcaagtgctggacaggtggcccgtgtgccccacagggatggctcaggggactgtccacctcacccctgcacctctcagcctctgccgccgggcacccccccccaggctcctggtgccagatgatgacgacctgggtggaaacctaccctgtgggcacccatgtccgagccccctggcatttctgcaatgcaaataaagagggtactttttctgaagtgt

SEQ ID NO: 7784 - DNA, 507 bp, Homo sapiens
gctgggccaggccctcccacaagtgcagctctagatcagccgtgtcccatttaacacacggctggtggcatgcctgggccggatcctgtgggtggggctcgcctctaggcctgcaagttttttttgccgtggaggcaccgccaggctgggaggtcagcctacacctgctgcctgggctctggggggtggctctgggcagcagccaggaagggggcagagggcctgtggattccttggccctgggatcagcccctgccagggagcatggggaaagcttgaaatggccttggtgcttttgtggtgatggagaggatgcagctgtgtggagcccgcactacacactgggccgcattctgccgggagggcctcttgcctccctgtctgcccagccgaccaggagtacctgttgctggtggcctgagagccacccacacgtccatgtccccactggcccctccaggtggttttctctgcgtgccccttcttcccagaacacaccgtgtacca

SEQ ID NO: 7785 - DNA, 200 bp, Homo sapiens
atcactgggaaggtggggaaggtgctgggttgggtccctggaactgcagtcagtgatccaaaggagtgggcctgttagggggttcacaggtcgtgggatgagctcttatgagcgccggctaagtgccgggctctggggtgcccttggcatgtacgggctcccctaattcccaagaccaaccgcccccaacccacttcata

SEQ ID NO: 7786 - DNA, 204 bp, Homo sapiens
atcactgggaaggtggggaaggtgctgggttgggtccctggaactgcagtcagtgatccaaaggagtgggcctgttagggggttcacaggtcgtgggatgagctcttatgagcgccggctaagtgccgggctctggggtgcccttggcatgtacgggctcccctaattcccaagaccaaccgcccccaacccacttcataggtg

SEQ ID NO: 7787 - DNA, 204 bp, Homo sapiens; identical to SEQ ID NO: 7786

SEQ ID NO: 7788 - DNA, 5284 bp, Homo sapiens
tctttggctgcaccaaaaaaattaagatctccagaagggtgagtactcagcttgctcctcccgggagccacctatctcctgcagcctagcagctgcctcctcccttacctgggtgggaggactcagggatggtctctgatggaattatggaaccttagattcagagacctaggatgttagaattccggaatctgaaattcggaagggacagttgaagacattagcccggttctttcctagtgcaggagtgccctctgcagccttcccaactgggacaggctctttcccttcctttctttcagttcagccccatccccgtgggaactggaaaggctctgaatgggaggagtctcttctgaattcttccttctgggctttaccagaccatattcccaggatttcatcagggtgcatgcctcgtgcataagaaagaacagtgggcatggagggtgggctgggagatagtccccaaggtgacgggttgaggaagaccctcagtgcctcatgtctagtccttggcttggccctgtcccaatgcccagccctgtgccaggcataagagcaagccccctccacctttgcccagcagaggagatgccgatgcggccatgctttccacagatggaacccatctggacatgcgactggggagtggaaggatccccagtgggaattgcactgggggaggcttagatatgttgactttcatttctctctttgggattaagagacttgctggaggctcagggccgggcctctgggatttggagagaggaatggagtacattttcaccatgtatctgttagtggccagggctggagctgtgtgtttgatcaactaatggtgactgcttggcatctcagcccccagccccagtctcatggcatcctctgccatactggaatcataagttcttggttgtcatggcaacaggatgggagtgggagtggctcagggcaggctctccccattgctggaggctcttcccattgctagaggattgagcccaagtacaaatcccatagagcatctttcacgtgtgcaaaggtcacctgagtgttcatgaaaatctgagcaaatctcgactgtactcatggaagtcctaagcagacctccccacacctgatatgttgctataggtgctgaacgaggatgggtactcctccaccatcaaggacaagatcctgaccattgatgtgaagcccggttggaggcagggcacacgcatcacctttgagaaggaaggggaccaggtgaggggggaagaagctgactcaggtcagtcactgagctcaggcggtgggaagactgaggaggaaaggaagggaaaggaggcaatactttttcctgcccctgtgagccttggtctgtagagagcccagtctgcagagtgggtgagatgggatccctaatgttccttccaaggaacagagccttagccttacagtgcttctgtgaacaggcagcccagggactgtccccattttacagagtgggaaatgggggcccagagaagaaagggacttgctcagggcaagaacatgggagctgaaaggagatcccagtctgaactccagtgttttcctgattttcttcagtgcttctcagaataaagcccaattacaggagctactcagaaaccatttaatcataataattttatttatttatgtatttatttatttatttatttttattttgagatggagtctcactgtcgcccaggctggagtgaggtggcatgatttcagctcattgcagcctccacctcctggattcaagcaattatcctgccccagcctcctgagtagctgggactacaggcatgtgccaccacgcccagctaatttttttttttttttttttttttttgagacagagtctcgctctgttacccaggctggaaggcagtggtgcgatctcagctcactgcaaactccgcctcccgggttcaagttattctgctgcctcagcttccccagtagctgggattgcaggcatgcaccaccacacccgactaatttttgtatttttagtagagacggggtttcaccatgttggccaggctggtcttgaactcctgacctcaggtgatccacctgtctcggcctcccaaagtgctgggattacaggcgtgagccactgcgcccagccacccagctaatttttgtatttttatagagatagggtttctccgtgttggccagactggcctcgaaatcctgacctcaggtgatacgcctgcctcggcctcccaaagtgcctgggattaaaggtgtgagccaccgtgcctggcctattaataataattttaaattaaatactatttaaataaaaacataaatttattgtccaaggcgtgctgaatccttaagtcctgagaagaggcattcagagccagggaagacacattcctttgcctgcactttttgccccctttctcacctatgaaacatctacctccggtctggcctggtggctcacacttatagcctcagcactttgggaggccaaggcaggagaatcacttgagctcagaagtttgagaccagtctgggcaacatagcgagaccttgtctctactaaaaataaaaaatttagctgggcatggtagtgtgtgcctgtggtcccagatactcaggagactgaggcaggaggatcttttgagccgaggaggtcaaggctgcagtgaagtatgatcatgccactgcacttcagcctgggcaacagagcgagatcctgtctaaaaacaaaacaaacagacaaaatacaaataaaacatctacttcgaataaacacgcttcaaaacccagctccagtgttccccgctctgggcagcctcctctgagccccagcctctgggcctccctttatcatgtcttgagcgtgctgaggattcactgtcagtgttaggggccagtctgattcctctgtccccagcgcccagaagagacctcagcagagttttggtgacttaatgaagtttgggacaggggtgtcatgcctggagttactagcaagacagagacatacgggcagttgcctgacgcccagcttagtgttccacctgcctgccgtctgaggaagcctctccgcccctccagctgagtgtgtctattttgggcatgctcagtacagaagtaattctggggggattcatttgggtaagcttctcgggcttctaatccatctgggctatgggggccaaactgaaaaggcccttccagaaaacctgctctcatctccccattgtacagatgaagacatggagacaagtagaggcaggaacttggccaaggtcacacggccaactagtccttgtcaccttttggcgtcccctgcccaggccccaacatcatcccagcagacatcattttcatcgtaaaggagaagctacagcctcgttccgcagggagaatgacaacctcttcttcgtgaaccccatccctcttggcaaggtgagtgggcaaagtgcaggagcagcggggaggagatcagagtgagccctgcctgacacgcctagacttgcctcccctcccacaaccacctgccatcagtcactaagccctgtggttccaccctctaaatcaccatccacttggtcccgtctgctcatctgcaccgcctggatctgtacaccagatctgcgcagcaggccttcctccccacttctcatctcctccaggctcttctccttagggatcctgccacacactcatcagaccctgccacactcctgtctaaacatctttgtgccactggaggccctctgcgatctgctccctgcttactccttcccctgcactcccgccccttcgccgcatagcaccctgcctgtgtggcgcattgtcacacctccgttctcatttctgctgggccctctccctggaatgctgtctattcacctgaccctatagggtcctcatcaatagctaccaccactgctaccacttcctgccccactcctgaatggtttaggggcctctccttggctcccacaaacgcttttattctgtctccatcattacatttatacaacatccatcttacctgccagatccatccatctttcctgccagtgcagaaaattgcatgggtcattcacctattagttattgaacagcctcgtctcccttgtgcccaactcacagtctggcactggacaggttcctaaggtgccttctaaataggagagccatggtgaccctcctcagccccacctttggccctgaccctccctaggctctcacctgctgcactgtggaggtgaggaccctagatgaccgtctgctcaacatccccatcaatgacatcatccagtgagtccatctgccttgggccccagtagccaagagaagggctagcctgggatttaggtggtagtgtgacaggtctgcccagtagagttgtacaggctgcccccagcagaagggttccctgctgaggggatagagaggaccaaaactgaacccacactggccaagctgtgggctgcaatcacctggcaaaaggaacatctttttctaatccacacaaagccactgcagaggctagaggcccccattgttgggcaaccctgtagcctccatgccctgcaaacttctcattagagttctgagttgcatatcctaagtccttttccaagaaaggccctctgcccgtgaggaggtttgcctggcagcccagcaccctcgccctcaccccagggtttgctcacctttacttcccgtttcccatgtcttaaacaaagtttctggaatcctccatcagagactcagtgtaaacaggttttcagggagctcctttcccaaccagttctggctaagaaccactccaggtgaagactgcagtgactgtccccttcctggggttatgtgagtaggggttatatgacagggacctgctgaggtgctgctctgggatgccctctatgctcctttctttcatcctatttcagccccaaatacttcaagaaggtgccaggggaggggatgccattgccggagaccccactaagaaaggggatctcttcatcttcttcgacatccagttccccacccgcctcacaccccagaagaagcagatgctgcgccaggcattgctgacatgactgtggtgggctggagcaggggtgagaggaggctagccgggcctcaccccacccctacccgccacagcctcagggtgtgcaggggagcctgctgcacagatatgatacaagggtgggatggcgcagggcttaaactgacataataaagatctatttcctgtcctccagctaca

SEQ ID NO: 7789 - DNA, 5281 bp, Homo sapiens
  SITE (1273): n equals a,t,g, or c
tctttggctgcaccaaaaaaattaagatctccagaagggtgagtactcagcttgctcctcccgggagccacctatctcctgcagcctagcagctgcctcctcccttacctgggtgggaggactcagggatggtctctgatggaattatggaaccttagattcagagacctaggatgttagaattccggaatctgaaattcggaagggacagttgaagacattagcccggttctttcctagtgcaggagtgccctctgcagccttcccaactgggacaggctctttcccttcctttctttcagttcagccccatccccgtgggaactggaaaggctctgaatgggaggagtctcttctgaattcttccttctgggctttaccagaccatattcccaggatttcatcagggtgcatgcctcgtgcataagaaagaacagtgggcatggagggtgggctgggagatagtccccaaggtgacgggttgaggaagaccctcagtgcctcatgtctagtccttggcttggccctgtcccatggcccagccctgtgccaggcataagagcaagccccctccacctttgcccagcagaggagatgccgatgcggccatgctttccacagatggaacccatctggacatgcgactggggagtggaaggatccccagtggggaatgcactgggggaggcttagatatgttgactttcatttctctctttgggattaagagacttgctggaggctcagggccgggcctctgggatttggagagaggaatggagtacattttcaccatgtatctgttagtggccagggctggagctgtgtgtttgatcaactaatggtgactgcttggcatctcagcccccagccccagtctcatggcatcctctgccatactggaatcataagttcttggttgtcatggcaacaggatgggagtgggagtggctcagggcaggctctccccattgctggaggctcttcccattgctagaggattgagcccaagtacaaatcccatagagcatctttcacgtgtgcaaaggtcacctgagtgttcatgaaaatctgagcaaatctcgactgtactcatggaagtcctaagcagacctccccacacctgatatgttgctataggtgctgaacgaggatggtactcctccaccatcaaggacaagatcctgaccattgatgtgaagcccggttggaggcagggcacacgcatcacctttgagaaggaaggggaccaggtgaggggggaagaagctgnctcaggtcagtcactgagctcaggcggtgggaagactgtggaggaatggaagggaaaggaggcaatactttttcctgcccctgtgagccttggtctgttgagagcccagtctgcagagtgggtgagatgggatccctaatgttccttccaaggaacagagccttagccttacagtgcttctgtgaacaggcagcccagggactgtccccattttacagagtgggaaatgggggcccagagaagaaagggacttgcccagggcagaacatgggagctgaaaggagatcccagtctgaactccagtgttttcctgattttcttcagtgcttctcagaataaagcccaattacaggagctactcagaaaccatttaatcataataattttatttatttatgtatttatttatttatttatttttattttgagatggagtctcactgtcgcccaggctggagtgaggtggcatgatttcagctcattgcagcctccacctcctggattcaagcaattatcctgccccagcctcctgagtagctgggactacaggcatgtgccaccacgcccagctaatttttttttttttttttttttttttgagacagagtctcgctctgttacccaggctggaaggcagtggtgcgatctcagctcactgcaaactccgcctcccgggttcaagttattctgctgcctcagcttccccagtagctgggattgcaggcatgcaccaccacacccgactaatttttgtatttttagtagagacggggtttcaccatgttggccaggctggtcttgaactcctgacctcaggtgatccacctgtctcggcctcccaaagtgctgggattacaggcgtgagccactgcgcccagccacccagctaatttttgtatttttatagagatagggtttctccgtgttggccagactggcctcgaaatcctgacctcaggtgatacgcctgcctcggcctcccaaagtgcctgggattaaaggtgtgagccaccgtgcctggcctattaataataattttaaattaaatactatttaaataaaaacataaatttattgtccaaggcgtgctgaatccttaagtcctgagaagaggcattcagagccagggaagacacattcctttgcctgcactttttgccccctttctcacctatgaaacatctacctccggtctggcctggtggctcacacttatagcctcagcactttgggaggccaaggcaggagaatcacttgagctcagaagtttgagaccagtctgggcaacatagcgagaccttgtctctactaaaaataaaaaatttagctgggcatggtagtgtgtgcctgtggtcccagatactcaggagactgaggcaggaggatcttttgagccgaggaggtcaaggctgcagtgaagtatgatcatgccactgcacttcagcctgggcaacagagcgagatcctgtctaaaaacaaaacaaacagacaaaatacaaataaaacatctacttcgaataaacacgcttcaaaacccagctccagtgttccccgctctgggcagcctcctctgagccccagcctctgggcctccctttatcatgtcttgagcgtgctgaggattcactgtcagtgttaggggccagtctgattcctctgtccccagcgcccagaagagacctcagcagagttttggtgacttaatgaagtttgggacaggggtgtcatgcctggagttactagcaagacagagacatacgggcagttgcctgacgcccagcttagtgttccacctgcctgccgtctgaggaagcctctccgcccctccagctgagtgtgtctattttgggcatgctcagtacagaagtaattctggggggattcatttgggtaagcttctcgggcttctaatccatctgggctatgggggccaaactgaaaaggcccttccagaaaacctgctctcatctccccattgtacagatgaagacatggagacaagtagaggcaggaacttggccaaggtcacacggccaactagtccttgtcaccttttggcgtcccctgcccagggccccaacatcatcccagcagacatcattttcatcgtaaaggagaagctacaccctcgcttccgcagggagaatgacaacctcttcttcgtgaaccccatccctcttggcaaggtgagtgggcaaagtgcaggagcagcggggaggagatcagagtgagccctgcctgccccggcctagacttggcctcccctcccacaaccacctgccatcagtcactaagccctgtggattccaccctctaaatcaccatccacttggtcccgtctgctcatatgcaccgcctggatctgtacaccagattcgcagcaggccttcctccccacttctcatctcctccaggctcttctccttagggatcctgccacacactcatcagaccctgccacactcctgtctaaacatctttgtgccactggaggccctctgcgatctgctccctgcttactcgttctcctgcactcccgccccctcgccgcatagcaccctgcctgtgtggcgcattgtcacacctccgttctcatttctgctgggccctctccctggaatgctgtctattcacctgaccctatagggtcctcatcaaaagctaccaccactgctaccacttcctgccccactcctgaatggtttaggggcctctccttggctcccacaaacgcttttattctatctccatcattacatttaaacaacatccatcttacctgccagatccatccatctttcctgccagtgcagaaaattgcatgggtcattcacctattagttattgaacagcctcgtctcccttgtgcccaactcacagtctggcactggacaggttcctaaggtgccttctaaataggagagccatggtgaccctcctcagccccacctttggccctgaccctccctaggctctcacctgctgcactgtggaggtgaggaccctagatgaccgtctgctcaacatccccatcaatgacatcatccagtgagtccatctgccttgggccccagtagccaagagaagggctagcctgggatttaggtggtagtgtgacaggtctgcccagtagagttgtacaggctgcccccagcagaagggttccctgctgaggggatagagaggaccaaaactgaacccacactggccaagctgtgggctgcaatcacctggcaaaaggaacatctttttctaatccacacaaagccactgcagaggctagaggcccccattgttgggcaaccctgtagcctccatgccctgcaaacttctcattagagttctgagttgcatatcctaagtccttttccaagaaaggccctctgcccgtgaggaggtttgcctggcagcccagcaccctcgccctcaccccagggtttgctcacctttacttcccgtttcccatgtcttaaagtttctggaatcctccatcagagactcagtgtaaacaggttttcagggagctcctttcccaaccagttctggctaagaaccactccaggtgaagactgcagtgactgtccccttcctggggttatgtgagtaggggttatatgacagggacctgctgaggtgctgctctgggatgccctctatgctcctttctttcatcctatttcagccccaaatacttcaagaaggtgccaggggagggatgccattgccggaggaccccactaagaaaggggatctcttcatcttcttcgacatccagttccccacccgcctcacaccccagaagaagcagatgctgcgccaggcattgctgacatgactgtggtgggctggagcaggggtgagaggaggctagccgggcctcaccccacccctacccgccacagcctcagggtgtgcaggggagcctgctgcacagatatgatacaagggtgggatggcgcagggcttaaactgacataataaagatctatttcctgtcctccagctaca

SEQ ID NO: 7790 - DNA, 336 bp, Homo sapiens
tgcactccagcctgggcgaaagtgaaattccatctcaaaaaaactagaaaggccgggtgtggtggcttatgcttgtaatcccagcactttgggaggccgaggcaggtggatcacctgaggtcaggagttcaagactagcctggccaacatggtgaaaacccgtttctactaaaaatacaaaaattagctgggcatggtggcgagggcctgtaatcccagctactcggcaggctgaggcaggcgaatcacttgaatccaggaggtggaggttgcagtgagccgagactgcgccactgcactccagcctgggtgacagagcaagactctgtctcaaac

SEQ ID NO: 7791 - DNA, 336 bp, Homo sapiens; identical to SEQ ID NO: 7790

SEQ ID NO: 7792 - DNA, 326 bp, Homo sapiens
gatgagaatttggggactcagagaggttaggtcactagcctcaggtcacacagcatctgcctgctgaagctggggcttgacctcaggcatctggagcccaaggcttccaggactctacacgtttgcctcttagcagccaaggactctttccccagttacagagggtggccacttgtctggggccacacgggaggctcccaggccacctgcccccgcagcctccctccctgggacatgactgccactcccgcccgcatctggtcccgtccctcacgctggagagagcgagcgagaggaggagggcttttaattttagaaatggttcc

SEQ ID NO: 7793 - DNA, 278 bp, Homo sapiens
tttttttttttttttttttttttgagacggagtctcactctatcgcccaggctggagtgcagtggcgcgatctcagctcactgcaagctccgcctcccgggttcacgccattctcctgcctcagccttccaagtagctgggaccacaggcgcctgccaccacgcccagctaatttttttgtatttttagtagagacggggtttcgccatgttagccaggatggtctcaatctcctgacctcgtgatctgcccgccttggcttcccaaagtgctgggat

SEQ ID NO: 7794 - DNA, 89 bp, Homo sapiens
ttttttttttttttgaggcagagtctcactctgtcgcccaggctggagtgcagtggcgcgatctcggctcattgcaacccccgcctcct

SEQ ID NO: 7795 - DNA, 440 bp, Homo sapiens
ctggctcagaggcccaggaaagagagagaagaccaaccaaggggtggctggagtcccaaggccatgaactttcaggaagtgaggaggggtctggcagggaagggaggcctggggctgggcagagggcagggaggggaagggtcctgacctctgatctcccccccagaatgtgaccctggccatggccttgttcaccatcctgacctccatctatttcttcaacaaggtgagcgggagaagagcggaggtgggggctgagtctctgtctcgctggtccagttctgtcatcttggtctctctttctctcccacatctctgtatatgtccctgttttcctctctcaggctcagcagtgagaagacacaggacctccccgcacaagagccctgcctctccctctgccatcgctctgaggccagataaatgtaactgaatccgca

SEQ ID NO: 7796 - DNA, 5736 bp, Homo sapiens; identical to SEQ ID NO: 7260

SEQ ID NO: 7797 - DNA, 130 bp, Homo sapiens; identical to SEQ ID NO: 7261

SEQ ID NO: 7798 - DNA, 2785 bp, Homo sapiens
agacaggaggtgagactgcatcacgttatgctataaagatactagctatctgcacgaatagttatcatgaagctcgggaagaagtaataagactggataaaagtaagtgatgatttccttaagggagcccttgtcccagaggttcatccacccttgaagctgcaaagggaactgtggtcgaggaggaacttagcagcaatgctgttaacctctcccagacttcagcaatgtttacagaagatgtttcacatccagatctgaaagcatttaattaaccttttggatgcacacaggtagaatgcccaggctggagacccagctgacagatggctcaaagataacagggtcaaagctaggaaactccctcctctcaccaagttcagttctctgccttcacagaaggagagggggaaacaccgtcaacgtttagtgaacaagggaaatatcagagtctgagcctaggtttagtccagtaacttaaaccggctgtagttattcacagcaggcttcccaggagaggcagcctgctaatgttcttcttaccaactccctggaatgcacagaaggtgaactgaaggaggctccaccatggaagcggcaagcctttctcctggatcctgttgcataccctgcaggtgtaggttgctggcacattgcctccacctgggggctgtcagataagacctctcaccctggcgcagtgagaggttaagaataggctttcaagaagacagacctgtctgacacacagcattcattcatctaacaactgtgttgtgctgggcactgttctaggaagcggagatacttcagaggttcagcaaggagttgaggaggttcatatgcattcagtgaatgtttgctgatgagtaagtgaacaagttctgctgcagagttactggggaagctcggtgtccgctgacatctccctgcacccctcatgtcctgttgccagcctcctattttgggattaaaaggagctgttgcttgttctcttctttccctgcagagttgagcgttatgatgaagctgctcagctcggaggatgaggttctggtgggcaacgctgccctctgccttggtaactgcatggaggtgcccaacgttgcgtcttccctgctaaagacggaccttttgcaggtcttgttaaagcttgcaggcagtgacacacagaagacggccgtgcaggtgaacgcaggcattgctctggggaagctgtgcacagctgagcccaggtatgctgtggacacggagccaggctgacctattgcagaaagagcagctgagctgaggtgctgagttttggctgggactgcatgccacacagaacagtgtgggaagccctcatgctttctgtgcagacctaggttaagcccagtagctgcttctctgaagaaagcctttctagaggaaactggggagctctcggtctccaaccagagagggaatcggcttgtctgacagggacgtgctgctcccacttgctgccgttgccttctctccattccattctccactgttttgcatccctctccctgtctctttatcctccttcttcccctccctcccactccacctccccttctcttccctcttttctctcttctccacttttccagaaacagaccccccacttcatgttctttgcctcagcctaaacaaatggaggaacggccagcaagggtcacatgttcatgcaggagaaaacagtggagaaggagagacgcagaacagcatgccgaggtccccagtgagcgagggcaagagatgtgggctgtaactgtgcccatggcttctctgttagctcagacctccactctgctctgctcctcttctgatgtgcagacgcatctcattgcacgtgcttttgggaggtgtccacctgtggctgagcaaaggagccctggcatagagcaagggtaaccccgggagctgagtgagagaggctccttcccttacatccacatgcctttaattcctcctctgtagattgagggggttggccttgataatatctaaggtcctttcaagttctgtctggttgttcaaatggaaggaatagttaaaatctttcttctatagaaagaaagcacattagctaggatgacttcaaagtggcaacctatgggggagttctcgagagcaaggtcctgtctgatcagcctgacacacctgccacctgcagcgagtgttttcagtgctttgtgggcctccctgagggtcttacttacccctgtgatctttagggtaccccaatgccacagccacttcctgtttccacccagagtgataggactgacgttctcagccagcttccatctgagagggtgttggctctgggctccagaagcctgaaccgtggcacttatgccctgggttgtttgttttgattgtgacagatttgctgctcaactgagaaagcttcatggcctagaaattctcaactctacgatgaaatacatcagtgattcttgagagagacagggtttgtgtgcatttggggaacacacagatgcacaccgtgtgttgttcctatgctaataaagacctttgatgtatccacttcagaatcaagtactcatttttagagtgtttgcatttcaggttttcacgggtaacaagagagtgggcattaggctggctgctgtggtgggctctgtgcactggcttactcgacttccattgtaccctcctttgaatgttctttcctgttctgtagaagctagaaaccatctcacaaaaagccacattgcccagactcccttgtagcaacgattctagatgg

SEQ ID NO: 7799 - DNA, 290 bp, Homo sapiens
ccaacgttgcgtcttccctgctaaagacggaccttttgcaggtcttgttaaagcttgcaggcagtgacacacagaagacggccgtgcaggtgaacgcaggcattgctctggggaagctgtgcacagctgagcccaggtatgctgtggacacggagccaggctgacctattgcagaaagagcagctgagctgaggtgctgagttttggctgggactgcatgccacacagaacagtgtgggaagccctcatgctttctgtgcagacctaggttaagcccagtagctgcttct

SEQ ID NO: 7800 - DNA, 4203 bp, Homo sapiens
ctggtgttctgagccggaccctttcttcctctctgaaaattgttgaggaggccttgcgagcaggagtggtaaagaaaatgatgaaattcctgaaggtaagatcactttattggttacaacccctgaaatgtacagaagtctcctattttattcggggaacagaattaaggtgggctttgtttggttaatgtgctgccatttcttccttgctagattttaaacttcttggatagggatttgcttctgcctgtctacccagaccatactctgaacatcaacaacagattgttgaataaataagaaaattgttcattagatacatctataaaacctgcttacccctcaagcctgacttaaaaatatatggccactgttcttgataaaaatgatctgagtggctttctgtaacgtttctcaggcacattgttctgctcaggttttgctactcatgatgctttatacagttatctggagagtgttggatggaactccatctatgagacatgtagcctgcagaattaccatgtgaccaaaggatgttgggatttccctgtgagatgagtgtggtgaatctaagcaagccagtagagcagttatctggattcacctgcaagggcgaaggggattaatacactaggctgccatctcagaatcccacctatgatgtgtgtgcccatgaggtccatacacccatgttagtgtggtgacacatggcttttattcataaagcatcaggctgagtggcgcagggaagcatgctctgcgggctgctgctagggcaggggtgacactgagggggcagcacagggggtctgagtttagattgccacttgaacaatgactgtcattcattataacttttgcaaacccaccaaaagctcctgatggcatgcatacccatgcatcacacgtgcatacgtgcacacatgccttttaaagaccccacatgggtgattgcaagggctgtgtttgacagttgtcatctcttaaaatgatgtaggttcctgaagttcctcatgcaggactgtcagcctgacagccttagcaagtcagtcctcgttctcaaatgggaaaatgacatgggagggccttttcctccctttttggtagatctgccattcatcagcatcattctcttctcagccacttgctcataaagccttccggaggcaattactcaggtgtacatgacaggcctacattcctgtcaggggtgtgggctgggttagagaggatgcgggtgacactctgttccagcagggaccatgcctgcccaccaggaagcacatgccgttctcagtagaattctcttttcagagtttaggaagccactagcgctataataactgcttgctgtggtttgtggtcaagagcaatcatagcactgattttatttttctaatttcattctgaaatctagacaggaggtgagactgcatcacgttatgctataaagatactagctatctgcacgaatagttatcatgaagctcgggaagaagtaataagactggataaaagtaagtgatgatttccttaagggagcccttgtcccagaggttcatccacccttgaagctgcaaagggaactgtggtcgaggaggaacttagcagcaatgctgttaacctctcccagacttcagcagtgtttacagaagatgtttcacatccagatctgaaagcatttaattaaccttttggatgcacacaggtagaatgcccaggctggagacccagctgacagatggctcaaagataacagggtcaaagctaggaaactccctcctctcaccaagttcagttctctgccttcacagaaggagagggggaaacaccgtcaacgtttagtgaacaagggaaatatcagagtctgagcctaggtttagtccagtaacttaaaccggctgtagttattcacagcaggcttcccaggagaggcagcctgctaatgttcttcttaccaactccctggaatgcacagaaggtgaactgaaggaggctccaccatggaagcggcaagcctttctcctggatcctgttgcataccctgcaggtgtaggttgctggcacattgcctccacctgggggctgtcagataagacctctcaccctggcgcagtgagaggttaagaataggctttcaagaagacagacctgtctgacacacagcattcattcatctaacaactgtgttgtgctgggcactgttctaggaagcggagatacttcagaggttcagcaaggagttgaggaggttcatatgcattcagtgaatgtttgctgatgagtaagtgaacaagttctgctgcagagttactggggaagctcggtgtccgctgacatctccctgcacccctcatgtcctgttgccagcctcctattttgggattaaaaggagctgttgcttgttctcttctttccctgcagagttgagcgttatgatgaagctgctcagctcggaggatgaggttctggtgggcaacgctgccctctgccttggtaactgcatggaggtgcccaacgttgcgtcttccctgctaaagacggaccttttgcaggtcttgttaaagcttgcaggcagtgacacacagaagacggccgtgcaggtgaacgcaggcattgctctggggaagctgtgcacagctgagcccaggtatgctgtggacacggagccaggctgacctattgcagaaagagcagctgagctgaggtgctgagttttggctgggactgcatgccacacagaacagtgtgggaagccctcatgctttctgtgcagacctaggttaagcccagtagctgcttctctgaagaaagcctttctagaggaaactggggagctctcggtctccaaccagagagggaatcggcttgtctgacagggacgtgctgctcccacttgctgccgttgccttctctccattccattctccactgttttgcatccctctccctgtctctttatcctccttcttcccctccctcccactccacctccccttctcttccctcttttctctcttctccacttttccagaaacagaccccccacttcatgttctttgcctcagcctaaacaaatggaggaacggccagcaagggtcacatgttcatgcaggagaaaacagtggagaaggagagacgcagaacagcatgccgaggtccccagtgagcgagggcaagagatgtgggctgtaactgtgcccatggcttctctgttagctcagacctccactctgctctgctcctcttctgatgtgcagacgcatctcattgcacgtgcttttgggaggtgtccacctgtggctgagcaaaggagccctggcatagagcaagggtaaccccgggagctgagtgagagaggctccttcccttacatccacatgcctttaattcctcctctgtagattgagggggttggccttgataatatctaaggtcctttcaagttctgtctggttgttcaaatggaaggaatagttaaaatctttcttctatagaaagaaagcacattagctaggatgacttcaaagtggcaacctatgggggagttctcgagagcaaggtcctgtctgatcagcctgacacacctgccacctgcagcgagtgttttcagtgctttgtgggcctccctgagggtcttacttacccctgtgatctttagggtaccccaatgccacagccacttcctgtttccacccagagtgataggactgacgttctcagccagcttccatctgagagggtgttggctctgggctccagaagcctgaaccgtggcacttatgccctgggttgtttgttttgattgtgacagatttgctgctcaactgagaaagcttcatggcctagaaattctcaactctacgatgaaatacatcagtgattcttgagagagacagggtttgtgtgcatttggggaacacacagatgcacaccgtgtgttgttcctatgctaataaagacctttgatgtatccacttcagaatcaagtactcatttttagagtgtttgcatttcaggttttcacgggtaacaagagagtgggcattaggctggctgctgtggtgggctctgtgcactggcttactcgacttccattgtaccctcctttgaatgttctttcctgttctgtagaagctagaaaccatctcacaaaaagccacattgcccagactcccttgtagcaacgattctagatgg

SEQ ID NO: 7801 - DNA, 4203 bp, Homo sapiens; identical to SEQ ID NO: 7800

SEQ ID NO: 7802 - DNA, 998 bp, Homo sapiens
ccaccgtttccggatggtccagacctaaaggtgagcctacactagtgcctgagtaaacctttaggagagctcttgggccagatttccccagcattccttgtgtgccacgttgggtgcttcccagcttgctgagcagagcagcagcttcaccatgggcatctggtccttgtctagcacagtctccactgtcttgggcctgaaaggggatccgtggtgtcaactatagcaaaattctaggatctttaggaagcagattagggaaacaagattgataatacacaagtttatcttttctccctctggagacctcattaaaatgagattaaagccattgggggggaacaaaaaaagtagagacctacgttgacagtgaacaggcaatggttaccaataggtaagtaattttaacaagtttcctgaagatggagaacagctgcaagggtggtaattaatgaggcagggctgaggaaacctttgtatggagtacaaatggaggaacacgtagctgggcagtagcaggtttgccttataataccctggagaggatgaagatttcaaaactcccgatacaacagagagcagaagtacaaggcagtggagctgcgtttgctggcaggcatctatcctccaggcataaaatcagaacacttttatctctaaagaactgaaaaactggagaaaacatttttctttctagtatacgggggtgccacctctatatctttccatacttctgataaacttcccataaacatagcatgcccaaacatattttcttgcttttttcatacatgtgattgggcaggtaaagggtcaaccagacattgcaggaaagctacacacataaataggaaaaccaagataaacataaaaattgatccaaaagaaatagagatgatataggaaacagaagaaaaaaatagtaactatcatttgtatcctgagaaagatttaagatagttatatccataaaagagtaacagcttggcatttattta

SEQ ID NO: 7803 - DNA, 368 bp, Homo sapiens
catctggtggtgctataggcaccctgttccatgggttagattgttctctgctaaaggtgccaaagcacaggcttctctttctacagtgaaccctgactgatgcaaatgtgttgatttccctaacccaccttgtactctcaccccatccccagaggcaacgctcccttccagttgccccagggtcactctaaaccagggtcacctgtggactgcaagtccctaagtgagaagtccaataagtggcattatctctggctccttacaatcacagaatcattttagagtaggaggcagggtcttcatggtacagtgaatgtcaggagtcccagaccaaagttccaaagacttttggtcgtaccctgctacct

SEQ ID NO: 7804 - DNA, 368 bp, Homo sapiens; identical to SEQ ID NO: 7803

SEQ ID NO: 7805 - DNA, 368 bp, Homo sapiens; identical to SEQ ID NO: 7803

SEQ ID NO: 7806 - DNA, 996 bp, Homo sapiens
ccaccgtttccggatggtccagacctaaaggtgagcctacactagtgcctgagtaaacctttaggagagctcttgggccagatttcccctgcattccttgtgtgccacgttgggtgcttcccagcttgctgagcagagcagcagcttcaccatgggcatctggtccttgtctagcacagtctccactgtcttggcctgaaagggatccgtggtgtcaactatagccaaattctaggatctttaggaagcagattagggaaacaagattgataatacacaagtttatcttttctccctctggagacctcattaaaatgagattaaagccattgggggggaacaaaaaaagtagagacctacgttgacagtgaacaggcaatggttaccaataggtaagtaattttaacaagtttcctgaagatggagaacagctgcaagggtggtaattaatgaggcagggctgaggaaacctttgtatggagtacaaatggaggaacacgtagctgggcagtagcaggtttgccttataataccctggagaggatgaagatttcaaaactcccgatacaacagagagcagaagtacaaggcagtggagctgcgtttgctggcaggcatctatcctccaggcataaaatcagaacacttttatctctaaagaactgaaaaactggagaaaacatttttctttctagtatacgggggtgccacctctatatctttccatacttctgataaacttcccataaacatagcatgcccaaacatattttcttgcttttttcatacatgtgattgggcaggtaaagggtcaaccagacattgcaggaaagctacacacataaataggaaaaccaagataaacataaaaattgatccaaaagaaatagagatgatataggaaacagaagaaaaaaatagtaactatcatttgtatcctgagaaagatttaagatagttatatccataaaagagtaacagcttggcatttattta

SEQ ID NO: 7807 - DNA, 1151 bp, Homo sapiens
gtggttattgacatgggcacaggcacctgtaaggtaggttttgctgggcaggccagccccacctacaccgtggccaccatcctgggctgccagcccaagaaacccgccacctcggggcagtccgggctgcagacgttcatcggcgaggcagcccgcgtgctcccagagctgacgctggtgcaacccctgcgcagcggcatcgtcgtggactgggatgccgccgagctcatctggcgccacctgctggagcacgacctccgagtggccacccacgaccacccgctgctgttctccgacccacccttcagcccggccaccaaccgcgagaagctagtggaggtggccttcgagtcgctgcgctccccagccatgtacgtggcatcgcagtcggtgctgtctgtctacgcccacggtcgtgtcagcgggctggtggtggacacgggacacggggtcacctacacagtgcccgtcttccagggctacaacctgctccacgccacggagcgtctggacctggcgggcaaccacctgaccgccttcctggcggagatgctgctccaggccggcctgcccctgggacagcaggacctggacctagtggagaacattaagcaccactattgctacgtggcctccgacttccagaaggagcaggcccggccggagcaggagtacaagcggactctgaagctgcccgatgggcgcacggtcacctgggcaaggagctgttccagtgtccggagctgctgttcaaccccccagaggtcccggggctgtcacccgtcggcctctccaccatggccaagcagagtctccgcaagttgtcactggagatgcgcgcggacttggcccaaaacgtgcttctctgcggtgggtcctcgctcttcaccggcttcgagggtcgcttccgggcagagctgctgcgcgctctgccagccgagacccacgtggtggtggctgcccagcccaccaggaatttctccgtatggatcgggggctccatcctggcctccctgcgcgccttccagtcctgctgggtcctgcgggagcagtacgaggaacagggtccctatatcgtgtaccgcaaatgctactgaccagggcagagctggggagggcgtgggggcagtaaagcctctgctacagccggc

SEQ ID NO: 7808 - DNA, 284 bp, Homo sapiens
ccccatgatgtgcaccccgccctggaactctcacaggctctccggaacccactccccaagaccattccctggacaccatactatcaagcaagacttggacatcagtgggtagtgatactcttaagggcttcccagtccactgcagtcatggggcagatgccccaggcaaggagcttcacctggacactggctctctcactcgccccagcacaggcacccagggcccatgtgtcccaggctatgcatccccatctccctccattccattaaaagtccatctctca

SEQ ID NO: 7809 - DNA, 29163 bp, Homo sapiens
caggctctttaccatcagaccctggaggccctgcagacactgctcaaagccctctttatcgaggaccccactcctgctgggctgaagagcatcttggaggtgcggagatgggaggggcaaggaagggaggggaggaagggtggagggaagagataaattggtgcaggagcagtggaggccagacctaggagtgatttggcttcaggatgtcatcttgtgtgagtgttctgcctccctgtctgtctcacaggccctgtcccagactcctgcctctccccactctctccccatccccccactctctaaatggctgcccatggttatagctgccaccatctctgtgctcttcccatgcttgtccctgcgtctctcttctgtcttcatgactcttcactcttcatctgtctcctcattgacttccttcttccctatagtctgtcagtcctattctgaactctatctctgcctataccccaagaagaggaggagggctgtggtgacctttataccctctctggaagcttcctgctgatgggtgaaggctggcctgtccacccagcagcaggggctgtcatctaacctgtagttctgagtcttgcttttgatcccacaggccctggggccttggatgaactctgggaaggcccatgagcgagcacgggctgtgaacaccaatgtctctgtgttgaaccacatgcttctaactctgcctttctttgtgagtggcccctgggaggggtggacactcttagggaaaatcttcccacttctgaaggagcccgtacctctgttcagggattcccaggtggctcttgccatcttcagagggctgtgctatctgggccagactatccaccggtgttcaccatttaatgtatagcattattgaacctataacactcaatccctaagattgcaatacaaacagatgcccttggggttcccggcgctggggcttctgctggggagactcatccttcgcattggggatcctgatgaggagattggctgtgaggctctggacggcatcatcatcctctacactattctggagctccaaaaacgtaagccctatcggagtacttctgaaggaagtcttctgagttgttgctcagtctggattcaataaagaatcagctggagccttggcattaaggcactggtgggagatgggggaaaccagcacagggccagatggggactgtggaaactggtgtgaagcccaagaccccagagaaccaggggacaaaggctacaaacaaaactattttgatttaagcaatcttgctttttctcatccttccaagcttagtttgtgactgtcattttcatagtcccttaatactatgtatacctaaggataattcccctaataccttgttttcctgtctgttttccccactagagactataatcctatgagggaagggcagggctgtatcttggtcacccctgtattcccaagggccatctctgggcttggcacatggtgggtgctcagtgaatatctattgaatgaatgaataaagaacagcttctgtcttagaatccagagcagctaaagcttgtagttgggagaactttccttgattcagcttcagggagcacttcgtgatgtggtatgggctgacacaggtatccagaaggcattgtacctagaggtgcacagtatcagctgtcacttgcctccttcctttctccatcatcctagctctgccctaaaccagggcaccttggcatgtggtttaaactctcctggctctgggggtagaatgacctttgcataagagctgctcctatcgctgcttagtggtgtgacctcaggtaatcactttgtgtaggcctagatttcctcatctgtgaaaatggtatactcagatataattcataattcatgcttttttttttgacagagtctggctttgttgcccaggctggagtgcagtggcacaatcttggctcactgcaatctctgccacctgggttcaaatgattctcctgcctcagtctccccagtagctgggattacaggcacacatcaccacacctagctaattttcatatttttagtagagacgggatttcaccatgttggccaggctggtctcaaactcctgacctcgagtgacccatctgcctcagcctcttaaagtgctgggattataggcaggagccaccacgcctagcctaaattcatgctttttgaaagattaagtgagatattttgtaagagcatatgtaaaggtactagctcagtgccacacattataggcacttgtcatgtagttcactttttcctatcccttcaagcttttgggatttatctggtatcctcactcttcttgatctctagcatttgggacaaagatctggtccctgggagatttaccctgttgaccaggagccactcacatctctggaggatgggtgaaggtggtataagccatgttaataaccagctttaggggtaggagtaggagcctctgtgagcctattctggcttgggacgctgcctttttttttttttgagacagagtcttgctctgttgcccaggctagagtgcggtggcacgatctcggctcactgcagcctcaatctttcaggctcaagcaatcctcccacctcagcctcctgagtaagtgggactacaggagcatgctaccatgcctggctaaattttttttgtatttttggtagagatggggtttcaccatctctaccaaaaatacaaaaaaaatactggggtttcaagaccaggctggtctcgaacttctgggctcaagtgatccgctcgccttgacctcccaaagtgctgggattacaggcgtgcatcaccgcaccccgccgaggcagctcatttaaaaaagaaagaaagaaagaaaggaaaatgagtagaaattatagacccaattagggttgccagatttagcaaataaaaaatacaggatacccagtaaaatttgaatttcaggtaaacaatgggtaatttttagtatatttgagatgtactttcactaaaaatgatttgtttatctgaaattcaaatttaactggttatcctgtatgttatttggcaaccctaggccaaacttatactcttagattttatttatttttttctttttttagcaggcaagaaccatactcttagatttatttattttttgagatagagtcttgctctgtcatccaggctggagtgcagtggctcaatcatggctcattgcagcctcaacctcccgggctcaggtgatcctcccacctcagcctccagagtagctgggactacaggcacgtgccaccatgcccagcttatttatttattactattattttttgagatggagtgtagctctgttgcccaggctggattgcagtggcacgatcttggctcattgcaacctccgcctcccaggttcaagcgattctcctgcctcagcctcccgagtagctgggactacaggtggctaatttttgtgttttttaatagagtcagagttttgccattttggctaggctggtctcggactcctgatctcaagtgatctgactgccttggcctcccaaagtgctgggattacaggtgtgagccactgtgcctggcccagcttatttaatttttcttttcttttttttttttctggagtcttgctttgtcgcccaggctggagtgcagtggtgcgatctcagctcactgcaaactccacctcccgggttcaagagattctcctgccttagcctcctgagtagctgggattacaggcgtgcactaccgtgcctggctaatttttatatttttaatacagatggggtttcaccatgttggtcaggctggtctcgaactcctgacttcatgatccgtccccctcgacctcccaaagtgttaggattacaggcatgagccactgtgcccagccgctaatttattttttgtacagacagagtttctccatgttgcccaggctgatctggaactcctgggcgcaagtgaaccatctgcctcggcctccaaagtgctgggattacaggccgggtgcggtggctcacgcctgtaattccagcactttgggaggccaaggcaggtggatcagctgaggtccggagttcaagaccagcctggccaacaaggtgacaccctgtctctactaaaaatacaaaaataagccacgtgtggtggcgcatgcctatagtccccactacttgagaggctgaggcaggagaatcacttgaacccaggaggcggaggttgcagtgagccaagatcacaccactgcactccagcctgggcgacagagtgaggctgtgtctcaaaacaaacaaacaaaacaaaacaaaacaaacaaaacaaaaacaaacaaaaaacccgaagtgtggggactacaggcgtgagccactgcccacggccactctcaagatttaatctcaatgagtgaagtggtctgtccaggccccctgactgtaggaagcagcacagctaggatttgaacctgagttggcctgactgcaggtatccagctcctctcctttacaaacagcacacacacttggtctatgtgaacactctgccttggtggccctttcttgtgcccacgtcctgtattccttgaggagatccaggtaggacccaaggtgggctgaaataagggctcaggaagtgcgcctgaaatgtgctcccttcagctgaaaatatgaagccactatgtgccgggtactattctaggatatggggacacaggagtggggaaaagagattaaataatcctcctttggtgagagtaccttctcgttgtcgggagataagatagtaaacaaaataaacaagtaacacatatagcaagtcagatgatgacaaaaactaaagaaaagtagaaaaggattggtaccaccaggggtaggggattgcagtttaaaagaggtattgccacacatccaccagaatggcataaatgaaacagacagacaatgacatgtgctggcaagatgtggagcaatgggaactctcgtgcactgctggtggggttaccgttgatttcccatcatagaaaactgtttggcaatatcttctgtagccgaacctatgcttagactatgacccagcaatccattcctaggtatacaactaacaactgtgtagatatactcatcaaaagacacactagaatgttcttagcagcacgatgcttagtagctggcaataacccaaatgtccatcaaaaatagaactgataactaatcatagtctttcatactgtgggaaattatacagcactgagaatgaatgaaagaactaatgctgatgcaactgtgtggatgaatctcaaccatataatgttgagcggaagaagacagacatcaaggataacgtgtccatttatctaaagttcaaaagcaaagacatctctctaagggttgagaaattagaatagtatttagccagggtcagggagagggctattgatggaaaggggtgcacaagaggggcttctggggtgctgatcacgttctgcttcttgacttgggggctggctacaatggtgtgttcactatgtgaaaatgtatcaagttagttccttatgatgtagggacttcctacatgtatgtttaacaaaaatagggagatccggcctcactgagaaggttctcatcttgcaggagccagagataaggaagagaccaacaaaaaggagctatatgagagcaacaagcatttcctggggccctacaaccctgtgagcccgtgccagaacattctgcgggtgatcgaggtgactgcctggtgcccatccaggagcggagggtggggggtgaggaggggcagtgccacctggccccaaagctttcttcccttctagctttccaggctttgcaggacgccttcccagccacccacgcctgtcctgagtgccctcctcctccagtctgtgccacagtgcatggacttccttctcccttacgcatgtcaccctgtgctgagtgcagggacatgttgctcttacttttgtagctcctcccctaaaggttcaacacttatgtgttaactgaatattcctggccctccctgctgacctctgcatgtgggcgtcaggcagtgtttgtgcctctgtgcacaaagctcgaagctcaaagctcgggctacccatcagtgtgtcatgatctcagcacctttgtttcaggaatttggagacttcctggggccccagcagataaaggacctgctgctggccgccctggaagggctgaaaggcagctcagaggctccagggaaggactccagggagatgatgcagctggcctcggaggtcatgctcagctcggtgctggagtggtaccgccacagggcgctggaggtggtaaggcctcctgggggcagggagtgaactgtcactggggctcgggagctccccccatggcctgctcatcactggccggccagacagtgggcagggtggggtatacctgaaccccctaagccatggggcagggaaggggtgctggtggctgagttctaggtgctcccaccttgaaggttttctcttaccacccctgaaggagctcaactgacttggtggtgggtagaggtgggtttggcggtggaagcaggtatagggagcatagtaaagagaaactggctcactcccagggaggggcaggcgctctgcttgcctcttcctctctctctcctttgggccttctcccctgtcctctagcctgtcacccccttccctctcctcccaccttcctgctgcccccgtgcttcccttggcagtccccttgctcatggctgccccggctgtgccccagatcccagaaatcatgcaaggcatctacatgcagctgagccacatccaggagcctcgggcccgccaggtggccctgctgcccgtctccctcctggctagctccttcatgaccgaggttgtggtggccctgctcatgtgccccctcccactgaacaggtaccaagtgaaggggttcccagccactgcatcttacagggttcaagcagcccccaccccaggttggggacccccttctgcccagataagcccctcgccctcccagatggccccccttctgtgatctggggtgtttatgacaaccattaagcacttcctgagcactgctgctgtcagcgccgagcattacaatagtctctaattctcacaacaatcccattctgcagatgaggaaaccaaggcttagggaagtttcttgccttaggtactcactgagcaagcaatagaacggaggacctaaactcaggtctaactaactaccagcccagagctctttaacaatgccattgaaaggaggtctgcgtgtccgtcctgactctgcctccagctgctgtgtgggtcttgggtagcccatttgtcctctctttcccccttaggcaaaagaaggaaatgatccctgcactcccaccccaggtgggtggtcatgacagtaatgcagccagcggtgctgagtgcctgctcaggcctgggcccgtgcggaagggtgctccaagctcactgtcttcagggagctcgtgatctgatgggcagaggggactgtggtcagatggtgagctcgtgggcaggagaggtcagtctggcctcagcctcccacccaggaaatgctcccatgctttctttgaatgagtaaaacaaggcagtgagtgatccacaccttcgggtggttgtttgagagccaaagaactgtgcagagctgtgcaaatggggtgtgctccaataagggcagttgatgtcattcataggaaccaagaagatcagtcaggatggtgagggcccagctggcacatcccagtctcccacttggaagaattaaaccctttctggctgtactccccaccagggttttttttttcttgggtccactaaacagtcagactcataagactactgggggcctcatctgacatccgtcacacaggatacaggacagggcagtgtcaggagctcctccttgcgggggtccttgcagcagcccccacagcaggccaggcagaggcacccagggcataacatttaaggacatagtctcgggtgccaagtctgcacttgtgtgagcctgagaatgagggcttccttcaagttggcaccctggatgcctcactttccttatcctagtcttggccctgagtctaggagctggtctcttgggcctctcaggtgaaagttcaggtgtgacgaaaggagacctatagggtggatataggagctgccctggcttaaatggcacaggcctcacagagaccagtatcttttacatcttggctttgcttccagggtccccacagggacaaaccaagttacaagggtcactgcatcctgggaagctcaatgctatagtgtccccatcagttcttatagttaatttatagttcctccctgtccagatgcaatttaccagtggagtcattattaccataagtaatgttgcctagcaacatagttgacatactgtatcaggttgccaggggaacagagctagaaagtgaatggagggttgaaaccctcttgtagaaggggaaaggtttttgttaaccctttagtacactggcctgccagtgctttcaacaccctatgataggagtttggttgggtgcagatgcttttccttgcctggtgtactgccttttaagggatgggaacagaggctccctgatattatgtgacaagtgcaggatcctagccccaggctgctcaactgcctccactcttgctccttggttagaggaatgagcacaggctttgaagacatcaggcctggccatatctggactctgcagctcattagctgtgtaatcttggactggtaatttcacctctctgagcctcaattcctcatttgtaaaatgggaataacaacactcaccttagggttattgtgagaattcagtgatcttgagtgtcttgaatccttgttcatgtctgtattccccaagatttgcgtagggcctggtgtacagtaaatgctcagctaatatctgccgaagtaatacattgcatgtaaaacgtaaaacatttggcatgatacctgggaaatagggtttctttctttctttctttttttttttttttttgaagatggagtttcgctcttttctcccaggctggagtgcactgctggcgtgatcttggttcactgcaacctctgcctcccgggttcaagcgattctcctgcctcagcctcctgagtagctgtgattacaggcatgcaccaccatgcccagctaattttttttgtattattagtagagacggggtttcaccatattggccaggctggtctcaaactcctgaccttaggtgatccacccactttggcctcccaaagtgctgggattacaggtgtgagccaccatgcccaccaaggaaatagggtttcttgtccttctagcccctgactctttgggagtgttttctggactattccttgcaggtgtgcccatggatgccatttcattggcatcttaccttccccctcccaaaaccatttggaggctgggttagccccactgccttggccaccactaattgcccacatccctgacctctcagcaatggagcagagatgtggaggcagctgatactgtgtaagcccagctgtgatgtccgagacctcctggatctgctcctgggcagcctgaaggagaagcccgtcaccaaggagggccgggcttccatcgtgcccctggcggtgagcacccagtcagccagcccctattgctgcctgtcctgcccttcctctctccttccctcctgctgagctaagcacacccggcctcgagtaccgcactctgccagtaactagttgtgtggtcttgggcaggtctctggctctggctcttgtctgtggttcactggacaataacagtagtgttgtctatggtgacaacagcagcctgggatatgggaaaaagagtgacttggagtcacagacagtctaaatcctggttctggccaggcatggtggcacatgcctgtaatcccagcactttgggaggcggaggcagaggatcacttgaggctaggagtttgaggccagcctgggcactatagcaagacctcttctctatttttttaaaaaaatcctacattaccattttgtggcctaggtaagtcacttccacctctatgaggctcagtttctacatatgtgaatagaaataatatctttctcatatggcggctgtgaagattatatgagataacacattcattcatttaggtgacacaaaacacttcttgctgccacactccaagcttgaccctgggaacacagagcgaaaggcagctctgactcaggaagctggctgggctgaagagacggatttgtctctgtctctatcaccaccctggtccatgccagttggtccatacccctggtccatacccctgcctaccttcctgattctgctcctgcccctccaatctgtactgcagccaaaaagtctttgagaaatgcacatctcctcttctcagcacccttgatggttttgcattgcccctgagagtgacacagtgctcctacctgtggcgaaggccctgcatccctggccggcttccccacgctccatggtcctcctgcttgctttgctccagcctcacgggtctttgtcagaacttcatccagccacgctatcttgtcacagggcctttgcacatgctgtttcctctacctagaatgctctccaccgagctaacttctactcatccttcagctgtcaactccagcatcacttccttagggaagccctccctgatctccctgacctggtcaaatctgtacgtagtatattttgcgtcacatactttgtatgaaaagagtttacaccagttgtcatttgacaacaccacaggggatcctttggttaatctgtgagacacatgaagacattgctgtcctgctgtgctcaccatgatatccccaacatcttgcatacacctggcgcatagtaagcactcagaaatgtttttgttgggctgatttattttttcaataagtgtttagtgagcacctcctatactatgtgccaagcacacttataggttctggggattcagaagcgagacattctggtgaagggaagtaaataaaggtacagtagatgaaggagagggtagtattatcccattacagaggaggatgctcctgcttagagacattccatgtctccccccaggtcacctagctagcaatggtggtgctaggactcaaacccagcagatcttccgcttccaaatcctgcgcttcactcccatatatctctctgcctttgtcctccagcactgagttctgtgcctaaggcaccagcactccttcccttgcaatttgggcattcatcctcttctacaattggtgtatgttagtgtattctttagtcactcatttgtgcttcttgtccagcaagcatagtttaagcatggatacagcctgaactcattcttatcttatggcactgataaatcgtttgagcaagatagagccgaaagcaaagccctgtggcacatcactagagacttttcccttacaccacagactgtgttctttggatgtaatcattagctttgggctgctggaaaagtacaagggctttgagtccaagagacttgtcttagctctgccactgcctcactatataaccgtggtcaatcacttcccctctctagccttggtgcttatatctgtaaaatgggctatgataactcctgcattgtctatcttacctgttgagaaaggggagatagtgtatgtggaagaacttcttaagctgtaaagtgcaaattaactgccatttattgttctcattcagcccatgttaggtcacttttctccaagggaacatgtcaggggttctttcactttgcaattaaatgctttcctcttggcccagatgcatggagtctttttttttctctcctttttttttttgagactgagtcttgctctatcacccaggttgttggagtgcagtggcatgatcttggttcaccacaacccctccacctcccgggttgcagtgattctcatgcctcagcttcccgagcagctgggactacaggcacccgccaccacacctggctaatttttgtatttttagtagagacggggtttccccatgttggccaggctggtctcaaactcctgcctgacctcaagtgatctgcccaccttggcctcccaaagtgctgggattacaggcatgagccactgtgcctggcctgcatggagtcctaatggcacagctcaaaccatttatgtataaagcatgcttaccttcgccctctcatttaggctctaacactcctgtggggctggccggatgatgatcagtgactccacttttcagagatccgaggcccagaggcgccagggagtggtagagccagaatgagccatgagtcttgtgacaccagcccatcacccactccccaccccctagtattgcccttctgccagttagagaggacttggtgggccaagtatgagggtgggcccaggccaggtccagagctggattggcaggtggagaagttgccccaggtcaccagcccttgggggcagagctggcacttgagccatgctcttgctcaaggctggtgttgtttctcttggctgctggcctcatggggatgggagtgaggacagcctagtttaatggcccagggtgaagaggccagcctggtgccccttacattctgtgtgcctgtgttgtgaatgaggaagaggcacagcacgctatagttggtatcagaaaacctgggttcaagttccagctctgcccccaaggggctggtgaccttgagctagcagcttcacccctctgagtccgcctcctcatctgcaaaatgagatcaagactctttacctctcaagaggtagaagggattcttccaccatgattcttccaaggttgcataaacatcaaagccctggaccaaaactaaggggtggattgttgtccttgctctgggacagggcctctggccagagagccagaggtttggggctggggggtggggaatcccagcttccccaggctgggccagaggacagcaaagacccagatcctacctcccagagaggcagtccaggccccagccaggagtgctgggaagatgggccacgacatcccagcagcctcccctctgccccataggcagccagcggcctgtgcgagctcctgtccgtcaacagctgcatgggccgtgtgaggcgcatctaccctcagctgctcctggccctgctcattcaggtccattaccacatcggcctcaacctgcctggctgcgtggctcctcccaaggacaccaagaagggtgcacagccctctcccttcgtacctgtgcggtatgctctgccctctctcttgaccctgctgtccccggtggtgggaagggccatccagtcagagcctccaaaagtctcaggggcaatcaatcaatagaaatcagctttgggactagaagagaaaacagaagcacaattttattagagccaataattcattcaacaactgtttttgagcacctgctctgtgcattacacactgtgtttagtctagatcacaggaaagaatcagccctccccaaggagttcactctttactttttcttctttcctccctagaggtattatttgtattaagtttgtatccaaggcccaaatactttatttttaattattaattggagtagataatataggcacatgggtaaaatactcaaaagacattaaaaggaagcttccttccctgtccttaccccagttatgttcccaaagacaaccaagttcttcatgccctcccagaggaggattatgcagggataaacacatttacttatattctgtatttttacaccaatgacagcacctcacactgctacacattttttgccttcattacatactatatcttagagaccattgtattgtagagctgtctccttatttatttatttatttatttatttatttatttatttatttatttgagatggagtctcgctctgtcgcccaggctggagtgcagtggcgcaatctcagctcactgcaacctccgtctcctgggttcaaacaattctcctacctcagcctcccgagtagctgggattaccagcatctgccaccatgcccagctaattgtttgcatttttagtagagatggggtttcaccacgttggccaggctggtcttgaactcctgacctcaggcgatccacccgcctcagcctcccaaagtgttgggattataggcgtgagccactgcacccggctgagctgtctctttatttttaacagctgcatagtatctctatgtataggatcccagtgcaccataattgatttaaccaggcttctctggatttcggggctttccagccattggcagttacaaggctgcagtgagtttgcttgtttatatgtctttatgtgtacatgtgattttatatgtaggacaattcctgaaagtagaatgggcacatcaaagggcttctgcattacatgttaaggtgatagaaaaagctcctgaccattgcatgataaaggataaaatggagtgactcctaaaacatccagtttgccaaattgcctcccacagagagcactgccaccagcagtgtatgagtatctatttccctacacccttgccaacacaatgtgttataaaacatttttatctttgccaatattagagttaaaaaattggaattttgctgtagttttagtatgcgtttctcttatgaatgacattgagtttgctttttttctttcttttttttttttttgagacagggtctcactcttttgcccaggctggagtgcagtggtgcaaacatggctcacggcagccttcacctcccagactcaagcaatcctctcgcttgagcctgacttcatcgcttgaagtcaggagttcaagaccagcctggccaatatggtgaaaccccgtctctactaaaaatacaaaaattagccagatgtggtggtgggtgcctataatcccaggtgctcaggaggctgaggcaggagaattgcttgaacctgggaggcagaggttacagtgagccaagattgcaccactgcactccagcctgggtgtcacagcgagactccgtctcaaaaaaaaaaaaattttttttttttttttttgttagagatggaagtcttgccatgttgcccaggctggtctcgaactcctaggctcaagtgatcctccaaccttggcctcccaaagtgctaggattataggtgtaagccaccatgtccaggccagaaatgttttttatgtagccaagtttatcagttttttcttctgtgactcgtattgttatgataggagtgtgcctaacactttctgtgttatgcacagaaaggtgcatttagagaggcagagggcaaacagttgtgtagtgggcttgagtctgaaggtcttggattcaaatcgtggcttcatcacctagaatgttgtattttgggtaaatgaattttacctcttggcagttggtttccttgcctatgaaatggataaatgattcctgtcccataggtgtgctgtgaggaccagatagggtcgcatcccagcaagacaccatttgcccgcagtgcggccagttcccattcccctcctgctcatgctcgtaggtgccgccctgagagcattgcccagaaggctgacgggctctggggaaaacacaaggggaaaaaaaggaggctctggagggggaggaggaacacatatgggaaaaaattcttgaccttggagtgatgaaaggtatgacctgccaatgcagagggcatggctcaaatgaggacatcaaggagaagctggaggagtgcccgagtatccacctcacctcagtgtctcagaagcagcctgagaggcagaaaaagcagaggcaggcatgtgccaggctgaaggggggccagaaaagtcatgagatgtagtggtctaaatggtggcccccgaaagacatgtctgcccagaacccatgatagtgaccttatttggaaaaagggtctttgcagatatagttaaggatctcaagatgaggtcctcctggattaaccatgtgggcactgaatccagtgccaaggggccttataaggagaagagaggcccagacacaggggagaaggctgatgaagacaaagagtgagtgatgtggtcacaagctaaggagtgctggaagccaccagaagccagaataggcaaggaagcattctcccctggactcttcagagggctgcggccctgctgacaccttaattttggatatctggcctctagaactgcgaaaaaatatatttctgttgttttgagccacccaggttgtggtgatttgtacaggaaatgaatcctctggggtatggcaccagagcaaattgtccgtgctccagactgcagtgatgaggtggaatagctccacggggcatcagcacacaaggcggtcacatcctcctgagaggagaggcaggctctggtaatgagtgcaacaattacccctgcaaacagcttgggtttgaaggaggaggagggagtggcctgagagcttgtcctgtgaagcccagtttctgtgccttccaggaaggtgaaactttcagcagccctgggctttaaagcagctccagctgggtgcagtggcccatgcctgtaaccccagcactctgggaggctgaggcaggagaatcgcttgaggccaggggtttgagaccagcctaggcaacatggcgaaaccccatcactccaaaaaaataaaaaattagccaggtgtgtggtcccagctacttggaagaataaggcaggagggtcgtgtgagtccaagagatcaaggctgcagtgaaccatgttcttgccactacactccagcctgggtgacagagctagaccctatctcaaaaaaagaaagcaactccatgtcagatcaatcattggctctggtgtcccagtgcagggacagagaataaatatttcaaggtgtcccttgctctactttgcagagaaagccttttagaagggtaaaacttgcagagtgagtgtttggggacacaagagccaccccaccacccacagcacagccctcctcccaaaagtttcaactctattttttcacgaagcagcacgggcgccatttgggctgttgcaagtataactttgggagtggggtgagaagggagggaaatgaggcctgggatcaccttggggtcagggtgggagggagggggtgtggaaacccaggctcacttttgtgaaaatatgaagcctgattgagggagtgaggtgaaatgacagagaggatcaactacgaatgatgcagttctgagttcagaagttcagaagtttttttttttttcctttttttttttagacggagtctcactgtcgcccaggctagagtgcagtggcgctacctcagctcactgcaaactccgcctcccgggttcacgccattctcctgcctcagcctcccgagtagctgggactacaggcgcccgccaccacgcccggctaattttttgtatttttagtagagacaggatttcaccatgttagccaggatggtctcgatctcctgacctcgtgatccaccctcctcggccacccaaagtgctgggattacaggcgtgagccacagcacctggcgaattcagaagttttggcctaaatacatattcatcaggcaacacaaatgaggactgggaggactggccaagccatggctatctggaacctctaagtcaggtcattcccttttgagctctggagctcaatctgtgcccaagccagtttgtaagaaggtgtccaaaatgatgaccctggagatagggacacacagggaggggagggtggtccagtcaccggaggagcatatgcaggaggctcattctgtcttaggtaaaggtgctagtgcctgaactttaagagaataacctttcttctccaaacaaaaacctgtacatctcagcttagccattcagccagtacttgcaaagggaagagaatggtgatgggagaattggacaacactctgagcctgcctgtctttctccctcccttttgtttgtaactctgaatgctagaggcattgccagtagggactatcattgatggcacacatttcaaagaataagcacagaggttgaatgattccaaaattctgccctcaggagaagcttttattttcacactggatcattacaaaagcaaaaacatgaaaatgaagggcaaatttctgaggattacctaattacttaagtcctttcttttgaatcatgagagccaccagctctcactatcagctgaggtatgtccacaaagtgcaccataaactctttcagcaaatgtttaggtttctggaaaactttgtttaaatgtaagctttattctatacagtgtcagtttttattttaataaaagtgtatataggctgggtgctgtggctcatgcctctaatcccagcactttgggaggctgaggcaggcagatcacttgagatcaggagttcaagaccagcctggccaacatggagaaaccccgtctctactaaaaatacaaaaattagccgggtgtggtggcgcatgcctgtaatcccagctactcgggaggctgaggcacgagaattgctttaacccaggaggcagagattgcagtgagccgagatcgcaccattgcactccagcctggcgacaaaaaaaaaaaaaaaaagtgtgtgtgtgtgtgtgtgtgtgtgtgtgtgtgtgtatctagaaacctctgtctgatctctctctctctctctctcctcccccccaccccccatgtatgaacacacagtgcggtgccaggcatacagtaggatgtcagtgccctcccagggcttcttaggctcattctggagcttgacaagcactggccagagccccagtctcgtcagttggtaggtcataaaagctccccaagtgctgctgctgggtatgcagtttgagaatcactccttaagtgtcctgagttggagaaggactcggcccacataggagactgtgagtgagcagagaggctgcctgcccagcccatggctgatgcatagtggagggtgagagagaggctggtcccagaggtaaaagcacagccttcatagggaggtggactttgcttctgtttcctctcttgttctaaaagctaatgattatttgtaaaaagccaccctttgtggatacactgaatacccctacctaaaatggtgaagagaagtttgtcgggccagatggcaggagaggccggggtggagggaggcttggcctgctagggcccaggtaggcatgaggtcttaattgccttgtcttggcagctgggtggtgaaagtggtgaaaaccctgctactgaggatgggctgctcttatgagaccacgtttctggaggaccagggtggctgggagctcatggagcaggtggagagccaccaccgcggagtggccttgctggcaaggtgagtcccgggaccaccttggggttggggtgggagggagaaagagggggacctcaggatcttcagacggacttggtctgcatctctccctgggcaagaccctttgctcagtctgtcacctcttctctacaactgggagggtgctgtcttccttggcaggtagacaatacaaatgttaaagatagcactcactcttcagaggttcctggcaattgtggagcacttagactatccacaaagcaccattccttagtgcattatgaatttagttcccatgccaaaacagaaatggtggtataaccaagttgttgaggtgtggccttggagatggcctgactgcatctgaatcccagcttaccacttgccacctgtgtgacctgggacaagttacttccctctgagtctccactttccttcaatagcatggaaataatagtcagacccacctctgagggttggggtgaggattaattaaagtactttgaataggccaggcatggtggctcatgcctgtaatcccagtgctttgggtgtttgaggcgggtggatcatctgaggttaggagttcaagaacagcttgaacctgccttttagacacagttatcaacaatgcgtttctgatattttgtgtcagttcttttgttctttcccatttgaatgtgtagtacatgatggtaagtgtcagttgggtctgcagaggcaacatagtgaaaccccatctctaccgaaaatacaaaaattagctgggtgtggtggcatgtgcctgtagtcccagccactcgggaggctgaggcatgagaattgcttgaacccaggaggtggaggttgctgtgagccgagatggcaccacgtactccagcctgaaaaaaagtactttgaatagcccctggcatatggtaagagctccacacaggctaatttttactatagttatagtcactggtggggcaggggtgattaacacatattttgcacagaaacatgccaagtctggagaggaattgtcatgtgcccgaagtcacacaggcaggacatggcagaggtgggaagtgacctgctgacccagactaaagctcttccccaggccatgcacagcttcccacggggtcaagagggagcaccttgattccaatgctgtgactcctgcaggaaagcctgcatcttagccctgtaccctgagtgccccgggtggtgctttccccagggtctcaggatacagtcacatttgttgagcacttactatgctctaggcaccatgcagagatctgtcacatgcatgatcccatttaatcctcaccgtgactgatgaaatagcacttttatttatttatttattttgagacagagtcttgctctatcgcccacgctggagtgcagtggtgtgatctctgctcattgcaacctctgcctcctgggttcaagcgattctcctgcctcagcctccagagtagctgggatcacaggcatgcgccaccacgcctggctaatttttgtgtttttagtagagacggagtttcactatgttggccaggctggtctcaaactcctgaaatcaggtgatctgcccgccttggcctcccaaagtgttcggattacaggcgtgagccacgtccctcggtgaaatagcactattattatcccagcattatacatgaggaaatggaagcccagagaagttaagcatctttccccaagtcacacagctagtgctggggccaggatttgaacccagctgtctcattctgcactccatgcatgattgccagactgcactggattcactgatggtggagcataatgcagtgctcctcagacttgagtgtgcaacggaattaactgccaggcctgttaaaacactggttgctgtgccccgtaccctaagagttcctgcttagtaggtctgggatggtgcacttcttttttgagatggagtctcactctgttgcccaggctggagtgcagtggcacggtgttggctcactgcaacctctgcctcctgggtttaagtgattctcctgcctcaacctcccaagtagctaggatttcaggcatgcgccaccacacccagtcaattttttttgtatttttagtagagacggggttttaccatgttgaccaggctggtctcaaactcccaacctcaaatgatctgcccgtctcagcctcccaaagtggtcaggcctgagccaccgcgcctggcttgggatggttcacttctaacaagctcccagctgatgctaatactctggttgagtgggggtggcactgagaggaccactggcttagtagaatgaacgaggcagctggaatgtgagccctcggttggggctccagctcggccattttctagctctgtgaccgtgggcggttcacacttagagcctctgtttcctcatctatgaaatggggataataacagcaacctgcttcgaaggatcagatggagtaacaatgtgaaagcatgtgcctgctgcctggcgcttggtgagtgggccttcacatcctctccttcctctctctgctgcctgacgtggtcctgtgcagctgagggtcttcagcctggctctcttactgatttgtgctgtgccctcaggcaagtctctttcccattctgggcttcagtttcttcatctgtaaaatgaagcagtgaaaccagatgacctctgagatcccacccaggtggaaaatcctgggaacgcaggaatccaggtgatcctggcttacccaggatttccagtgtcacaagcaaatcccccccacaggtccccctggggctggatacctgaggggactactcccccttcccacccccagggccatggtgcagtactcctgccaggagctgtgccgcatcctctacctgctcatcccgctcctggagcgaggcgacgagaagcacaggatcacggccaccgccttcttcgtggaggtaccaacgggggcagcgggtacacagcgggagctcctcccgggcctcggttcacgtcactggtcatttctcctatgtaaacagtactttatagtttacaaagccttcccatgggcatgacttctcttgactatgatgatcttgttggtctccctccctcccctccctgtctctccaccctttactccattccactcttaaccagactcccctagtgcccagggaaccaccaacctttgctgggcacctctgtgtgtcaggcacgagacatataaatgtgaatttgactctaccctgccctcaaggaatttttggtgtggcagaggacacagaggacaccccagttataacagggggtgataccagtgagtgatttgtactatgatggggccatctaggctgtggtggggaaacaagtgacttgagggagggaggcatcagggagggagggcttcctggaggaggtgacatctaagctgagtgtgtgttggggaggtgctagggagaggtgagtcaggagaagttggtggggacagacccagaagagagagacttgctaataataacagctaatatttattgagcacttaatatcttccaagcatgttctaagagcttgacacacattgattcatttggtctcatactaatcttatgacgcagatactattccatgccccgttttagagaaaaaaaaccctgaggcatcaatttaagaaactttcccaagaccgcacagcttgtaagtggcagatccaggattcaaataaagacatctgggctctaaaaccctcccctttccttttagtttttaaaaaattgtggtaaaatatacgtaacataaaatttgccattttaaccattttaggtgtacagtccaatgacattaatacattcatattgttatgcaaccatcaccaccattcatctccagaactttcgtatctttcactactgaaactcaacacccactaaacacaaactccccgttccattccctcagcccctagtaacctctattctactctctatctctatgaatttgcctattctaggtatcttatgtaagtggaatcatacaatatttgtccttttgtgcctggctgtttccctaaacataatgtcttcaagatttatctatgctgttgcatgcatcacaatttccttaccttttttttttttttttttttttttttttgagatggagtctttctctgttgcccaggttggagtgcagtggcgtgattttggctcactgcaaattccgcctcccagattcaagcaattcttctgtctcagcctcccgagtagctgggattataggcaagcaccaccatgtccagctaatttttgtatttttagtagagactgggtttccccatgttggccaggctggtctcgaactcctgacctcaaatgatcctcccacctcagcctcccaaagtgctggaattacaggtgtgagccaccacgcctagtcaaaatttccttactttttaagactgaataatatttcattgcatgtacataccacattttctttatccatttgtctgttggctgacatcgtaaaacccactcttttaaccaccacgcttgcctagttcttgtgacctgatggttgtcatgaggcaggtctaggctaaactaggatctgtatagtgaggctcagaggcaagaggctcattgtctgcttggatagtgtgaaggttaaggaaggcttcctggaggagatgacatttaaactgaaccttaaagtttgccaaatgaacaagaggcagcatgggcatcctaggtacttttgtcatcttttctgccactgcaggtgggctatgagttgggagaagggaccatgtcacattggtattgcacccccaggtccagctttaggagggccccaagaagtggggatgggatggatgaaggagtgcctgaacaaatactgcaggtcaccagcagaatgtgtcacctccagggagagcaaacctggccttggggtcgggagtcctgggttccagccccagctccatccagttctaactccaatttccctgaccatggtgagggaaagagaaagggaaactaccattacttacaggcctactatgtgccaaacacttgtattgacctctttcaaatgttatttcactaatctgcacagcaaccctgcgaagaaggaattgtgatactcatgcttaggtgagttaaggggaattttttaaggtcacagagctcagagagtccagagagattcagaacaggcctgcctgacacggtcctctactttggtcagcctcttggagaggcacttctaagtctgttagtgtctaccacatgggttcttgcaggagaggagggagggtggatcttgccagaccttatggggcattcctgtgtccaccacaaagtcagggactctaggtttaacttctccccaccattccctggactcctgaccagcagcccttccgccctgcagcaagggtcttggcccaggttcagtcttttccacctccccagaagaggtgtctgctcctggccagtcagccccaccattaaagccgtggcactttgatgcagctcagatgcccctttcaccctcgtcccctccgccccggcttcctgtcgccctctctgctgtgatggtgtgtgtgcttgcttctcccagtggaaggtgaactccttaagggagctgtgccatcttggacaagtcacttaacctgcctgtgcctctgtttcctcacctgtagtatggggatgatgacttgaccacctcctagagtggtcaggtttacataaagcacttagaacagtgcctggcacataggaagtgctctctgtgagtcagttaaattgcttttagggttctcatgactcttttccgtgtctccagtgcccagcccagaagctgtgcacagcaggcctgaatattggtggtgtgaattggtggatggcgggtgataggtggagcccctccttttctgcctcctcccccggtgacctgtcctgccccctcctccagctctgcctccccagctctttcctcccacaatacagacacacgggctcaacagtcacaggagatgtcaggcaagggcatggaggggagaagcgtttgtgagagtcatgcagcaggcatcgaagtcctgttggctgccgtgggtggggaggccagtgggggagaggagggggataagggtgaggctggtgtgcagcttggacgatggggggctggtagtgctaaccctgccacagggagtgcaagaggagggcatgcctaaggaggaaaggagccaagtttctttcttttttttttttttggacggcgtttcattcttgtctcccaggctggagtgcaatggcgccatcttggctcactgcaacctccccctcccaggttcaagtgattctgatgcctcatcctcctgagtggctgggattacaggcacctgccaccatgcccagctaatttttgtatttttagtagagatggggtttccccatgttggccaggctagtctcaaactcctgacctcaggtgatttatccacctcagtctctcaaagtgctgagattataggtgtgagccaccttgcctggccttttctttctttctttctttctttctttctttctttctttctttctttctttctttctttcttttctttctttctttctttctttctttctctttctttctttctttctctccctctctttctttctcctttcttccttctttcccctttccttccttccttcctccctccttccctccctccttctctctctttatttctttctttatttccttctcttttcaaggtggagtcttgctcttgtcacccaggctagagtgcagtggtgtgatcttggctcactgcaacctccacaccctagattcaagcgattctcctgcctcagcttcccgagtagctggggcgtgtgccaccgtgcccggctaattttttgtatttttagtggagatgggggtttcaccatgttgcccaggctggtcttgaactccatacctcaggtgacccacccaccttggcctcctgagtagctgggattacaggcatgagccaccgtgcccggcccaagccaagattcatgttggacctgaactcatgcagcaagcagtccctgagcacatattccgcaccagagttgatgttagctaacaggggcccatggaggaacaactcgggttttgtcctcagggaaatcccctgttggataggggaggcagatggaggcactgaaggtttccagctgtcgcctcaggaggaagtccagggcacccaagggcccagggaaggaggcagtcagcctaaatgaggccaggggcagtgtcaagcctagctttaaggctctgagttttggatggagccctgcgaggtggcaggggtcagagtggaggtgggcatcccaggagaagggcattttgccagcacagaaggggtggaacagcctgggtagttcagagaacaggagacagcttggttggaagctggctggctggtggtgagggtgtgggctggagggtgggcacgctgctgttaatgaggccacaggatctcatgggaaaggcaacaacaagcagtcacaggggctcggagctggagagtgacacactcagctttgccacatggtgctgatggacatcagacggagacttccagcaatctgttggttttgcaagtctgaagctccgggcagagctgagcctggtatccaatgtgcaatcccagtgcatgggaggccagggggctgccctgcccccctcagcctgggaagtaatgaccctttgctccctcagctcctccagatggagcaggtgcgccggatccccgaggaatactctctggggcggatggcagaaggcctgagccaccacgaccccatcatgaaggtgctgtccattcgaggcctggtcatcctggcccgcaggtctgagaaggtgagtgggaggcagaggaaagcctggcccagccaggccccagactggaggaaggacagagcttcaccattatagtacctcagaagcccacagctggaatgagacatcatttctatcttagcctcagttgtcccatctgtaaaatagatatcctttaaaaatctatatattttattccttttgaatagtttctaatctaggtttttcacaatgattctaaaggcagtgtgtataggaagggcaaagtgtggcacaagtattcctattttacagataaggaaacagagcccagattgttgctgcatcattagcattttttaaagtgctttgtttttctctaccaggcactgttgcagctcatgatgtagctgctatgaaaggacaggacatagactcagaaagctaactaacaacacagcgtgtcatctacctagagccaaggaagggggtagacagcaaagggcctcaggggtcctggccaacgagtcagtgaggccaaagaaggctttgaggagcagcaagaggttgggtgagggtattccaggcaggtgggatggcataggccaaggcctggaagtggggattgggccaccaagttcatttcagtgaatcagaggctgggtctcttcctacttgctagctcagataggagccctcatcccaaatgctcctgccccacagaccgccaaggtgaaggccctcctgccctccatggtgaagggcctgaagaacatggatgggatgctggtggtggaagcggtccacaacctcaaggctgtcttcaaggggcgggaccagaagctgatggacagtgcggtctatgtggagatgctgcagatcctgctgccgcacttcagcgacgtgaggacctcacagagcgaaggagcaggagggatcgagaagggggtcttttactaccttgggggctgcatttccacctgtgcccccatcaggacctgggcagtgttgggtcagcctactgggagaggaactttgtcccagctggtccacatctttttgtaaatgttccttattctaactggttctgacagaggaagctcttctttcacaatcgagtctccccagaaagggtcatctattgtgactggttcatctagagggggtactttctttttaaaggcaggatcttgctctggcacccaggctggagtgcagtggcaagatctcagctcgaccttcctggctcaagcagttctcccacctcagcctcctgatagctgggactatgggcatgcaccactatgcccagctaattttgcattttttgtagagatggggtttccctatgttgcccaggctggtcttgaactcctgggactcacgtgatccacccccacctcagcctcccaaagtgctgggattacaggcatgagccacagcacctggccagttttttttttttctttaaactgctcctagcagaggaggagagggaggcattttcctacttagcactcaggtgccttttaggttagtgggggtctggctgggaagagtcgggagagttccagacctaggcttgagtgagaggaacaatggctctgaatcagccgcagtgagtggcgtcccagaggagggaccccctctgagcctttggtcttccccaggcacgagaggacgtgcgctcctcctgcatcaacctgtatgggaaggtggtccagaagcttcgggcaccacgcactcaggccatggaggagcagctggtcagcaccttggtgcccctactgctgaccatgcaggagggcaactccaaggtaagccaggtgagtgtg

SEQ ID NO: 7810 - DNA, 13216 bp, Homo sapiens
caggctctttaccatcagaccctggaggccctgcagacactgctcaaagccctctttatcgaggaccccactcctgctgggctgaagagcatcttggaggtgcggagatgggaggggcaaggaagggaggggaggaagggtggagggaagagagaaattggtgcaggagcagtggaggccagacctaggagtgatttggcttcaggatgtcatcttgtgtgagtgttctgcctccctgtctgtctcacaggccctgtcccagactcctgcctctccccactctctccccatccccccactctctaaatggctgcccatggttatagctgccaccatctctgtgcccttcccatgcttgtccctgcgtctctcttctgtcttcatgactcttcactcttcatctgtctcctcattgacttccttcttccctatagtctgtcagtcctattctgaactctatctctgcctataccccaagaagaggaggagggctgtggtgacctttataccctctctggaagcttcctgctgatgggtgaaggctggcctgtccacccagcagcaggggctgtcatctaacctgtagttctgagtcttgcttttgatcccacaggccctggggccttggatgaactctgggaaggcccatgagcgagcacgggctgtgaacaccaatgtctctgtgttgaaccacatgcttctaactctgcctttctttgtgagtggcccctgggaggggtggacactcttagggaaaatcttcccacttctgaaggagcccgtacctctgttcagggattcccaggtggctcttgccatcttcagagggctgtgctatctgggccagactatccaccagtgttcaccatttaatgtatagcattattgaacctataacactcaatccctaagattgcaatacaaacagatgcccttggggttcccggcgctggggcttctgctggggagactcatccttcgcattggggatcctgatgaggagattggctgtgaggctctggacggcatcatcatcctctacactattctggagctccaaaaacgtaagccctatcggagtacttctgaaggaagtcttctgagttgttgctcagtctggattcaataaagaatcagctggagccttggcattaaggcactggtgggagatgggggaaaccagcacagggccagatggggactgtggaaactggtgtgaagcccaagaccccagagaaccaggggacaaaggctacaaacaaaactattttgatttaagcaatcttgctttttctcatccttccaagcttagtttgtgactgtcattttcatagtcccttaatactatgtatacctaaggataattcccctaataccttgttttcctgtctgttttccccactagagactataatcctatgagggaagggcagggctgtatcttggtcacccctgtattcccaagggccatctctgggcttggcacatggtgggtgctcagtgaatatctattgaatgaatgaataaagaacagcttctgtcttagaatccagagcagctaaagcttgtagttgggagaactttccttgattcagcttcagggagcacttcgtgatgtggtatgggctgacacaggtatccagaaggcattgtacctagaggtgcacagtatcagctgtcacttgcctccttcctttctccatcatcctagctctgccctaaaccagggcaccttggcatgtggtttaaactctcctggctctgggggtagaatgacctttgcataagagctgctcctatcgctgcttagtggtgtgacctcaggtaatcactttgtgtaggcctagatttcctcatctgtgaaaatggtatactcagatataattcataattcatgcttttttttttgacagagtctggctttgttgcccaggctggagtgcagtggcacaatcttggctcactgcaatctctgccacctgggttcaaatgattctcctgcctcagcctccccagtagctgggattacaggcacacatcaccacacctagctaattttcatatttttagtagagacgggatttcaccatgttggccaggctggtctcaaactcctgacctcgagtgacccatctgcctcagcctcttaaagtgctgggattataggcaggagccaccacgcctagcctaaattcatgctttttgaaagattaagtgagatattttgtaagagcatatgtaaaggtactagctcagtgccacacattataggcacttgtcatgtagttcactttttcctatcccttcaagcttttgggatttatctggtatcctcactcttcttgatctctagcatttgggacaaagatctggtccctgggagatttaccctgttgaccaggagccactcacatctctggaggatgggtgaaggtggtataagccatgttaataaccagctttaggggtaggagtaggagcctctgtgagcctattctggctcgggacgctgccttttttttttttttgagacagagtcttgctctgttgcccaggctagagtgcggtggccattctcggctcactgcagcctcaatctttcaggctcaagcaatcctcccacctcagcctcctgagtaagtgggactacaggagcatgctaccatgcctggctaaattttttttgtatttttggtagagatggggtttcaccatctctaccaaaaatacaaaaaaaatactggggtttcaagaccaggctggtctcgaacttctgggctcaagtgatccgcttgccttgacctcccaaagtgctgggattacaggcgtgcaccaccgcaccctgccgaggcagctcatttaaaaaagaaagaaagaaagaaaggaaaatgagtagaaattatagacccaattagggttgccagatttagcaaataaaaaatacaggatacccagtaaaatttgaatttcaggtaaacaatgggtaatttttagtatatttgagatgtactttcactaaaaatgatttgtttatctgaaattcaaatttaactggttatcctgtatgttatttggcaaccctaggccaaacttatactcttagattttatttatttttttctttttttagcaggcaagaaccatactcttagatttatttattttttgagatagagtcttgctctgtcatccaggctggagtgcagtggctcaatcatggctcattgcagcctcaacctcccgggctcaggtgatcctcccacctcagcctccagagtagctgggactacaggcatgtgccaccatgcccagcttatttatttattactattattttttgagatggagtgtagctctgttgcccaggctggattgcagtggcacagatcttggctcattgcaacctccgcctcccaggttcaagcgattctcctgcctcagcctcccgagtagctgggactacaggtggctaatttttgtgttttttaatagagtcagagttttgccattttggctagggctggtctcggactcctgatctcaagtgatctgactgccttggcctcccaaagtgctgggattacaggtgtgagccactgtgcctggcccagcttatttaatttttcttttcttttttttttttctggagtcttgctttgtcgcccaggctggagtgcagtggtgcgatctcagctcactgcaaactccacctcccgggttcaagagattctcctgccttagcctcctgagtagctgggattacaggcgtgcactaccgtgcctggctaatttttatatttttaatacagatggggtttcaccatgttggtcaggctggtctcgaactcctgacttcatgatccgtccccctcgacctcccaaagtgttaggattacaggcatgagccactgtgcccagccgctaatttattttttgtacagacagagtttctccatgttgcccaggctgatctggaactcctgggcgcaagtgaaccatctgcctcggcctccaaagtgctgggattacaggccgggtgcggtggctcacgcctgtaattccagcactttgggaggccaaggcaggtggatcagctgaggtccggagttcaagaccagcctggccaacaaggtgacaccctgtctctactaaaaatacaaaaattagccacgtgtggtggcgcatgcctatagtccccactacttgagaggctgaggcaggagaatcacttgaacccaggaggcggaggttgcagtgagccaagatcacaccactgcactccagcctgggcgacagagtgaggctgtgtctcaaaacaaacaaacaaaacaaaacaaaacaaacaaaacaaaaacaaacaaaaaacccgaagtgtggggactacaggcgtgagccactcgccacggccactctcaagatttaatctcaatgagtgaagtggtctgtccaggccccctgactgtaggaagcagcacagctaggatttgaacctgagttggcctgactgcaggtatccagctcctctcctttacaaacagcacacacacttggtctatgtgaacactctgccttggtggccctttcttgtgcccacgtcctgtattccttgaggagatccaggtaggacccaaggtgggctgaaataagggctcaggaagtgcgcctgaaatgtgctcccttcagctgaaaatatgaagccactatgtgccgggtactattctaggatatggggacacaggagtggggaaaagagattaaataatcctcctttggtgagagtaccttctcgttgtcgggagataagatagtaaacaaaataaacaagtaacacatatagcaagtcagatgatgacaaaaactaaagaaaagtagaaaaggattggtaccaccaggggtaggggattgcagtttaaaagaggtattgccacacatccaccagaatggcataaatgaaacagacagacaatgacatgtgctggcaagatgtggagcaatgggaactctcgtgcactgctggtggggttaccgttgatttcccatcatagaaaactgtttggcaatatcttctgtagccgaacctatgcttagactatgacccagcaatccattcctaggtatacaactaacaactgtgtagatatactcatcaaaagacacactagaatgttcttagcagcacgatgcttagtagctggcaataacccaaatgtccatcaaaaatagaactgataactaatcatagtctttcatactgtgggaaattatacagcactgagaatgaatgaaagaactaatgctgatgcaactgtgtggatgaatctcaaccatataatgttgagcggaagaagacagacatcaaggataacgtgtccatttatctaaagttcaaaagcaaagacatctctctaagggttgagaaattagaatagtatttagccagggtcagggagagggctattgatggaaaggggtgcacaagaggggcttctggggtgctgatcacgttctgcttcttgacttgggggctggctacaatggtgtgttcactatgtgaaaatgtatcaagttagttccttatgatgtaggactttcctacatgtatgttaaccaaaaatagggagatccggcctcactgagaaggttctcatcttgcaggagccagagataaggaagagaccaacaaaaaggagctatatgagagcaacaagcatttcctgggccctacaaccctgtgagcccgtgccagaacattctgcgggtgatcgaggtgactgcctggtgcccatccaggagcggagggtggggggtgaggaggggcagtgccacctggccccaaagctttcttcccttctagctttccaggctttgcaggacgccttcccagccacccacgcctgtcctgagtgccctcctcctccagtctgtgccacagtgcatggacttccttctcccttacgcatgtcaccctgtgctgagtgcagggacatgttgctcttacttttgtagctcctcccctaaaggttcaacacttatgtgttaactgaatattcctggccctccctgctgacctctgcatgtgggcgtcaggcagtgtttgtgcctctgtgcacaaagctcgaagctcaaagctcgggctacccatcagtgtgtcatgatctcagcacctttgtttcaggaatttggagacttcctggggccccagcagataaaggacctgctgctggccgccctggaagggctgaaaggcagctcagaggctccagggaaggactccagggagatgatgcagctggcctcggaggtcatgctcagctcggtgctggagtggtaccgccacagggcgctggaggtggtaaggcctcctgggggcagggagtgaactgtcactggggctcgggagctccccccatggcctgctcatcactggccggccagacagtgggcagggtggggtatacctgaaccccctaagccatggggcagggaaggggtgctggtggctgagttctaggtgctcccaccttgaaggttttctcttaccacccctgaaggagctcaactgacttggtggtgggtagaggtgggtttggcggtggaagcaggtatagggagcatagtaaagagaaactggctcactcccagggaggggcaggcgctctgcttgcctcttcctctctctctcctttgggccttcacccctgtcctctagcctgtcacccccttccctctcctcccacctcttcctgctgcacctcgtgcttcccttggcagtccccttgctcatggctgccccggctgtgccccagatcccagaaatcatgcaaggcatctacatgcagctgagccacatccaggagcctcggcgccgccaggtggccctgctgcccgtctccctcctggctagctccttcatgaccgaggttgtggtggccctgctcatgtgccccctcccactgaacaggtaccaagtgaagggttcccagccactgcatcttacagggttcaagcagcccccaccccaggttgggacccccttctgcccagataagcccctcgccctcccagatggccccccttctgtgatctggggtgtttatgacaaccattaagcacttcctgagcactgctgctgtcagcgccgagcattacaatagtctctaattctcacaacaatcccattctgcagatgaggaaaccaaggcttagggaagtttcttgccttaggtactcactgagcaagcaatagaacggaggacctaaactcaggtctaactaactaccagcccagagctctttaacaatgccattgaaaggaggtctgcgtgtccgtcctgactctgcctccagctgctgtgtgggtcttgggtagcccatttgtcctctctttcccccttaggcaaaagaaggaaatgatccctgcactcccaccccaggtgggtggtcatgacagtaatgcagccagcggtgctgagtgcctgctcaggcctgggcccgtgcggaagggtgctccaagctcactgtcttcagggagctcgtgatctgatgggcagaggggactgtggtcagatggtgagctcgtgggcaggagaggtcagtctggcctcagcctcccacccaggaaatgctcccatgctttctttgaatgagtaaaacaaggcagtgagtgatccacaccttcgggtggttgtttgagagccaaagaactgtgcagagctgtgcaaatggggtgtgctccaataagggcagttgatgtcattcataggaaccaagaagatcagtcaggatggtgagggcccagctggcacatcccagtctcccacttggaagaattaaaccctttctggctgtactccccaccagggttttttttttcttgggtccactaaacagtcagactcataagactactgggggcctcatctgacatccgtcacacaggatacaggacagggcagtgtcaggagctcctccttgcgggggtccttgcagcagcccccacagcaggccaggcagaggcacccagggcataacatttaaggacatagtctcgggtgccaagtctgcacttgtgtgagcctgagaatgagggcttccttcaagttggcaccctggatgcctcactttccttatcctagtcttggccctgagtctaggagctggtctcttgggcctctcaggtgaaagttcaggtgtgacgaaaggagacctatagggtggatataggagctgccctggcttaaatggcacaggcctcacagagaccagtatcttttacatcttggctttgcttccagggtccccacagggacaaaccaagttacaagggtcactgcatcctgggaagctcaatgctatagtgtccccatcagttcttatagttaatttatagttcctccctgtccagatgcaatttaccagtggagtcattattaccataagtaatgttgcctagcaacatagttgacatactgtatcaggttgccaggggaacagagctagaaagtgaatggagggttgaaaccctcttgtagaaggggaaaggtttttgttaaccctttagtacactggcctgccagtgctttcaacaccctatgataggagtttggttgggtgcagatgcttttccttgcctggtgtactgccttttaagggatgggaacagaggctccctgatattatgtgacaagtgcaggatccttaccccaggctgctcaactgcctccactcttgctccttggttagaggaatgagcacaggctttgaagacatcgaggcctggccatatctggactctgcagctcattagctgtgtaatcttggactggtaatttcacctctctgagcctcaattcctcatttgtaaaatgggaataacaacactaaccttagggttattgtgagaattcagtgatcttgagtgtcttgaatccttgttcatgtctgtattccccaagatttgcgtagggcctggtgtacagtaaatgctcagctaatatctgccgaagtaatacattgcatgtaaaacgtaaaacatttggcatgatacctgggaaatagggtttctttctttctttctttttttttttttttttgaagatggagtttcgctcttttctcccaggctggagtgcactgctggcgtgatcttggttcactgcaacctctgcctcccgggttcaagcgattctcctgcctcagcctcctgagtagctgtgattacaggcatgcaccaccatgcccagctaattttttttgtattattagtagagacggggtttcaccatattggccaggctggtctcaaactcctgaccttaggtgatccacccactttggcctcccaaagtgctgggattacaggtgtgagccaccatgcccaccaaggaaatagggtttcttgtccttctagcccctgactctttgggagtgttttctggactattccttgcaggtgtgcccatggatgccatttcattggcatcttaccttccccctcccaaaaccatttggaggctgggttagccccactgccttggccaccactaattgcccacatccctgacctctcagcaatggagcagagatgtggaggcagctgatactgtgtaagcccagctgtgatgtccgagacctcctggatctgctcctgggcagcctgaaggagaagcccgtcaccaaggagggccgggcttccatcgtgcccctggcggtgagcacccagtcagccagcccctattgctgcctgtcctgcccttcctctctccttccctcctgctgagctaagcacacccggcctcgagtaccgcactctgccagtaactagttgtgtggtcttgggcaggtctctggctctggctcttgtctgtggttcactggacaataacagtagtgttgtctatggtgacaacagcagcctgggatatgggaaaaagagtgacttggagtcacagacagtctaaatcctggttctggccaggcatggtggcacatgcctgtaatcccagcactttgggaggcggaggcagaggatcacttgaggctaggagtttgaggccagcctgggcactatagcaagacctcttctctatttttttaaaaaaatcctacattaccattttgtggcctaggtaagtcacttccacctctatgaggctcagtttctacatatgtgaatagaaataatatctttctcatatggcggctgtgaagattatatgagataacacattcattcatttaggtgacacaaaacacttcttgctgccacactccaagcttgaccctgggaacacagagcgaaaggcagctctgactcaggaagctggctgggctgaagagacggatttgtctctgtctctatcaccaccctggtccatgccagttggtccatacccctggtccatacccctgcctaccttcctgattctgctcctgcccctccaatctgtactgcagccaaaaagtctttgagaaatgcacatctcctcttctcagcacccttgatggttttgcattgcccctgagagtgacacagtgctcctacctgtggcgaaggccctgcatccctggccggcttccccacgctccatggtcctcctgcttgctttgctccagcctcacgggtctttgtcagaacttcatccagccacgctatcttgtcacagggcctttgcacatgctgtttcctctacctagaatgctctccaccgagctaacttctactcatccttcagctgtcaactccagcatcacttccttagggaagccctccctgatctccctgacctggtcaaatctgtacgtagtatattttgcgtcacatactttgtatgaaaagagtttacaccagttgtcatttgacaacaccacaggggatcctttggttaatctgtgagacacatgaagacattgctgtcctgctgtgctcaccatgatatccccaacatcttgcatacacctggcgcatagtaagcactcagaaatgtttttgttgggctgatttattttttcaataagtgtttagtgagcacctcctatactatgtgccaagcacacttataggttctggggattcagaagcgagacattctggtgaagggaagtaaataaaggtacagtagatgaaggagagggtagtattatcccattacagaggaggatgctcctgcttagagacattccatgtctccccccaggtcacctagctagcaatggtggtgctaggactcaaacccagcagatcttccgcttccaaatcctgcgcttcactcccatatatctctctgcctttgtcctccagcactgagttctgtgcctaaggcaccagcactccttcccttgcaatttgggcattcatcctcttctacaattggtgtatgttagtgtattctttagtcactcatttgtgcttcttgtccagcaagcatagtttaagcatggatacagcctgaactcattcttatcttatggcactgataaatcgtttgagcaagatagagccgaaagcaaagccctgtggcacatcactagagacttttcccttacaccacagactgtgttctttggatgtaatcattagctttgggctgctggaaaagtacaagggctttgagtccaagagacttgtcttagctctgccactgcctcactatataaccgtggtcaatcacttcccctctctagccttggtgcttatatctgtaaaatgggctatgataactcctgcattgtctatcttacctgttgagaaaggggagatagtgtatgtggaagaacttcttaagctgtaaagtgcaaattaactgccatttattgttctcattcagcccatgttaggtcacttttctccaagggaacatgtcaggggttctttcactttgcaattaaatgctttcctcttggcccagatgcatggagtctttttttttctctcctttttttttttgagactgagtcttgctctatcacccaggttgttggagtgcagtggcatgatcttggttcaccacaacccctccacctcccgggttgcagtgattctcatgcctcagcttcccgagcagctgggactacaggcacccgccaccacacctggctaatttttgtatttttagtagagacggggtttccccatgttggccaggctggtctcaaactcctgcctgacctcaagtgatctgcccaccttggcctcccaaagtgctgggattacaggcatgagccactgtgcctggcctgcatggagtcctaatggcacagctcaaaccatttatgtataaagcatgcttaccttcgccctctcatttaggctctaacactcctgtggggctggccggatgatgatcagtgactccacttttcagagatctgaggcccagaggcgccagggagtggtagagccagaatgagccatgagtcttgtgacaccagcccatcacccactccccaccccctagtattgcccttctgccagttagagaggacttggtgggccaagtatgagggtggcccaggccaggtccagagctggattggcaggtggagaagttgccccaggtcaccagcccttgggggcagagctggcacttgagccatgctcttgctcaaggctggtgttgtttctcttggctgctggcctcatggggatgggagtgaggacagcctagtttaatggcccagggtgaagaggccagcctggtgccccttacattctgtgtgcctgtgttgtgaatgaggaagaggcacagcacgctatagttggtatcagaaaacctgggttcaagttccagctctgcccccaagcgtggtgaccttgagctagcagcttcacccctctgagtccgcctcctcatctgcaaaatgagatcaagactctttacctctcaagaggtagaagggattcttccaccatgattcttccaaggttgcataaacatcaaagccctggaccaaaactaaggggtggattgttgtccttgctctgggacagggcctctggccagagagccagaggtttggggctggggggtggggaatcccagcttccccaggctgggccagaggacagcaaagacccagatcctacctcccagagaggcagtccaggccccagccaggagtgctgggaagatgggccacgacatcccagcagcctcccctctgccccataggcagccagcggcctgtgcgagctcctgtccgtcaacagctgcatggg

SEQ ID NO: 7811 - DNA, 89 bp, Homo sapiens
atggctggaacccgggaggcagagcttgcagtgagccgagattgcgccactgcactccagcctgggcgacagagcgagactccgtctca

SEQ ID NO: 7812 - DNA, 152 bp, Homo sapiens
gggcgtggtagcgggcgcctgtaggcccagcaactcaggaggctgaggcatgagaatggctggaacccgggaggcagagcttgcagtgagccgagattgcgccactgcactccagcctgggcgacagagcgagactccgtctcaaaacaaaa

SEQ ID NO: 7813 - DNA, 7581 bp, Homo sapiens
tttgagatggagtctcgctctgtcgcccaggctggagtgcagtggcgcaatctcagctcactgcaacctccgtctcctgggttcaaacaattctcctacctcagcctcccgagtagctgggattaccagcatctgccaccatgcccagctaattgtttgcatttttagtagagatggggtttcaccacgttggccaggctggtcttgaactcctgacctcaggcgatccacccgcctcagcctcccaaagtgttgggattataggcgtgagccactgcacccggctgagctgtctctttatttttaacagctgcatagtatctctatgtataggatcccagtgcaccataattgatttaaccaggcttctctggatttcggggctttccagccattggcagttacaaggctgcagtgagtttgcttgtttatatgtctttatgtgtacatgtgattttatatgtaggacaattcctgaaagtagaatgggcacatcaaagggcttctgcattacatgttaaggtgatagaaaaagctcctgaccattgcatgataaaggataaaatggagtgactcctaaaacatccagtttgccaaattgcctcccacagagagcactgccaccagcagtgtatgagtatctatttccctacacccttgccaacacaatgtgttataaaacatttttatctttgccaatattagagttaaaaaattggaattttgctgtagttttagtatgcgtttctcttatgaatgacattgagtttgctttttttctttcttttttttttttttgagacagggtctcactcttttgcccaggctggagtgcagtggtgcaaacatggctcacggcagccttcacctcccagactcaagcaatcctctcgcttgagcctgacttcatcgcttgaagtcaggagttcaagaccagcctggccaatatggtgaaacccgtctctactaaaaatacaaaaattagccagatgtggtggtgggtgcctataatcccaggtgctcaggaggctgaggcaggagaattgcttgaacctgggaggcagaggttacagtgagccaagattgcaccactgcactccagcctgggtgtcacagcgagactccgtctcaaaaaaaaaaaaattttttttttttttttttgttagagatggaagtcttgccatgttgcccaggctggtctcgaactcctaggctcaagtgatcctccaaccttggcctcccaaagtgctaggattataggtgtaagccaccatgtccaggccagaaatgttttttatgtagccaagtttatcagttttttcttctgtgactcgtattgttatgataggagtgtgcctaacactttctgtgttatgcacagaaaggtgcatttagagaggcagagggcaaacagttgtgtagtgggcttgagtctgaaggtcttggattcaaatcgtggcttcatcacctagaatgttgtattttgggtaaatgaattttacctcttggcagttggtttccttgcctatgaaatggataaatgattcctgtcccataggtgtgctgtgaggaccagatagggtcgcatcccagcaagacaccatttgcccgcagtgcggccagttcccattcccctcctgctcatgctcgtaggtgccgccctgagagcattgcccagaaggctgacgggctctggggaaaacacaaggggaaaaaaaggaggctctggagggggaggaggaacacatatgggaaaaaattcttgaccttggagtgatgaaaggtatgacctgccaatgcagagggcatggctcaaatgaggacatcaaggagaagctggaggagtgcccgagtatccacctcacctcagtgtctcagaagcagcctgagaggcagaaaaagcagaggcaggcatgtgccaggctgaaggggggccagaaaagtcatgagatgtagtggtctaaatggtggcccccgaaagacatgtctgcccagaacccatgatagtgaccttatttggaaaaagggtctttgcagatatagttaaggatctcaagatgaggtcctcctggattaaccatgtgggcactgaatccagtgccaaggggccttataaggagaagagaggcccagacacaggggagaaggctgatgaagacaaagagtgagtgatgtggtcacaagctaaggagtgctggaagccaccagaagccagaataggcaaggaagcattctcccctggactcttcagagggctgcggccctgctgacaccttaattttggatatctggcctctagaactgcgaaaaaatatatttctgttgttttgagccacccaggttgtggtgatttgtacaggaaatgaatcctctggggtatggcaccagagcaaattgtccgtgctccagactgcagtgatgaggtggaatagctccacggggcatcagcacacaaggcggtcacatcctcctgagaggagaggcaggctctggtaatgagtgcaacaattacccctgcaaacagcttgggtttgaaggaggaggagggagtggcctgagagcttgtcctgtgaagcccagtttctgtgccttccaggaaggtgaaactttcagcagccctgggctttaaagcagctccagctgggtgcagtggcccatgcctgtaaccccagcactctgggaggctgaggcaggagaatcgcttgaggccaggggtttgagaccagcctaggcaacatggcgaaaccccatcactccaaaaaaataaaaaattagccaggtgtgtggtcccagctacttggaagaataaggcaggagggtcgtgtgagtccaagagatcaaggctgcagtgaaccatgttcttgccactacactccagcctgggtgacagagctagaccctatctcaaaaaaagaaagcaactccatgtcagatcaatcattggctctggtgtcccagtgcagggacagagaataaatatttcaaggtgtcccttgctctactttgcagagaaagccttttagaagggtaaaacttgcagagtgagtgtttggggacacaagagccaccccaccacccacagcacagccctcctcccaaaagtttcaactctattttttcacgaagcagcacgggcgccatttgggctgttgcaagtataactttgggagtggggtgagaagggagggaaatgaggcctgggatcaccttggggtcagggtgggagggagggggtgtggaaacccaggctcacttttgtgaaaatatgaagcctgattgagggagtgaggtgaaatgacagagaggatcaactacgaatgatgcagttctgagttcagaagttcagaagtttttttttttttcctttttttttttagacggagtctcactgtcgcccaggctagagtgcagtggcgctacctcagctcactgcaaactccgcctcccgggttcacgccattctcctgcctcagcctcccgagtagctgggactacaggcgcccgccaccacgcccggctaattttttgtatttttagtagagacaggatttcaccatgttagccaggatggtctcgatctcctgacctcgtgatccaccctcctcggccacccaaagtgctgggattacaggcgtgagccacagcacctggcgaattcagaagttttggcctaaatacatattcatcaggcaacacaaatgaggactgggaggactggccaagccatggctatctggaacctctaagtcaggtcattcccttttgagctctggagctcaatctgtgcccaagccagtttgtaagaaggtgtccaaaatgatgaccctggagatagggacacacagggaggggagggtggtccagtcaccggaggagcatatgcaggaggctcattctgtcttaggtaaaggtgctagtgcctgaactttaagagaataacctttcttctccaaacaaaaacctgtacatctcagcttagccattcagccagtacttgcaaagggaagagaatggtgatgggagaattggacaacactctgagcctgcctgtctttctccctcccttttgtttgtaactctgaatgctagaggcattgccagtagggactatcattgatggcacacatttcaaagaataagcacagaggttgaatgattccaaaattctgccctcaggagaagcttttattttcacactggatcattacaaaagcaaaaacatgaaaatgaagggcaaatttctgaggattacctaattacttaagtcctttcttttgaatcatgagagccaccagctctcactatcagctgaggtatgtccacaaagtgcaccataaactctttcagcaaatgtttaggtttctggaaaactttgtttaaatgtaagctttattctatacagtgtcagtttttattttaataaaagtgtatataggctgggtgctgtggctcatgcctctaatcccagcactttgggaggctgaggcaggcagatcacttgagatcaggagttcaagaccagcctggccaacatggagaaaccccgtctctactaaaaatacaaaaattagccgggtgtggtggcgcatgcctgtaatcccagctactcgggaggctgaggcacgagaattgctttaacccaggaggcagagattgcagtgagccgagatcgcaccattgcactccagcctggcgacaaaaaaaaaaaaaaaaagtgtgtgtgtgtgtgtgtgtgtgtgtgtgtgtgtatctagaaacctctgtctgatctctctctctctctctctcctcccccccaccccccatgtatgaacacacagtgcggtgccaggcatacagtaggatgtcagtgccctcccagggcttcttaggctcattctggagcttgacaagcactggccagagccccagtctcgtcagttggtaggtcataaaagctccccaagtgctgctgctgggtatgcagtttgagaatcactccttaagtgtcctgagttggagaaggactcggcccacataggagactgtgagtgagcagagaggctgcctgcccagcccatggctgatgcatagtggagggtgagagagaggctggtcccagaggtaaaagcacagccttcatagggaggtggactttgcttctgtttcctctcttgttctaaaagctaatgattatttgtaaaaagccaccctttgtggatacactgaatacccctacctaaaatggtgaagagaagtttgtcgggccagatggcaggagaggccggggtggagggaggcttggcctgctagggcccaggtaggcatgaggtcttaattgccttgtcttggcagctgggtggtgaaagtggtgaaaaccctgctactgaggatgggctgctcttatgagaccacgtttctggaggaccagggtggctgggagctcatggagcaggtggagagccaccaccgcggagtggccttgctggcaaggtgagtcccgggaccaccttggggttggggtgggagggagaaagagggggacctcaggatcttcagacggacttggtctgcatctctccctgggcaagaccctttgctcagtctgtcacctcttctctacaactgggagggtgctgtcttccttggcaggtagacaatacaaatgttaaagatagcactcactcttcagaggttcctggcaattgtggagcacttagactatccacaaagcaccattccttagtgcattatgaatttagttcccatgccaaaacagaaatggtggtataaccaagttgttgaggtgtggccttggagatggcctgactgcatctgaatcccagcttaccacttgccacctgtgtgacctgggacaagttacttccctctgagtctccactttccttcaatagcatggaaataatagtcagacccacctctgagggttggggtgaggattaattaaagtactttgaataggccaggcatggtggctcatgcctgtaatcccagtgctttgggtgtttgaggcgggtggatcatctgaggttaggagttcaagaacagcttgaacctgccttttagacacagttatcaacaatgcgtttctgatattttgtgtcagttcttttgttctttcccatttgaatgtgtagtacatgatggtaagtgtcagttgggtctgcagaggcaacatagtgaaaccccatctctaccgaaaatacaaaaattagctgggtgtggtggcatgtgcctgtagtcccagccactcgggaggctgaggcatgagaattgcttgaacccaggaggtggaggttgctgtgagccgagatggcaccacgtactccagcctgaaaaaaagtactttgagatagcccctggcatatggtaagagctccacacaggctaatttttactatagttatagtcactggtggggcaggggtgattaacacatattttgcacagaaacatgccaagtctggagaggaattgtcatgtgcccgaagtcacacaggcaggacatggcagaggtgggaagtgacctgctgacccagactaaagctcttccccaggccatgcacagcttcccacggggtcaagagggagcaccttgattccaatgctgtgactcctgcaggaaagcctgcatcttagccctgtaccctgagtgccccgggtggtgctttccccagggtctcaggatacagtcacatttgttgagcacttactatgctctaggcaccatgcagagatctgtcacatgcatgatcccatttaatcctcaccgtgactgatgaaatagcacttttatttatttatttattttgagacagagtcttgctctatcgcccacgctggagtgcagtggtgtgatctctgctcattgcaacctctgcctcctgggttcaagcgattctcctgcctcagcctccagagtagctgggatcacaggcatgcgccaccacgcctggctaatttttgtgtttttagtagagacggagtttcactatgttggccaggctggtctcaaactcctgaaatcaggtgatctgcccgccttggcctcccaaagtgttcggattacaggcgtgagccacgtccctcggtgaaatagcactattattatcccagcattatacatgaggaaatggaagcccagagaagttaagcatctttccccaagtcacacagctagtgctggggccaggatttgaacccagctgtctcattctgcactccatgcatgattgccagactgcactggattcactgatggtggagcataatgcagtgctcctcagacttgagtgtgcaacggaattaactgccaggcctgttaaaacactggttgctgtgccccgtaccctaagagttcctgcttagtaggtctgggatggtgcacttcttttttgagatggagtctcactctgttgcccaggctggagtgcagtggcacggtgttggctcactgcaacctctgcctcctgggtttaagtgattctcctgcctcaacctcccaagtagctaggatttcaggcatgcgccaccacacccagtcaattttttttgtatttttagtagagacggggttttacc

SEQ ID NO: 7814 - DNA, 1164 bp, Homo sapiens
ccctcccctcccctcccgtccccgccccgccccgcgcgcctctcagcccccgcgccccccaggtgtgccggaagagcgtggaccgtagctgccccctggtggccctgtcggtgcagaacacggcggagagcagattcggcttccgcttcctcagctgcctgccggtcaccgcggacacctgccgcggcgcctaggggcggaggagtggggccgggaccgcgagggagggcgcgggcgggcgccggggctgggcgggctgtgtccgctgcatcatttattgaaccaacgtggcctacaaagtaaaccgcatttctgtacacctgagagctggaaatgttggtttgggttccggggcgtcctgcgccaagaggagggaacgggccgccctatcgcagtgcgggaaccctacagatcccccggagacgggaggcctggaccgcacccccggcggcctcaggcgagcagctgggaccttgggccactgcggcctaggaggtggctcttaccctggggccggcaagggagtggtggactcgcagctccagcccctgcccctcggccatgcccaattctagcaggagaggcctctcacaggcctgctcgggtgaccaccccccacccccgtgcccgcgggaaagcctggccctaaggaagggctggggagccggaccctccctccccaggccaaacccagttgggggcctaaactgggttccagcctctgctgcctccctggctggtcccagtcccccactcccctccaccaagagggtcctccccagggccaggcactccttccaccccccaacacacccgcccaggtattctgtgctctgtgaccacatatgtgggcaagtcgtggccccagcacagggaagcctggcagtgggggctatattaagtggggacggggctggggtgagagagttcagctgccctgggaggtctagctgctgcatctggtgctggctttgggccaggacatccctgggctcgagggctcaggcgtgaggccacctccagggctctcaggacaggcactgcagccaccccatcacccaggccaggcccccagctgcccaggactcggagccgacgccccctggactgcaggtctgtcgaccaccgcggggagctgctgccagaatctcgtggccttgggtg

SEQ ID NO: 7815 - DNA, 402 bp, Homo sapiens
gtatacagggttcggtactctccatggcttcagccacctaccaggggtcttggaacatatccctcatggatgagggggaactgctgtattcttacggggtaaaggacgaattcttgggcgttctgtcaaatgaattatttgcaggaagagtgaaatagactatttctgtgatcctttccaagctttgtttcagtacttgtggcatagggcaaggacagaaaaggaagacaggagggaggaaaagacgtttgaaaatcccagacctcaaggagagacaggagataggaggtacaagtgctagcggtggtgagagccatgatgcccggacccctgcctgtgacctgcaccccaggcaggtgctgaggccaccagtctccactctggaaagagggaagtgaatct

SEQ ID NO: 7816 - DNA, 405 bp, Homo sapiens
agcgtatacagggttcggtactctccatggcttcagccacctaccaggggtcttggaacatatccctcatggatgagggggaactgctgtattcttacggggtaaaggacgaattcttgggcgttctgtcaaatgaattatttgcaggaagagtgaaatagactatttctgtgatcctttccaagctttgtttcagtacttgtggcatagggcaaggacagaaaaggaagacaggagggaggaaaagacgtttgaaaatcccagacctcaaggagagacaggagataggaggtacaagtgctagcggtggtgagagccatgatgcccggacccctgcctgtgacctgcaccccaggcaggtgctgaggccaccagtctccactctggaaagagggaagtgaatct

SEQ ID NO: 7817 - DNA, 140 bp, Homo sapiens
ttttttttttttttgagatggagtcttgctctgtcacccaggctggagtgtagtggtgcgatcttggctcactgcaacctctgcctcccaggttcaagtgattctcctgcctcagcctcccaattagctgggattacagg

SEQ ID NO: 7818 - DNA, 140 bp, Homo sapiens; identical to SEQ ID NO: 7817

SEQ ID NO: 7819 - DNA, 11543 bp, Homo sapiens
gttcagttccgagacagcagccacaccaatggccactggtgactcggccgtggcccagagagggagcagtgtccctgacgtctcggaaggcaccagatctgccctctcattgcccactcaggagctgagaccagggtcaaagtcgcagagccacccctgtgtgagttctccatcctgccaggtgtcccaggcctcctcatgccacatccacaaatcccactggggggactttgggggccctactatggcccagggttgagtggctgagaagacgggtgagtctggggtgggggcacatgcaaggatcccactggcaggtccttagcatccattccctgggaggggggcagacgtggggataggaacggtggaggagtgggatggaaaggaggcaagagcgggtgcaaggtgggaaagggagcgagaggcagggcgggaggcacctgtccgcagtgcagtggtgctgccggcaactctgtgcagaaggcaaagccctgtggtcaactgcgggccaccgtcccttgaagcaagttatacccattttccagttgaacacagtgaggctctaagaggcattctcatgtgatcttggtccctcagacgtggagcgacctgattttaagcccaggcctgtcaaattgcacagcctggagccctggctgagccaccccaggcctgggacggaggaaggtgcccaggcttgccaagcctctttttttgtctgcagaaagggatggcaatgtcatcaggacagggtggttgagagaatgccacaccatgcacatgaagccaccatcactatgcgtgaccttgaccttggctagtccattctcattaactccatgcaagtttattgcacacctactgtgtgctgggtattttctatagctgagaatgaactaaggttcctgctcttgtggagtttgtgttcttttaggggtaataggcaagaaaagcagtatgcataagtgtttattacattaaaaggcggtaagtagagcagagggaagaggggtcaggagcaccccaaagatgcctgtgtcctaatccttggaagctgtgactatgttgtcttacatggccagggaagttaaggttgcaaacagaactgaagttgctaatcagctggctttggggagagtatcctggagtaagcaggtgggctcagggtaatcacatgggtctttaactgggaatccagaggcagaaggctcagggctagagagatgcaatctgagaaagattccacctaacactgctggctttggagagagaggagggggccacaaaccaaggattgtgagaagcctctggaaattgaaaaggcaagaaaatggattctccccttgagccactgggcaccttgattttagctcaatgagacccagttcagactttggacctccagaactgtaagataataagttggtgttgttttaagccactaaattcacggaaatctgttacagcagcagtaggaggctggaggcctggaggccatgatgaggactttggcattcactcaaggggtatggagcctttgcttatttttaagcagcaaagtgacataatctgagggactctttaaagaccactctggagccgggtgcagtggctcacacctgtactcccagcactttgggaagccgaggcaggtggatcatgaggtcaagagatcgataccatcctggccaacatggggaaaccccatctctactgaaaatacaaaaattagccaggcatggtggtgggcgcctgtagtcccagctacttgggaggctgaggcaggagaatggcgtgaacctgggaagcggaggttgcagtgagccgagattgcaccactgcactccagcctggcgacagagcaagactccatttcaaaacaaaaaaaaaaacaaaaaaacaaaaaacactctggatgctgggggtgtgggtcggtgaggaggtctagcagaggcgatggtggcttgggatggggtgctggtgagactctggatgtatcatcaaggtagagccaacaggatttcctgagggatcagatgtgggatggagagggtgagggagagtcaaggaagacttctaagggttcaggctgagcaactggaagaaggacctaattatcaactgagatgcaggaggctctgaggtttgagagaaaaaccaggaatccaatggaattgcataagttactaatttagataaccacttgtcaacggggacttcaggaaaaaaaacctgggctagattagagccactcccttgtttttaaataggaaatacaataaagcaaagaacagcctcgtacttgatccacataatgtctaaataacagatattctgtgaatgtttacggattggatgtcttgtgcccaggacaagtaaatccctttcttggataagactcttccgctagtgaaaaaatttgtcgttgtcacttctcacacacacacacacacagcagaaatatgtttacatctcatctgtgtagatttgaaccttggctacatggctatttccaaaattattttggttattatggcttggcataagtacatatagcccaccaatggaaataaaagctacattgtaaaatcaccatctatgttttattcttcattttatttctgggctaattctgcctctaaaattgtgaacctcaaaactggaggtattgaggtatttttgatgacttccgttttaaatcttaagtgaaaagagccttttcttttcttccctgctagactccagcgagcaccaccgtgatcccgggcactccacccttgcagaactgtgatcccatagagagcaggctccggaagagaatccagggctgctggcgccagctcctgaaagaatgcaaggagaaggacgtggccagacagggggacatcaacgcctccgatttcctgggttcgttcagattctatctgcttggtaatatgtggtcagcccctgtggcaagaggctgttcccactgggtacaaagccacaccccgggtggaggccagggagcagcagaacaggaaactggtgggaacttctgggtgggctgtgcagcttactatacaaaggtccccatggaggaggattccgactacccggccctcccagcagggggcccatctgcatggtaaagtcagcgctgcactaactctgagctttagaaatcacagtggttgccaccctgggcagagtgtgaatgttcacagactctgactgcagaaggaaatggaaaaggtggaggagggcgggatgaaggggacactcctggggctccattcccatcaacattcactctttgatgttgtttcgtttttcagcatgtatcactttggtaaacttttaaaattaaaccagtgggatttatacttccagtaaatattgcatcttggtttttttgttttttgttgttttgttgttttttggttttttgtttgtttgtttgtttttgaaacagggtcttactgtcacacaggctggagtacagtggtatgatctcagctcactgcagcctccgtcttccaggttcaagtgattctcccacttcagcctcccaagtagctgggattacaggcatgcatcaccatgcctgaatgtttttgtattttttggtacagacgggtttcaccatgttggccaggctggtctcaaactcctgatctcaagagatctgcccacctcagcctcccagagtgctaggatcaggtgtgacccaacacacccggcccagttacatcttgtttattcaacattttacattacaggaaaatacatctgaccatgtcactccttggctttttagctcccccaacacatgactaatatacagactccttttaaaggaaaatgttttctttgagagcctccaatattaatataaattacttttatcataatcatgaccttaaaatgcacaaatgaaaccaggtgtaaactctttaagttagagcctattaaaaaacacttgtaaattaagtataaaaaatctgaaatcagtaatattcaaatgttgttcattgatttaatgtaacgttttgctgaagccaaaacacgcatgttggttgtcacacatattggcgttcccttttttttttagttaattctttgattttgagagtgataaaccttcactgtgttactgtccttattgctactgctggctttttcttttcaaccatgaactcatttaagtccccactcagttattatgataggcttgtcagatgttagtcatgcatccaaaattcaatactgtaaaaaaaagccgattgctttccaaaagtcattctgtattttctcctcactgctgatggccttctgtgagtcagagcatcagaggcatgtatgggccagttccttggggttccatgggcccccgctatgtcctgacaggcaccgtgacctgctgctgcttccctgtgtgcaagggcaaagaaatctctgcttctagaacgtgcaacagcctctcttggcctggcttggcatgcaggtgtcgtttgcctgcagtctgcttccactggccttcctcatttgcctcaacaactcacacagcattccactccctgacattctgttctttcaggatgtcaaaacaaagtctagtctatgaaacttcaactcaaatcttatcttacataagcctccttcaattatgagttgtcactcccagagaagtgttgtctttacaactggcaggagaatgcggcatgaggatgagtgccaagcgtggggcgagccttgctcttcagaggttccggtgggccagcctctcggccaccagcaacactccccgtggagcatccacatgagcctgatcagaaagctggactcagcccctgaggctgcacagctgttatctcctaaaggtggtccctgtatccagaataagttgtatatatttttagatcatcaatggaatggaaacttaaagcgagaatttgccttgcataacagacactagagaacctgtctctggtgccgttaggaaatacttggtcatagggctgagtctgaattccatccccacagtccagccccagccaggctcactatgagctcagggaaccttcccctgctcctcacacacctgactctgccctgacacggcggggaacacccccttacctccctctctgtgttttggtcatagctcccatagtctctgtccataagctgtgaccatgcaaacccaggacagtgtgggccagcgggactcagggtccccctccctgcggcacttagtttgtcacatgtctgtctccacatatgtccagccaccaaccgtgagttctttgatgtgaggaccaagccagggcctgaagcagagaaggtgtctcagcaagtgttgaatgaatgagtgaagaatgaatgaatgaatgaatcgccaccaattgaactgccatttttttctgtagctcttgtggagaaattcaacctggacataagcaaagaggagtgtcagcagctcattataaaatacgacttaaagagcaacgggaaatttgcatactgtgacttcattcagagctgtgtcctcctgctaaaagcaaaggaaagctcactgatgcacaggatgaagatccagaatgcacacaagatggtatgttgcccacctgcaggaaatgtggggccaggtggaaaggggcgctttcatttttatttttttcaagacagggtcttactctattgcccagactggagaacagtggttcacggttcactgcagcctcaaactcccagcttaggtggtcctcctgcttcagcatcccaactaactaggaccacaggcacaagctgccatatccagctaatttttgtatttttgtggagatgggatgtattagtccattttcacactgctataaagatactacctgagactgggtaatttataaaagaaagaggttcaattgactcacagttccacatggctggggaggcctcaggaaacttacaatcatggcagaaggtgaagggggaggcaagcacgtcttacatggtgccaggtgagagagagagtgaagtgggaactgccaaatacttttaaaatcatcagctctcatgagaactcactcactctcacaagaacagcaagggggaacctcccccatgatccaatcacctcccaccaggtccctcccttgacaactggtgattacaatttgagaagagatttgggtggagacacagagtcaaaccatagcacagagttttgccatgttgcccaggctggtcttgaactcctgggctcaagcaatccacccacctcagcttcccaaagttctgtgattacaggcatgagccaccgcacccagccttgtttttgttaatttgtcgcacttgcggatcacctagcttcacagaaaaggtggactcagaggctccaggaggccagagcccagcccagcccagtcctgcttccagccaggactcatctgtgaaatgtccccggccttgctgccacctgccccatagaccctactcagatgatctctatacgcatgtgataacgtgagcaatacttagccaccccatttgctccgttacttcaagagggccaggcagttgtcaggtcagcatgagacgccagggtctgtcgaagggggcaaaaagcccacagcctgtgtgctgggggctcgcacctgggaggcaagggctgcggtaaagacaaggcctctactaggctttggggatattgaaaacagctcagaaatgtattttcttgaaagtaatttaagattttcttcctctccttttagaaccctataagggtctggagaccccagaatgggaaccagtagccttgatcccaggttttccaactgttcaggtggcagacacctggttatggtggctcttcccaggcgtctgtgtgaccaaggtgtcatacagtgccctggaggcagtgcctgctcaggtgacccaaaaggcaaagtgaggggtggggtgggtcacagcactggtcaacattggaactaaaagggtcttcatccaccagccatttgagatggggccaggccctttcctctgagtgtgtgtggtggatggagtctctcgtcatcatttttggcggaaactacacccaccatgcattgtctacagttttctctgtttctttgaagaggaatgaaaacctaaagccacttaaagggcagctggagggtacacagttcttccagatttttacctttggttctcagccacttacagttccacaattgaaacccacacccagtgccatcatggcgtcagctccagcccttccaaaacatgaagccaaaaaatgtttttagtactgaattaacgttgaattgagttacgctgaattaaataacaagtacaagtacatctggtgctgtcgatttggggaacaaacacagctgattccgaccaccttatgactcagatggagggaccagaagtgtcgggctgaaagccctggccctggccccaccccccacctggccccgctcccactcaccccacccaagggccacacctgcctgggccacagtggtgagactctagggaatggagagtgggttaagccagccacagttaagtagatgccatgcagaaagtttcttcacagctagttttgcaattttgtgcaaaatcaggttccatcttagcctagcttctagtttagacaaacaggagctagtatcaaaagcttagaccaagtttacaataaaaaaaaaaaaaaagactttagacagttctgccagctcagttcttctgtgcacagagaaaagactgtccccattccatcttcacgggagccacgaacgtggagaacatggagacacgtggcagcaaggccgccatcaattccatccttcctccgcctccctgggcctcagtttctccttctggagatctgtggaggctctaagaccttgctaggacgtgcacgggcttctgcggaagagcacaccagtgccgccttctgagccctccccagtgaaaggggccaccccagttcccagcttccagctgcactgtccgtcctcagcaaccccgcaaagctggggtcagagtggggtcatgctaggtgctgcgggtcagcccacagagactgtggcactctccccccgcccctcccaaggcaccactctgtggttccgaagagttctcccgcccccactcctcaaatccctgcaccagaccggagtggattgagattgaaggcttttcaggagagagtaggctcctgacatggtcctggtcacagcccttgtcccatctggcagctgccaaggccaccaccatgtaagtgtggaggtcaggtcaaatgtctccctgcagaggagctaaaaaggggacttcattttctggtgatttgggagctttctccaccccattaggcagcagaaagatgtcctcgggggaaggcagcttgggtgccgcccctccctgcaaggtgggtcagaggtgggggctctggccgggctggtggtcctgccctgtgatgtgtggtgtgggaggtcatgtgagccccacaccctctcttccccacctgtggatcagctgattgggcaaattggcagctcatgaagtcttgggtacctggggagcacacatcatacgtgccaaatgatgtaaaaaaaaaatgaaagcagcttaaccctgtgctcatctgtcttacatagtgttatgttaaaattcaactttcccaagatgtgttacgcattgttgcctaccgttcacctttgtgatattcaaacacattggggctaaatcatgttcaaatgtcttgttttcaatctaatagcacctaaatgaagtaatcacagtgtagtgttctaattactagatataattacaaccttgtgaattttttttaacactgttcattataataacttactagaaaacacagactgaaatctctttttttcctcaaactattttcaaattggcccatatctgcccggccatctcgttgcattccctgggaggtggtgtggcctgaagtgtgttggggtcaaagcccaagtcactttacctccccgagtctccacttcctaatctgtgaagtggggatagagacctgccttctttccgggttgccagtggggaggtgtaaatgagatggctgatgtaatacacgtttttaaacagcccacacaatggtcagggggcgggtgcgcatctttgtgacgagttctggcaggctccctcctcgattcagagccagcggagcaggttgggaggtgaagccggagcagggctgggcgaggcgggggcgaggcgaggaggagcccaccccaaccctcgtgttcaaaagctccctcctcaccccttcttgtcttgtgtctagaaagaagccggcgcggagacgccatctttttactctgctctgctgcgtattcagcccaaaattgtgcactgctggaggccaatgcggcgcacgttcaaaagctatgatgaggctggaacagggctgctaagcgtcgcagatttcaggacggtgagcacagctctgcgcccagtgcctctgcagggagcagctgccaaatgccagcggccagaaacttcccacggggagccctctacctgctgccgaaggcccggtgtgacctggctgcttcagatctcacttccctgggacccccaagttatccagtcctgggtccactcgcctcaccttcagaccccgggttctccttcccaaaggttgctggagccctgcgtggatgccccatacctgcatcgccagctcctcagggtcagtgcctgagcccaggttccttaaggcactgccatcactgctgctgctgctccgagccctctccccacacctgggctctcctgcaggctctgaagagcatctctgacctatgttggaccttccaaggggcctgcaaagtgagccctgcccctgcagtacacagcggggctccaccattgggcatctgccctgatgtccctgggtgccctccatgtcccacccccagagcctaacaaacaccccgcagtggttttccaatccacattcacgttcctctttccttcggggttaagtataaatctcagtcagggattctccctatccctcatgcaaagaaaggaaggaagtagggcaggttctgttattcccttccggcaacttcccaggaattcgggcgtggtgctgggaaggtggcaaaagaaaccttgccctccacagagtcacagatcagatggcgtaattgaggggccgtctcagacaccaggctcagcttccttttctgccttcatcccatggggcccaatggccaggcctgctgacctcagccccataggacctctgggccatctagccctgctttccagtctcctcctagaaacaagttataacgcaaatgtggataggaaatgtatggcctcatctttatatactatgagggtctgtcaggatttgtttcagcttcacataatggggcggggaaaatagcagcttaaggtgaaagtttatttcactcccacataaaagaagtccagaggtaggaaggtcagagctggtgtggtggctggacaatcatcagggaccacatttttgctctgctgttctcaactcctggcttccttcctctaggccacctcatgatccaaggtggctgctggagccccagcatcacagccatattccaggcagcaggtggaaaaacaggagagaaaagggcatgcccctctcctttaaaggaggcttcctggatgttctacataacattcttacttagcttctcaggccagaacatacctagctgcaagagaggctgagacatgttcccggttagctggatacagaggagctgggagagagtcaggttctataactgaagaggaaggggcagtcagtattgggtttaccaccagcaggctctgctccaggctctgttacggtcttatcacagcaactctctgcactcagcacccactggccctgccctcccctgcctgggcgcaccctgaggctctgccccaagttagggctgcatggccaggtctccccttgagcccccacctctctgatcatcagccttgtctgaatacgttgaccagccttcagcccctcagggaggcaaaggtgatcaacctcctgtctgctccagtttcacacccagatgcacacagggctgcccttggaggctgcttcctgtttgggcagaggttgagagggcatagagagagcgcacagatgggaggctgacatcggaagtggggttggggatcaggtggatgtgtcccccagccccttcctggcagcctgcctccttaacctagggcaccaaacaagcctcagaggccccttttctctgtcttccaggtcctgagacagtacagcatcaacctctctgaggaagagttcttccatattctggagtattacgataagacgctgtcttcaaaaatctcctacaacgacttcctccgggcattcctccagtagacacccctgctgtgtgcccagcgggacgacagccacagggcctgtttcaaggctaataaaatcctataatttgggggtttcatgaattttcaaaaaaaacaaaactcaa

SEQ ID NO: 7820 - DNA, 3659 bp, Homo sapiens
ttgtcagtcagccagactctcaagaaggcccatttctaccagagcagcccggacctgctccacagacagtagagaagaactccaggcctcaggaagggactggtagaaggggctcctcagaggcaaggccttactgctgcaactacgagaactgcggaaaagcttataccaaacgctcccacctcgtgagccaccagcgcaagcacacaggtgaaggaggtgtcaggtggggtggggatggaggagtctctgggctttagatttgtcctgggccactggtgggtaattgtttgggatgagcctttcatcttccaagcttggaactaagctagactggcccccccgacttgccatacaggaggactgtgccaagatgactggggcgggcactcctgattgtgttgcccctccctggttccctggaccttcccttttgaatcctcaacctggactgctctgcctcacagagttagaccccttccttcctactgtattctaaattccatctctcccttgtcattcccaggtgagaggccatattcttgcaactgggaaagttgttcatggtctttcttccgttctgatgagcttagacgacatatgcgggtacacaccagatatcgaccatataaatgtgatcagtgcagccgggagttcatgaggtctgaccatctcaagcaacaccagaagactcatcggccgggaccctcagacccacaggccaacaacaacaatggagagcaggacagtcctcctgctgctggtccttaggtcagtctcctctcctcattctgggttttctttttccttttttcctttttatttttttgagacggagtctcactctgtctcccaggctggagtgcagtggcgcaattcggttcactgcaccttccacctcccaggttcaagtgattttcctgcctcagcctcccgagtagctaggactacaggcacgtgccaccaggcccgggtaattttttgtatttttagtagagacggggtttcactgtgttagccaggatggtctcgatctcctgacctcatgatccgcccacgctggcctcccaaagtgctgggattacaggcgtgagccaccgcagccggcctcattctggcttttctacacagatcctacctgcctctgaccagttcttctctttggtgggtgtaggattagatgaagacaggaagattatggatcagtgttgaagcctacacggagctctggagccagagactcctcaaaccctgtctcggatgcccttaacctctctggggccacctgcttctgctggagtttagtcagatgcgaatgtggagcacagtagagactgggagcttcattaaaatgctctttatttcttgtcgctccccagcttaaaaccctttagtgactcctttgcttgctacataaaatccagtttccagagccagactattttcaaatcctgaatttgccacttaatatccatgtgaccttgagaaagttcttggatcactatgctttgtttcttccagaaaatgaaaaaactagttttggactgtattagacgtggcacatatactgcatcattctccctggcactcactggccatgtacccagagtttctgtttcttcccaccactttacagacttggatggaatgccctggcatagggcatgggatctggcatcccaagttgctgctagcaaacttagaagtgtggggaaatttatttatttgagacagagtcttgctctgccaccatggctggagtacagtggtgtgatctcagctcactgcaacctctgcctcccgggttcaaacgattctcctgcttcagcctcctgaatagctgggattacaggcacgcaccaccacacccagctaatttttgtattttttgtagagacggggtttcaccatgttggccagactaatctcaaactcctggcttcaagtagtctgcccacctcagcttcccaaaatgctgggattacaagcataagccatggtgtctggctgggagttaatatttatgggataaaatttgaggccgggcgcagtggctcacgcctgtaatcccaatactttgggaggctgaggcgggtggatcacaaggtcaggagtcttgagactagcctggctaatatggtgaaaccctgtctctacaaaaaatacaaaaattagctaggcatggtggcgtgcgcctgtagtcccagttattcgagaggctgaggcaggagaatggcttgaacccgggaggtggaggttgcggtgagccaagattgtgccattgcactccagcctgggtgacagcaagactccatctcaaaaaaaaaattttttttttgactagtggaaaatgggagataggtgagactcaggcaaatcaattcccccttttcccctgcctttcataaattgctgcatggcaccaactctccaaaacagtaccatcaatggggaggcctcccaagtagccggtggacagaactactgtgacctctgcaaggcttgtcatgaagcagtgcccaccccagcctattaaatacatcaccttacgttacttcccattctttcccgcctttcttccattttctcacttccaatgccttgggtttgcacctctccaaataaaacaccagtacttagttcttgttttcaggctctgtattctaggtgactgaggactaggagggagaggaggacctaagcctggggcagataaagatgaatctcactgtaacttcttctcctcccaccttccttaggtccctggactacaaagcaccagatattaagtggcctatctttccttgctctcccttggggttaaggggataatgactatcttggcaaaccagccaggtagtttagaacctcatatttagactcggcaggctgttttactccaggaaattgatagagagaaaggaacttggccaagctatcaagtgcagatctagaatcccaaccaggatctgtctgccccagaggtggtctcttccgtaagaagatggtgccttctatgggtgtttcctgaacgaggctggtgccaagcacagagagatgaatcagagctggtttctgtgctcaagggaccgtcttgatctgggggctcagaggtccacctcggtacagtagccatggggaagaggagcccctaatggaagggtcagaaaggctctctggaggaggtaatccctgggcccagtaagagtgtaacacctagtaatccctcaaattttgaaataaactgaacaggtgaatgaagaaggaagaggattccaggctgagagcactggacgtggcaactgttcagaggagaggcagtcttcaagttctacattcattcagaaaaatgttttttgagcctacaatactgagcgcaacaaggctgtggagacccatggtgaggagcatggagttaactaaaggatgtgtcagggaagaaagacttctcaaggaggtgcctccatcagacccaaaggactcatgggggctagctgcacctcacatttcttggacatataccgttggacatgtctatcttctggaaactatggcatggacagtaaggattcagaagtgcatgaaggcaccctgcctctgcagagcagaaagatcatagacaacatttatgaatgtgcccagtgctgccaagaagagaa

SEQ ID NO: 7821 - DNA, 232 bp, Homo sapiens
ttcaagatggagagataaggttaagtgttttctttggctgcaacatggagattagattagagcaaggatgtaagggagaggaagggacatagcagtatttcaggtgagagtcaaggtggctttggctagggtgtgagagtggaggtagggagaagtaggaaagtgatagttaactggatttgttaggtgagggtgaggccaagggtgacttccaggttcctgacttgtgtta

SEQ ID NO: 7822 - DNA, 232 bp, Homo sapiens
agcactttgggaggccaaggtgggcagatcacctgaggtcaggagctcaagaccagcttgaccaacatggagaaaccccgtctctactaaaaatacaaaattagctgggcatggtggtgcatgcctgtaatcccagctactcaggaggctgaggcaggagaatcacttgaacccgggagacagaggtcgtggtgagccaagatcacgccattgcactccagcctgggcaaca

SEQ ID NO: 7823 - DNA, 3328 bp, Homo sapiens
  SITE (72): n equals a,t,g, or c
gggttatgggatccagtttttcggacccaaggagtattatgagggtgactggtgtggcagccagcgcagtgntgtgggccgcatgtattacagcaacggcgacatctacgagggacagtgggagaacgacaagcccaacggggagggcatgctgcgcctgagtgagtgccccacccccgccggccccgcccacccgaccacgccccggcagcgagctggccacgcccatttggtcccacagagacaggccacaccccacactcttgtcccacactgacccttgtgtcaatgtgggacaagagaggaagagcaccctatctctcccctcagtcacaaaaggtcacatatatatgatgctatttatatgaaatttttaggacacgcacctccacagagacagaaagtagactaatggttgcctaggactatgggggtggtgacattagtgggtgtggggaatggctgcttaatgggcacagggtttccttttcgggtgattaaaacgttttgaaactagatagaggtaatggttgcacagcattgtgaatgtactaaatgccactgaactatacacttcaaaatggccaacttatgttatatgaacttatatctcaatttttaaaaaaaaagccaggcgcagtggctcatgcctgtaatcccagcactttgggaggcagaggcgggcggatcatgaggtcaggagtttgagatcagcctggccaacgtggagaaaccccgtctctactaaaaatacaaaaagtagctgcatgtggtggtatacacctgtaatcccagctactcaggaggctgaggcaggagaatcacttgaactcgggaggcggaggttgtcactcaggctggagtgctgtggggcaatctcagctcactgcagcctcaacttcttgagctcaagccatcctcccacctcagcctccagagtagctgggactataggtgcacaccactatgcccagctaattaaaaaaatttttttttttgcagagatgtggtctcactatgttgctcaggctggtcttgatctcctgggcttatgagcctcccatcttggcctcccaatgtgttaggatttgcactgagctctggaagagcgacccctgggggtctagcttagtttggtgtaccctgcaccacacctccctgtcctttcccccagagaacgggaaccgctacgagggctgctgggagagaggcatgaagaacggggcggggcgtttcttccatctggaccacggccagctgtttgaaggcttctgggtggacaatatggccaaatgcgggacgatgatcgactttggccgtgacgaggcccctgagcccactcagttccccattcctgaggtgggcagccctcaccagggccctgtggcacacccagacagagacagaagccagcatccccagccatgcccaggccagatctgccaggcccagccaagcccagacagggaacagacaaggttttgttttcagtcagggcatccctagcaagggaggtggctcctgatgaggctggcagcaccccacacggcaggcagcgccagtcaaggctggcagctggggtcctccatgctctccaaaccaacttcttggtatttccctccaggtcaaaatcctagaccctgatggtgtgctggcggaggcttggccatgttcaggaagacagaggaaggagattgatgccaggtgaggggtgggcacacctgccaagttctgatgtggctgaggctgctccagggcccagaacaatgcacagatctcctggggtctccaaagggcttggggtcggggagtgggggagcaagaccatcgagggcaggcttcttgcctcctacagtcccaggtgtcctttttgacgcttcctcttcaaaaccccttttgaccggctgtggtggctcttgcctttaatcccagcactttgggaggccaaggcaggcggataagttgaggtcaggaatttgagaccagcctggccaacatggtgaaaccccatctctactaaaaatataaaagttagccaggtgtggtggcaggcacctgtagtcccagctactcgagaggctgaggcaggggaatcacttgaacccgggaggtgaagtttgcagtgagctgagattgcaccactgcactccagcctgggcgacagaatgggactctgtctcaaaaaaaacaaaactcgccaggcacagtaatcctataatcctgtaatcccagcactttgggaggccgaggtgggtggatcacgaggtcaggagttcaagactagcttggccaagatggtgaaaccccatctgtactaaaaacacaaaaattagctgggcgtgggggagggcacctgtaattccagctactcaggaggctgaggcagagaattgcttgaacctgggaggcagaggttgcagtgagctgagactgtgccactgcactccagtctgggtgagactgtgtctcaaaaaacaaacaaacaaacaaataaacaaacaaacaaaccatttcactgaagaccagtgcattccagtcctgcctgaaaccttctatttgcaccctgggccacacaactgagctgggcacggggttgaaaggaggtggtctcctggcttctgaacacccttgagtaaggcagttggccttcagcctccatttacacatctgtccagtggggtcttgtccagtccaagtcctcctgggcatgatgtgagggtttgaggagaggacattggtaacagcgtctttcaaatgccagctccaccatccctctctcccctgcagagaacacaaacgcttcaggagaaattcaagcctgtgtcacccgatcgctcagaccagtgcggctctggctggaggagtcagcagcagctccaggcatgaccccggcaccctcatagggcccctcactacccccagcactgggtcatttcttgccaataggaaggctggtgcttctctcccaggctgtcctcgggaccctcttcattctctgatctcatcctggaatgcatgagaataaagaataaccaagtggtataagcctgggcctatgggataaggatggggcactcgagggggctcagcagggctttcaggtttagaagagggaagacctgccttggctgggctgcctgggtttagcttgggggagtaagggcaggtcttaggccgggtgcagtggctcattcctgtaatcccagaacttgggaggccaaggtaagaggactgcctgaggccaggagttcgagaccagcttaggcaacatagcaagaccctgactctacaaaaaaaaattttaaaatataaaagaaaggaaaagaaa

SEQ ID NO: 7824 - DNA, 187 bp, Homo sapiens
ttcacggccttctcctgcctcagcctcccgagtagctgggactacgggcacccaccaccacacccagctaatttttttgtatttttagtagagacgggttttcaccatgttagccaggatggtctcgatctcctgaccttgtgatccgcctgccttggcctcccaaagtgctgggattacaagcgtg

SEQ ID NO: 7825 - DNA, 2295 bp, Homo sapiens
cctgccacactggctgccaagattggagatcataaaatttcctgaccacttctcagcctaacacagggctctcaaccttgaaatcccatggaaactttgcaaagctgtggaagcccaggtcccatgcccagagattcacaggttcacatctaattcatctggggtgaggcctgagctttcagaaaattccccaggtgattttttttttttaagacgtagccccctctattgcccaggctggaatgcagtggcgcgatctcagctcactgcaacctctgcctcccatgttcaagcgattctcctacctcagcctcctgagtagctgggattacaggcgcatgccactgagcccagctaatttttgtatttttagtagagatggggtatcaccatgttggtcaggctggtcttgaactcctgacctcgtgatctgccccgctcagtctcctaaagtgctgggattacaggtgtgagccatcgagcctggcctttttttttttttttttttttttttgagacagagtcttgctctgtcacccaggctggagtgcagtggcacaatctcggctcactgcaacctcgcctccctggttcaagcgattatcctgcctcagcctcccaagtagctgggattacaggcacctgccaccaaggctaattttttgtatttttagtagagacagggtttcaccatgttggccaggacggtctcgatctcctgacctcgtgatctgcccgccttggactcccaaagtgctgggattacaggtgtgagccactgctcccagccaagatcagatgttcttgcataatgggcaggtgagctctggagtcacagtgcctgggcgtgaatctcggagctgtgtgttctcaggaatgtcacccaaactctgttctgttggtctcctcacttgcaatatggggcattaacagtacttaccacctggggttactgtggttagttactgtgaggatgagataaggcggtggttttaaactgtgggtaggattttgtcctccctcagccccactctttcttggggacatttggcaatgtatgacatttttgatgtcacaacaggcaggaagaaggctactggcattgagtgagtagagaccagggatgcggttaagcatagtgcaatatcaccatgctacaaaaaaaaaaaaaaaaaagaattcagcacctgtaatcccaactacttgggaggctgaggcaggagaattgcttgaacctgggtggcagaggttgcagtgagccgagattgcgccattgcactccagcctgggcgacagagcgagacaccatctccaaaaaaaaaaaaaaaaaaatgttgagaaaccctgaaataccacgattctagctaagacctcagcaagaggcacatagcacatagtaaagcctcaataaacaccactgaccttactgaggttctctctgccccctaagtcataagtagggtggcctcaccaagggtgtggttctcagtctgtacctctggcactgggaagccccgcctggccaccctaggatgcagaattaatcataacttccagatatggagcactcactctattccaggccgtgtgctgacagcttcgcagcaagcattctctcctggcactccccgacaacagtgaggtgtcttgctattactgccattttagaggaggaaacaggttcagggaggatcacaagtcatcaagctagtactgtgcttaaacttaggtctagctgttcttaatgtgcagaagagtgtaaagggttaccatttttaaagaaaaagtgggggcagggcatggtggctcatgcctgtaatcctagcactttgagaggccgaggcaggcggatcaagaggtcaggagttcgagaccagcctgaccaacatggtgaaaccctgtctctactaaaaatacaaaaattagctgggtgtggtggagtgcatctataatcccagctactcaggaggctgaggcaggagaatcacttgaacccaggaggcggaggtagtggtgagccaagatcacgccgagccgagatcgtgccgctgctctccagcctgggcaacagagcgagactccatctcaaaaaaaaaaaaaatgttggaagagggtgtgcttgtttatgtacaaaatgtcgctagatttaaacacaataaactggcaaagatggttgtctctggggagaattggggacttgggaacaggagctgaagaacaacttttcagtgttgtgtttggaaccatgtgaatgtattatgtattcaaaatgtaaataaaaatgaagttaaagag

SEQ ID NO: 7826 - DNA, 1401 bp, Homo sapiens
cagctgtcagggtaggagacaggacccaggcctcaggcaatgcctgccaggctagacatgagggatgctgcggcctctccccaccccactctccccaccccacccgcaactgccttcctcacaatggggttcattgttgaggtggtggggggcacctagggagggtgcagcagggggcctgcctgtcagacatccttggggagcctgccctttcaagcatgaatcataccaccagagatcacccagcgtgctcttagctctgcctgcctggtgtagggtcctggagaccttcttggagctcatccagcagccatcatgcaaggtggtgctggggactgccctcttgctaggaggtggaggtctcatgctgtgggttcagagaaagaggagaagaaaggaaacctctgagtgtccatcagacaaggacaagtcaccagaatcccataaagcaaagaatgaaagctggattaaatcccactttagccgcctttccgaagagaagctggccctcgacaacaatgccagcgctagtggcaatgctacccagactgagagtgggagtgaagaggtcagctccacggttcacatagagaccttcaccacgaggcacggagaagtgggctccgctctgcaccgggaatccttcaccagcaggcagaagacatctgggccctcagtgatccaagagatccaccaggagtctggaaaagccccatccactgatgaggccacgtgggccgctgtggctgcctgcaccaaggagattgacacccaggggcggcacctggctcactccatgctgcagcgggccatagcttaccagcactcaggtcacctagagtccaaggacatcaaccaggaggagctgagggccctcgaggaggtagagatgaagctgcaaaagaatttcctcacccagcgggaaaacaccatagctggtgccaatcacacacacaccttctatggccacagtcaccacagtcaccatggccacccaagccaccagagccacagcctgcctaatcgcagacactagatctgtgacttcttggaagccacctaaccatggatggagacgcccctgcccccagcaaggctggctcacacacacgtctgttttctctcctatggggccatctatgcaggccagggtgagatgctgtgcccaaatccctactttcttaggctcctcacggggattatgggctctttaaactccatgagtggggtctgccacagaagatggcccctgttggagggagagctgggaggacacagcgcaggtgagatagaccctgaggcccctgaagacccaccaagagaagacagatgggagcaggcaagagccccacactgatgtcattgcctggaacggagccaataaagctttgtgtgccttca

SEQ ID NO: 7827 - DNA, 1401 bp, Homo sapiens; identical to SEQ ID NO: 7826

SEQ ID NO: 7828 - DNA, 636 bp, Homo sapiens
ttttttttttttttttttgagacggagtcttgctctgtggcccaggctggagtgcagtggtgcgatctcggctcattgcaagcttcacctcccgggttcatgccattctcctgcctcagtctctcgagtagctgggactacaggcgcccgccaccacgcctggctaattttttccatttttagtagagacggggtttcactgtgttagccaggatgttctccatctcctgacttcgtgatccgccagcctcggcctcccaaagtgctgagattacaggtgggagccaccgtgcccagccagaaaatccctgtactatttttgaaacttttctgtaaatctaaaagtaattcaatatttcaagttaaaaaaaaagttttcacacaatttgattatgagtgtgtgtcaaagtttgattatcgttgtaatgcaagcaaaatgacctgtaagcagctaactcaaatatatactcttggtaagaatatttttattaaaaaaagaatggtcaggctgggcgtggtgactcctgtctgtaatccctgcactttgggaggccgagatgggcagatcacttgaggtcaggagtttgtgagaccagcctggacaacctcgtgaaacctcgtctctactaaatatgc

SEQ ID NO: 7829 - DNA, 185 bp, Homo sapiens
acgatctcggcttactgcaagctctgccttccaggttcacgccattttcctgcctcagcctcctgagtagctgggactacaggctcccaccaccatgcacggctaattttttgtgtgtgtgtgtgtatttttagtagagatggggtttcaccgtgttagccaggatggtctcaatctcctgacct

SEQ ID NO: 7830 - DNA, 185 bp, Homo sapiens; identical to SEQ ID NO: 7829

SEQ ID NO: 7831 - DNA, 636 bp, Homo sapiens
ttttttttttttttttttgagacggagtcttgctctgtggcccaggctggagtgcagtggtgcgatctcggctcattgcaagcttcacctcccgggttcatgccattctcctgcctcagtctctcgagtagctgggactacaggcgcccgccaccacgcctggctaattttttccatttttagtagagacggggtttcactgtgttagccaggatgttctccatctcctgacttcgtgatccgccagcctcggcctcccaaagtgctgagattacaggtgggagccaccgtgcccagccagaaaatccctgtactatttttgaaacttttctgtaaatctaaaagtaattcaatatttcaagttaaaaaaaaagttttcagacaatttgattatgagtgtgtgtcaaagtttgattatcgttgtaatgcaagcaaaatgacctgtaagcagctaactcaaatatatactcttggtaagaatatttttattaaaaaaagaatggtcaggctgggcgtggtgactcctgtctgtaatccctgcactttgggaggccgagatgggcagatcacttgaggtcaggagtttgtgagaccagcctggacaacctcgtgaaacctcgtctctactaaatatgc

SEQ ID NO: 7832 - DNA, 10678 bp, Homo sapiens
cacacacaccaggccctgccaggacaaggcagctcctggaagctccaccaggacccacgtccaccaggtgtcacagcaggctgcttctctctctctctgccccccgtgggctcttcgcaccgctccctcccagccatcttccctgcctgaccttggtctctctctctctgtctccgtcaccttcatgcctgtgccgtctttctcgctctctatcaactctgctgtgtgtccccctggggaaagtgggggcacctcctcctgagccccctgcccaagtttcctgctgggacgggagccacttcaccccatacacactccctgaagcccctccaggactccagcctggctgcaaacacccatcctggactttgcctggccctccaggctctgctgggggaagcgacctgagaggcccctgcctgggctgtaggtggggacagggcagacccttgggcagcggagcctctctggatgggtgttgaggcaccctgcagaaacagctccccacaggcacccttgccacacccctgggactacaggcacttagggtacaccagaggcatgaagtgtggagggggttggccaacggccaagctcaaataggggttcagataggagaggtcaatgtgggctcctctgagccccagtgacccccttctccccacccacctggtgacaggcatctcgaacccttggcccccatggaccccctgaggcgctccccctctccctgcctgtcctcgcagccctccagccccagcaccccaccctgcgagatgcttggtcctgtgggcattgaggctgtgctggaccagctgaagatcaaggctatgaagatggggtttgagttcaacatcatggtggtgggtgagtgagaggtagggcccacggcaggacagacccacagtgctacgcgtgcctgggcgtgtggcctcacctttggcagcctgtcgcccctccccatctcttaggtgggcctgataatagcacctcacagggatgttgtcattgaaaatttgagaaatgctgagtcattaaaagacaaaaatgtgcctggagcggtggctcacacctataatccagggttttgggagactgaggtgggtggatcacttgagctcaggagtttgagactagcaaaacctaatgtctacaaaaagtacaaaaatgaggccgggcatggtggctcaagcctgtaattccagcactttgaaaggccaaggcaggagggtcacttgaggtcaggagttcgaaaacagcctggccaacatggggaaactccgtctctactaaaaatacaaaaatttgccaggcgtggtggtgggcgcctgtacttaggagctacttaggaggctaaggcaggagaattgcttgaacctgggaggcagatgttgtagtgagccgagattgcgccactgtactccagcctgggtgacagagcaagactgaagcagaaggatccctggaggccaggagttcatgaccagcctaggcaacacagcaagaccccatctctacaaaaaaaatttaaaaattagccaggcatggtgacatgcacctgaatcccagctacttggggggctgaggtgggaggatcgtttgaacctgagggtggaggttgcagtgagctgcgatcacttgagtctgggtgacagattgagaccctgtcttaaaaattaaaaaacagtgcaaggccgggtgtggtggctcacgcctgtaatcccagcactttgggaggctgaggcaggcggatcatgaggtcaggaaatcaagaccatcctggctaacatggtgaaaccccgtctctactaaaaatacaaaaaaattagccaggcgtggtggcgggcgcctgtagtcccagctacttgggaggctgagacaggggaatggcgtgaatctgggaggcggagcttgcagtgaaccgagatcccaccatcgcgctccagcctgggtgacagagcgagactgcgtctcaaaaaaaaaaaaaaaaaaagcagtgcaaaaatcagctgggtatggtggcgtgtgcctacagtcccagctactagggaggccgaggtgcgagaatcactagagtctgggaaggtcgaggctgcagtgaacggggattgcatcattgcactccagcctgggtgacagagtgagaacctgtctccaaaaataaaatagaaaagtaaagagttagagaaaaactgcctaaaacgcccaccctaactgctgtcatccggttgccactcccagggcaaagcgggctgggcaagtccacgatggtgaacacgctgttcaagtccaaagtgtggaagtcaaacccaccgggcttgggggtgcccacaccccagacgctgcagctgcattcactgacccatggtgagtgagcccctgcccacacctcaccccaccctgccccaccccatcccacctgggtccagtctctcccgactctgctctccctccacagtcatagaggagaagggtgtgaagctgaagctgacggtgacggacacgcccggcttcggggaccagatcaacaatgacaactggtaggttctctctctttttttttttttttaggcagagtttcactcttgtcacccaggctggagtgcaatggcatgatctcggctcactgcaacctccacctcccaggttcaagtgattctcctgcctcagcctcccgaagtagctgggattacaggcgcccgccaccacgcccagctaattttttttgtatttttagttgagatggggtttcaccatgttggccaggctggtcttgaactcctgacctcagatgatccacccgcctcggcctcccaaagtgctgggattacaggcatgagccactgtgcccgcaacaagtggtgggttctcaaaggtgggggccaagccatggctgtcccctcctgtccgtgcccctcccccttcaacctttgggaaacaccccagacctggaacagccaggctgtgtgatcttttttttttttgagacagaatctagctcttgtcgcccaggccagagtgcagtgacacaatctcggctcactgcaacctctgcctcctgggttcaagcaatttccggctaattttttttttttttaagacagactcgctcttgtcacccaggccagagtgcagtggcacaatctctgctcactgcaacctccgcctcccggggttcaagcaattctcctgcctcagcctcccaagtagctgggattacagacatccgccaacacgctcggctacttttttgaatttatttagtagagacggggtttcaccacgttggccaggctggtctcaaactcctgacctcgggtggtccgcccacctcagtctcccaaagtgctgggattacaggtgtgagccactgcacccggcccaatttttgtatttttagtagagacggggatttccccatgttggccaggctggtctcgaactactgacctcaggtgatccacttgcttcagcctcccaaagcactgggattacacgcataagccaccgcacctggccctggtttcattttatttatttatttatttatttatttatttatttatttatttatttagagacagtgtctcagtctgtttcccaggctggagtgcagtggcgagatcatggctcactgcagccttgacctccccaagctcaaggaccctcctgcctcagcctcctgagtagctgtgaccacaggcacgtgccaccccaccgagctaatttgtgtattttttgtagagttggcgtttccccatgttgcccaggctagcctcgaattcctgggctcgagcgatcctcctgcctccgcctcccaaagtgctgggattacaggcatgagccatcgggcctggcctgacacctgtttttaaaaggatctgtttggctacttacagtgttgacaatacccaagaggggaagggactcgaagaggaggagggagacccctgcaaccatcaggcgcgattccttggtggtttgggcccagctgtggccctttaatacagttaatgctcacccctcccttacttgcaacgtaggtgctactattgtctccattttacagacagtgaagccgagaatggcaggaggtctccctgtgtgtctctgatgatgcagggaagtgggggaaagtaccggggtgacccacaggtcccgggccaaccgggacgattcgtcgtcccaagggaggaccgcccagaggacacagaggagaggggtggggctctctgggcacagcacagttctgaggggagggtccacctcccgcctcagctgggaccccatcctgggctacatcaacgagcaatacgagcagtacctgcaggaggagatcctcatcacccgccagcgccacatcccagacacccgggtgcactgctgcgtgtactttgtaccacccactgggcactggtgagggggctgcacctgcaaggcgaggaccacctgcacggggcagggaggaggagaaggggtccccaccatgggctgccggctgcccccacccccgtgccctgctgctgtcgtttatacactcaccaccaccgccacccccatcactgccctgcctccggcagcctgcggcccctggacattgagttcctgcagcggctgtgccggactgtgaatgtggtgcccgtgattgccagggccgacagcctgaccatggaggagcgagaggccttcaggcgcagggtgatctggatgcccgggcagggctggggtcagcgggggcagagggcagagtgggcagggtgggctgaggtcacctgtgtgggatctccagatccagcagaacctgaggacccactgcatcgacgtctacccccagatgtgctttgacgaggacatcaatgacaaaatcctcaacagcaagttacgggtgagaggctgtggggcgggaggcgggcgaggtgatttccttcccacacatcctttccatccaaagactcatctttctctacatctcagggaaatgtgcacatattcctagcagatatgattctctactcatccacaagctcaaggtgagcaagaaataacagctcacactaacaacccacagaatcggagaaaatgtctgcgaatcacatacccaataaggggcttgtatcctgaatatatagagaacattgggccgggcacagtggctcacgcctgtaatcccagcagtttgggaggccgaggcaggcagatcgcttgaggtcaggagttggagaccagcctggccaacatggtgaaaccttgtctctgccaaaaatgcaaaaaattggctgggtgtggtggtgcacgcctttagtcccagctactcaggaggctgaagcgggagaattttgaaactgggaggcagaggttgcagtgagtgagctgagatggcgccattgcactccagcctgggcaagaagagtgaaactccatctcagaaaaaaaaaatgtgttggccgggcgcagtggctcagccctgtaatccctgcactttgggaggccgaggtgggtggatcacctgaggtcaggagttcgagaccagcctggccaacatgacgaaaccccgtctctactaaaaatacaagaaatcagctgggcgtggtggtgggtgcctgtaagcccagctactcaggaggctgaggcaggagaatcggttgaatcttggaggtggaggttacggtgagccgagattgcgccactgcaccccagcctgggcaacaagagcaaaactccagcttaaaaaaaaaagtgctgtggaagatgtggaggaactgaaaccctcacctactgctggagggaaagtaaaatggctcagccactttggaaaacagtctggtggttcctcaaatgcttaaacatgcagttactctatgacccagcaactgaactcctacgtgtatacccaaaagaaacaaaaatgtacattcacagaaaaatgtgtacgtgaatgttcacagcagcattatttattttagccccgaaagtggaagcaacccaaatatgcatcaacagatgagtggggaaacacagtgcggcctattccctaccatggactatcccttaaccatgaaaagcaatgaagttcaccctttaaaagtgtacagttcaaggctgggctcagtggctcatgcctgtaatcccagcactttgggaagctgaggtgggcagatcacttgcggccaggggttcgagaccagcctggctaacatggtgaaactctgtctctactaaaaatacaaaattagctgcgtgtggtggcacgcacctgtaatcccagctactggggagactgaggcaggagaattgcttgaacctggaaggtgaaggttgcagtgagcagagattgtgacactgcactccagcctgggcaagggagtgagaccctgtctcaaaaaaaaaaaaaaaaaaaaaaaaaggccgggcacggtggctcacacctgtaatcccagcactttgggcggctgaggtgggcagattacctgaggtcgggagttcgagaccagcctgaccgacatggagaaatcccgtctctcctaaaaatacaaaattagccgggtgtggtggtgcatgcctgtaatcccagctacttaggaggctgaggcaggagaatcacttgaacccaggagatggagattgcagtgagctgagatcacaccgttgcaccccagcctgggcaagggagtgagaccctgtctcaaaaaaaaaaaaaaaaatgaagcactgtcaccctgtcacctgcctgctacagcgtgggggaaccttgtaaacatgtttctcagacaaaaatcagtcagacacaaaaggtcacgtattatgggattccatttatatgaaatgtcccaaataggcataggcaaatctatagagacagaaagtagattggtggtagtcaggggctgtggggaagggagaaatggggagtgattgctaaaaggtatggggtttttttggggggacgtgatgaaaacgttgtgaaattagattgcgatgatggttgcataaccctggtcaaatactaaaaacccccgtaccgtacaatgttttgtttgttttgtttttaatgttgttttttttatgagatagggtcttttttttttttttagatggagtctccctctgtcacccaagctggagtatagtggcgtgatctccgctcactgcaacccctgcctcctgggttcaagcgattctcctgcctcagcctcctgagtagctgggactataggtgcacaataccacgcctggctaattattgtctttttggtagagatggggtttcactatttcagccagggtgatctcgatctcctgaccttgtgatccacccatctcagcctcccaaagtgctgggattataggcgtgagccaccgtgcccagcagagacagggtcttgttctgtggcccaggctggggtgcagtggcaggatctccgttcacagcaacctccaacctcctgggttcaggtgattctcccacctcagcctcctgagtagctgggattacaggcatgcgccaccacacccagctaattttttatttttcctagagacagggtttcaccatgttgaccaggctggtcttgaagtcctgacctcaggtgatctgcctgccttcacctcccaaaatgctaggattacaggtgtgagccaccacgcccaatattatcaacatccacattactccccatcacagatgaattcagaagtaaaaacccatatatgtcacttcggagtttgcaagtttgaatttctgcttctggccatgagcaagtaaacaactggagtttacggtagggttcaacaaccttttctgcaaagggccaggtagtaaatgttttagactttctgggccgtagggtctctgttgtgatgattcaactctgatgtcatggttcaagagcagccatagacaaaaatgactcataggctcaactatgtgccaataaaactttatatataggaagacaggcaggctgggtgtggtagctcactcctataatcccaccactttggaaggcagaggcgggaggatcacttgagcccaggagttagagaccagcctgggcaacacagagaactcatctctactaaaaatgtttaaaaagtagccaggcatggtggtgcacacctatggtcctcactcctcaggggactgaggcggggatatcacttgagcccaggaggtcaaggctgcagtgagctatgggattataggtgtgagctatataatacgctatataatataatgggattataagctcagctaattttttagtttttgcagagatggcctttcaccatgttgcccaggctggtctcaaactcctagggctcaagtgatcctcccacctcggcctcctaaagtgctgaaattacaggcaagagctacctcactcagccagaggcaccaattagactttatgtctttgaacttgggaattctgtgcactttctaccatgttccctcctcgaaaaggataggactcccctctcctgcctgggtgccttgacttttcttctcttctccccagcgaagtcaatcctcccatctctgtgtcttctcctttcccaggaccgaatcccttttgccgtggtaggggctgaccaagagcacctggtgaacgggaggtgtgtcctgggccggaagaccaagtggggcatcattgaaggtcagtgcggggcccctgggtaggatgcaggtggggtcagtttggaaaccagagcagccttgggcaaccttcgcacccatcacagggcacagaaaggtgaagcccactagacaaagagccctggggaatggtccctctttccagctgggaggctgtggcaagtttccggaccctctgggcctcagtttcctcacagtaaagtgggcatcacagtgcatcaacttcctagggtgttggagcggggagaaccaccattttgcacaatgcccaatacccaaggctgccctagtggctggccggaaattacgatgggcctactgtgtatcaggcaccgctatgtgcagttactgcagtgcacggtaaagggaggactgacagggtccctgtccccatagagctgacaggacaaggacaggtcggggaggcacagtgaaggcgattgtggcgggagggagaggagactgccttagggagctagggaaagtgacacaggaggggcagcgaggatgtagcccctgatgtattattattattttttatttttatttttttgagatggagtctcgcagtgtcacccgagctggagtgcggtggcgtgatctcggctcactgcaacctccgcctcctgggttcaagtgattctcctgtctcagcctcccaaagagctgggattacaggcacctgccaccacgcccagctaattttttgtatgtttatgagagacggggtttcactatgttgccaggctggtctcaaactcctgacctcgtgatctgcccgcctcggcctcccaaagtgctgggattacaggcgtgtgccaccgcgcccggtcaggtgatgtattattataattattagaaatattctatactatatatatatatttttttgagacagagtcttgctttgtcactcaggctggagtgcagtggagcgatcttggctcactgcaacttccgcctctcaggttcaagcgattctcctgcctcagcctcccaaatagctgggactacagattataccaccacacccggctaatttttgtatttttagtagagacggggcttcactatgtcgtccaggctggtctcaaactcctgacctcaggtgatccacccaactcagcctcccaaactgctgggattataggcgtgagccaccgcgcccagccagaaatatactatactattgcctatgatatagcacccatgctatccgcagagggtggttccaggacccccagggataccaaaatcggcagatgctcaagtcctacagtgggcacccatggatacagaggccgagtgtacatataatacaataatgattggtggattcattcattctacagctatttgtaggagccgcctgtaccaggcactgggaacacaacagtgggtgaatgaatgaatgaaccaacaaagggaaggcaggatagggtaaagagaaatgtgggaaaagggctaagggaaatggtgtcaggtggtgcatacagtaggcacttactcagtgctcactaagcagcgcccatactgagtcccatgtcttgcagtggagaacatggcgcactgtgaatttcctctcctgagagacctgcttatccggtgagggtgtggggagcctggggctagggggctggcgaggggccctggggacaccaccatcggggctgaccgtctccggtcccccagctcccacctccaagacctgaaggacataacccacaacatccactatgagaactaccgcgtcatcagactcaatgaaagccacctgctgccccgcgggcccggctgggtgaacctggccccggcctccccaggacagctgaccaccccccggaccttcaaggtctgcaggggggcccatgacgattctgatgatgagttctgaccaccggcggatcccggggctgctgggcttcctgagtccccagcggctctcaacacacacctatgtaccagagcatctattaaatgtgagccttgctttttatgaaaagctgtgctttgaaaacaaaa

SEQ ID NO: 7833 - DNA, 309 bp, Homo sapiens
ggccgggcacggtgctcacgcctgaaatcccagcactttgggaggccgaggcgggcagatcacctgaggttaggagttcgagaccatcccggctaaaacggtgaaaccccatctctactaaaaatacaaaaaattagccgggcgtagtggcgggcgcctgtagtcccagctacttgggaggctgaggcaggagaatggcatgaacccgggaggcggagcttgcagtgagccgagatcccgccactgcattccagcctgggcgacagagcgagactccatctcaaaaaaaaaaaaaaaaaaaaaaaaaaa

SEQ ID NO: 7834 - DNA, 3164 bp, Homo sapiens
caggggaggctaggcgcggtggctcatgcctgtaatcccagcactttgggaggccgaggggggcagatcacgaggtcaggagatcgagaccatcctggctaacacggtgaaaccccgtctctactaaaaatacaaaaaattagccgggcgtggtggcgggcacctgtagtcccagctactcgggaggctgaggcaggagaatggcatgaacccgggaggcggagcttgcagtgagccgagatcacgccactgcactccagcctgggcgacagagcgagactctgtctcaaaaaaaaagaaaagtgcaggggaacaactgtggcccctgctccagctcttggcctggctgggtgggcaggaggcccactgtcccctcctctcccctctggccctcagtcttcctgtctctctgggtaccttgtttctaatgtttgttgttactattatgaaagtcgtatctatctcttaaagaagatctggaaaccaccaagttgttaaaagacaaagtcaggccaggcgcggtggctcacaccagtaatccaagcactttgggaggccgaggtgggcagatcacctgaggttagaaattcgagaccatcctggccaacatggcgaaacccgtctctactaaaaatacaaaaattagccgggcgtggtggttggtgccagtaatcccagctactcgggaagctgaggcaggagaatcacttgaacccgggaggcagaggttgcagggagccaagatctcgccactgcactccagcctgggtgacagagtgagactgtgtctcagaaaacaaaaaagacaaaagtcacagagccccgcccagtcccaggcaggacagtaacaggaggaggaggctgtggcagggagtggttccggtgagtcagacttctggacccaggttcgattgcatgccataagacccaccaatgtgtgagcttgagtaacgttccctgagcccttctgcctcagtatactcatctgtaaaatgggtatgttaatagtatccacctcctcccagtgtcgtgaggatgaaatgaactgatcatcgatgtcagagccgtcgaagcatgatggaaggctcacagaaacgtgcactgaatgccctgtgctattatcgccgtgttgacgtgtgattccatccaggcttttgtcctcttccaccatagtcacgctgcatagatcgttttttccctggcttttgccagtcaacaccaccgggagcaccttccagatgacagcatgctttctgcaaactactcctttgacggcacttacatggtgcagtccctactggcacccagtgaggctcctcccctcaccgccacgattttcagaattagaccatcgctcacatgggaggattttcctggagaaagtgttttctctgcacagaggcgcatttccttaggggacatccccagaggtacgtctactgctcaaacgcagtccacacgtcaccatcaccagagccatttgttcatccactaaccacatcctcagctgcttatgggagaggcccccgtgctgaatccctcaagggctgtggaattgtggttttcaagatttcaccttggacaacaaactgtggtccaggacaggctgtgccccatcgtccctgccaccctgggccctgcctggcccacccttaacctctaagcctttatttatttacttacttatttatttatttatttatttactgagctagggtcttactctgtcgcccaggctggagtgcaatggcacgatctcggctcactgcaacctccacctcctcggttcaagctattctccctgcctcagcctcccaagtagctgcgactacaggtgcccgccaccaagcccagctaattcttgtatttttagtagagatggggtttcgccatgttggccaggctggtctcaaaccggacctcaagtgatctgcccaccttggcctcctgaagtgctgggattacaagcatgagtcaacgcacctggctgacccctagcctctaagcctttaaggttaagcctccaggaaggagcgggagttccccagaaggaagaactggcagaaggtagtggacagcaaagggcagaagtcggcctggggctcaggaaagctggaaccacggccacctttcttctgtgaatacggttttacttagacacagccacgcccatctgtttacctattgtctgtggcgactttctcactgcaatgaaaagttgcatagtagttgcaacagagaacttaggaccagcaaagcctaaaatagggaccatctggccctttacagaaaacacttgccagcctgagtgtggtggcgctttgggaggctgaggcagctggaccccttgaccccaggagttcaagacaatcttgggcaacatagggagacctcatctctacaaaaagtaaaaaaattagcccagcatggtctacgtacctgaagtcccagctactagggaggctggggcaggaggatcacttgaacccaggaagtcgaggctgcagtgagctgtcattgtgcctctgcactccaacttgggtgacaaagtgagaccctgtcccaaaaaagaaaaaaaaaaaagaaagaaaagaaaggagaaaagaaagaaaaaagaaagagaaaacatttgccaatagcaaggacacaggaatgcctaagccttgtgaagtcaagtaccaggaaacaagaaagaattaactgtgtgagatggacttggtataagaaacagcttatcaggctgggcatggtggttcacgtctgtaatctcagcatttagggaggctgaggtgagaggatcactagaacccaggagtttgagaccagcatgggcaacatagtgagaccgtgtctcaaaaaaattttaaaaagggctgggcgcaggggctaacgcctgtaatcccagcactttgggaggccgaggagggcagatcacgagatcaggagatcgagaccatcctggctaacacagggaaaaccagtctctactaaaaataggaaaaaattagccgggcgtggtggcaggcgcctgtagtcccagctactcgggaggctgaggcaggagagcggcgtgaacccgggaggcagagcttacagtgagccgagatcatgccactaaactccagcctgggtgacagagcgagactccgtctcaaaaaaaaaaa

SEQ ID NO: 7835 - DNA, 547 bp, Homo sapiens
tcccaagctccctgggctcagagtcctgtgctcgagagctccttccccattcttccggcagccacacccccgagtttgtccctccactcctgaacatcctatggacgcctccttttctaccctcctgggtggaagaatcctttctcttggtccatttccacttcatcctgaagaacagtaaggagaggggattgctgtttgtcgggatgaaccatttgcaacaagccccacagtttgggtaccttctccagtcccagccaaaccccacatccaactggacttgccatgccccacgctaggctcctgcccacctcacccaggccaggccaggcttcctaggcagccagtgctccaggagccggcccacccctcctcccccatcttcacatccgcatggcagtgggactcagcccttaagcagcctagggctgttagggtacctggcccaggtgggtttgacatgccctttcccaggtagcagcagggacaaactggttgacgcccagaggcagagtacagtgtccccaccttccctgtgtctttccct

SEQ ID NO: 7836 - DNA, 403 bp, Homo sapiens
aacaaacattagataggttagctttctatttcacctaccatttttctcagagggagctgccagtcatggtattcgatattgttaccaagaaaatctttgtgtgtgtcaagcagcatccctgttttcagtgagaggtgaccagataaactggaaagtattttatctgtctttgtgacacagattatgtggttgtcgtttttcaccaactttcttactagatcttgaaaatggtcttggtccaggcatgatagctcatgcctgtaatcccagcagttgggaggccaaggagggtggatcgcttgaacccaggagtttgagaacagcctgggcaacctggtggaaccccgtctctacaaaaaatataaaaattagctgggagtggtggtatgcccctgtggtccca

SEQ ID NO: 7837 - DNA, 353 bp, Homo sapiens
aataaaaaagcaagtatttagcaaactacataacaacattattccaccaaaaaatggattttcaagaaaaataagaattggaaactaatcctatgaacttcattgaaagacagttcttttatatttaaataatggtggagacagcaacattacagtttcccctttctttttattgattagttttagcattattaaatagcaactaattaaactgaataattaagaaatcagacgtgagataagaactcaaatgttattcatattttaaaaaactgaacatctttgttgaacaagtctggtatttctgacaaaatgggattttatatcctttgagagacttaaggtctctcaag

SEQ ID NO: 7838 - DNA, 381 bp, Homo sapiens
gtggctgggggaaccatagagagatcagtcccttgcaactgtccctggggacacttactgagctcctggactgccaagtgctgctggctccccatctgaatactggaaccaaattcaagctggtttgtcttttactgagaagcctttgaattctttgaatatgttctgactggtgtctagccagtgggagatgtgattacagaaattgatgggcctgtggcacagactgctttctgaaaacacagggttgtgtattttgaaagtgattccataaatgcttatttcacctgactccagttttctgtatgtgaaagcagtggctaatgtgtcaaatgaggacaaccaagccatcaaggtctttcctctggaaggtcacagaag

SEQ ID NO: 7839 - DNA, 1639 bp, Homo sapiens
tcctcccgggctgggggcgctgaatcccccgcgcctcactcacgggtccctcctcctggagggcctctgcccctcccctctctggctggctcctccgcgtcatccgagccgcggctaccgcaccgcctcctccgggaagccttccacgaccaccactcacgcttcattctctgcagagcccttgtgactccgttgctcgcctgtcatccctctcctcttactcgaggacaagtgacactggaccggagtgtctccgttcccagtgtgaaggatcgagcctggctcggaggaggcgctcagggtggttcgggcccggcccttgtgagtggagggtcgttgcgcatcctcctcctcactttcttcctgccgggacgttctcagccgggaactgacagatcctgcttagcccggggcccagcactgagaaatctgggaaggaacgttgctcaccgcacatgggccgtggccccatccttcgggccctttaggtggggaatcgggctagcagctccagccacggcactgggacggggagcgctatcgtcccaggagaccgggcgatgagccaaggctgctgtgtatccaacctgacatctgcaggaaacccccccggaacctgcccatgcaccacaccacagagaaaccaggacacaggggctcagggccagtgggggcgcaaaggctgcagaccgggagcggggcaccctgacaggtgggcacagcgcagagggcctgagggcccctggagttccaggggaggcgggtttgcgccaagaggccatgctggccactcctcctcaggggatctggaaacccagaggcagcagtgaggcgtggccccaaatctgggctcttcttcttacaaacgtggggctttgggcaaacgccttcatcactttcattctttgagcgcctcgtgtggaaaggagagttactaacgcctgactcacagccacgtgaggattccaacgagcaaagtgcgtagcgcagtacctgacccacaggaagtgaggcacccaataaatattagctgacattagaccttacttttagtcttgattttcttttgtatgtgacagtacagcaagggtttgtttaagatagggtatgactctgtcactcaggctgcagtgacagtacagcaagggtttaagatagggtctaactctgtcgcccaggctggagtgcagtacagcaagggtttaagacagcgtctgactctgtcgcccaggctggagcgacagtacagcaagggtttaagatagggtctgactctgtcgcccaggctggagtgacagtggcacaatcacaatcaatgctcactcctccatctctcaggctcaagtgatcctcctgtctcagccaccaagcagctgggactacaggtgcatgccaccacacccagctaatttttttgtttgttttttagtagaaacgaggtctcactatattgcctaggctgaagcaagggctctttgacttctagatgtaagtgctctgggcaacacttcaccacagccatctgccagccttgagtccagtgacaagagggaacaagatggtttacaagtcacccctattctctgcaaatccagtttattaaacttggagttcacaaagaataaacggttaattccta

SEQ ID NO: 7840 - DNA, 1639 bp, Homo sapiens; identical to SEQ ID NO: 7839

SEQ ID NO: 7841 - DNA, 1639 bp, Homo sapiens; identical to SEQ ID NO: 7839

SEQ ID NO: 7842 - DNA, 116 bp, Homo sapiens
cctgtattcccatcacttgggaggccaaggcaggtagatcacctgaggtcaggagttcgagactagcttggccaacatggtgaaaccctgtctctactaaaaatacaaaaattagc

SEQ ID NO: 7843 - DNA, 116 bp, Homo sapiens; identical to SEQ ID NO: 7842

SEQ ID NO: 7844 - DNA, 281 bp, Homo sapiens
agagaagatgtatcccaagttgtccaggtgtgggggtaggtaggacacagagtagccctgggaatcctgcccaagaccccctcgtccccagtgattgaggaggagtccctttccccggtgtagtttatctgtcccaggggccttctccggcaccctctggatctgcttcctgatctcactctggggaactgcttggggagcttcacgtttcagtctcaaggatcgcgcagggcggaccctcagcagcctccagatctgcccagaaagtccacggtgccggc

SEQ ID NO: 7845 - DNA, 1655 bp, Homo sapiens
agcacaaccctgagattgggcatattcttaacaacccggaaattatgcggcagacactggagtttttacgtaaccctgccatgatgcaggagatgatacgtagccaggaccgggtgctcagtaacttggagagcattcctggtggctacaatgtgctttgcactatgtacacagatattatggacccaatgcttaacgcagtccaggagcagtttggcggcaatccctttgccactgccactactgataatgccaccaccaccaccagccaaccttcaaggatggagaattgtgaccctctccccaacccctggacttccacacatggaggctcaggtagcaggcaaggaaggcaggatggggatcaggatgcacctgacattagaaataggtttccaaactttctgggtattataaggctctatgactatctccagcaattacacgagaacccccagtccctaggaacttatctacaggggactgcatctgccctcagccaaagccaggaaccaccaccatcagtaaacagagttcccccatcgtcaccctcatctcaggagcctgggtcaggccagcctctccccgaggagtcagtagcaatcaagggaaggtcctcctgcccagctttcctgagataccccacagagaacagtactggacaaggtggagaccaagatggtgcagggaaaagctctactggacatagcacaaacttgcctgatcttgtctcggggctgggagattctgccaacagggttccatttgctcccttatctttttcccccacggcagccattcctggaatccctgagcctccctggctgccatccccggcttatccaagatctctgaggccagatggcatgaatccagctccacagttacaggatgagatacaaccacagctgccactgctgatgcaccttcaggcagccatggcaaacccccgtgccctgcaagccctgcggcagattgagcagggtctacaggtcctagctactgaagcacctcgcctcctactctggttcatgccttgcctagcagggacgggtagtgtggcaggaggtatagagtctagagaagatccccttatgtctgaggatcctctcccaaatccacctcctgaggtgttcccagcactggactctgcagagctgggcttcctttcccctccctttctccatatgctgcaagatttagttagtacaaatccccagcagctgcagcctgaggctcactttcaggtgcagctggagcaactgcggtccatgggctttctgaatcgtgaagccaatcttcaggccctcattgctacggggggcgacgtggatgctgctgtggagaagctgagacagtcgtaggagccttattcattcaaaccatacgttttcctctgtgcctttttcccatatcctagttccctagctctcccatttttgaatacagctgcattataaaccaaatttactatgaagtcctttgctgtggaggcaatgttgttccagagtcaacgaggaagactaatggccaaaacatagtggaggtgctgtgtgtgagtcaaccacttgtaccactataccactggggggccccagtctaagctctgcttatgcctatcttgagatgcaattacacccaatttccaatgtgaa

SEQ ID NO: 7846 - DNA, 114 bp, Homo sapiens
tcgggtgggggcctcactgtttgtgctttgtttgatgttgggtgggggggtcagaaagagggaagtggccattgccacggaaacatgggagccccactggccagggggccaggc

SEQ ID NO: 7847 - DNA, 114 bp, Homo sapiens
tcgggtgggggcctcactgtttgtgctttgtttgatgttgggtgggggggtcagaaagagggaagtggccattgccacggaaacatgggagcccctctggccagggggccaggc

SEQ ID NO: 7848 - DNA, 945 bp, Homo sapiens
gggagcctgcacctgagacgtcctgggagctggcctgcccgccacacgccccactcttcccaggccacgtggaagacacttgaagtgggctggtggaatgtcgccctgcctcggctcctttcccgtcaacaggaccctctcccttctcccgggtgccggcataggggtcaaaagccccccaggattctgaatcacagctgcacactctgggggcactgccatgtggctttctaggaagaaaaagcacctgcctgattcccaagtccctcagccccaagggaccacagcttcggaaagggatgtggggtgggcacagggcgggcaggggtccacaagagagctgcagggggttccgggacagcactgggctgggaagttgggggacttgaggctaagctgctgtgtgaccctggggttgtcaactcccttctctgggcctcagtttccccccctctctaaagtggaaggagacattgcccgatgtctaatgctaaatctgcaggtgacttgactcccagcttgggaagggaccctctccctgccctagaggggcttcagtccctctctactccagctttcttgacccccacacctgtttctagccccagaccccccagaccccacaccctctcttggcttccttcctccccccgccagccccccggccctgcacaccccagcagagtccctgggcagcacagtaaagacgactggtttcggtatcagtttgtaaactttaaggaaaatgtgtctctgttttcctgtccgttattgtcggatgttggtttgttcacagtcgggtggtggtcaggtgtgtgtgtgcgtgcgtgcgtgcgggtctgcatgtgcgtcctctcctgggccttggcccccgagtctgctccccgccctggccgcctggacccttcccccaaaaggcccccagccctctggctccgacctcac

SEQ ID NO: 7849 - DNA, 945 bp, Homo sapiens; identical to SEQ ID NO: 7848

SEQ ID NO: 7850 - DNA, 1209 bp, Homo sapiens
ctaggtaaccacatctcccataactgccccagcacatcgtcctgagctgcccaacctgtctccagccaccttctgtggagtctcaaactccatcatctgtgggaccctgtaggccgaagggagaaacaagagtgcagccaccacccctgagccacctgtggctctgctacccacaatttcactgtgaagagtcagctgcctgggccgtgaggtcactgcgaccatgagtctgggcatcatggaagaggaagacctggccgagtacttccggctgcagtatggggagcggctgctgcagatgctccagtgagtgtctgaggcctggcttgcccacccctctgtgcctgggaccactcacacccaccccatacctcatcttccaaccgtctgtcccctcctctcctgtaacccagtgccccaaataaccttggcaccagtccacctcatcacgctggtctccaccccgtcaccctccccctgctcactcctgcatggccctctatgcttctcaacacaacagccctttccctcggaaagggagagaggcccctctgcttccccatgggtatctgtctccacgggttactcccagccccagcctaccccatgtcagaacacacagccctctcgcgttcacatcttggacaggaaactccccaatgttgagggggcgtcggagtccccatccatctggctactggagaagaaaaaggagacagaaatcatgcatcaaactatggtgcagaagaagaaggtggggactcagggatggagtgcagaggggcaggaaaggaagggggtgggctggggctccgggagagcctgtggacagccctccattgtctgagtggggtggctagagccaggagtcctctatggtgatctggtctctttggggagaacagaaaggatctgggtcttgggggtaccactgtccagggatgctctgctctgggccaggcatggggtggaaagtgggaggctcctatggaccctcttgggcctggggatggagcctctgggacagggatgctggggtcttccttggtactcatgtcaggagccctcctgacctctctgctctcccacccccaccccaaagatgtttcagcgcagaatggaaaccctgaacctgcgctgggaggaactgggcgttaaggaagcccaactgaaggctcacatccagaagtctgagcagttcatccaggt

SEQ ID NO: 7851 - DNA, 1209 bp, Homo sapiens
ctaggtaaccacatctcccataactgccccagcacatcgtcctgagccgcccaacctgtctccagccaccttctgtggagtctcaaactccatcatctgtgggaccctgtaggccgaagggagaaacaagagtgcagccaccacccctgagccacctgtggctctgctacccacaatttcactgtgaagagtcagctgcctgggccgtgaggtcactgccaccatgagtctgggcatcatggaagaggaagacctggccgagtacttccggctgcagtatggggagcggctgctgcagatgctccagtgagtgtctgaggcctggcttgcccacccctctgtgcctgggaccactcacacccaccccatacctcatcttccaaccgtctgtcccctcctctcctgtaacccagtgccccaaataaccttggcaccagtccacctcatcacgctggtctccaccccgtcaccctccccctgctcactcctgcatggccctctatgcttctcaacacaacagccctttccctcggaaagggagagaggcccctctgcttccccatgggtatctgtctccacgggttactcccagccccagcctaccccatgtcagaacacacagccctctcgcgttcacatcttggacaggaaactccccaatgttgagggggcgtcggagtccccatccatctggctactggagaagaaaaaggagacagaaatcatgcatcaaactatggtgcagaagaagaaggtggggactcagggatggagtgcagaggggcaggaaaggaagggggtgggctggggctctgggagagcctgtggacagccctccattgtctgagtggggtggctagagccaggagtcctctatggtgatctggtctctttggggagaacagaaaggatctgggtcttgggggtaccactgtccagggatgctctgctctgggccaggcatggggtagaaagtgggaggctcctatggaccctcttgggcctggggatggagcctctggggcagggatgctggggtcttccttggtactcatgtcaggagccctcctgacctctctgctctcccacccccaccccaaagatgtttcagcgcagaatggaaaccctgaacctgcgctgggaggaactgggcgttaaggaagcccaactgaaggctcacatccagaagtctgagcagttcatccaggt

SEQ ID NO: 7852 - DNA, 1209 bp, Homo sapiens; identical to SEQ ID NO: 7850

SEQ ID NO: 7853 - DNA, 3737 bp, Homo sapiens
ccctcctgggagtcagccccacaggaaggcccttgtcctcccttccctgtgccttctcctgggctgagccctgagctggaaagggacagagccagtcctttctgggggtcggcacccaggctggggccgctccaggccccgtgcagttcctcagctctgcctgggttgccttacagtgagacggagctgcctcctctgactgcgcgggaggcgaaggtaagagcctgatgcgtggaggggctggtccagggacgtagggactgggcgggtggtcagtgaggcagaggaagcagctggcctgagcggtggcgggtgagggcaacacgctgtcactgggaggggcagcagtccctgctggacctgaccccaggttgctgttcactttggcagtttgataaaattccaaaaggagaaccacagtcctggcttgggggtggctgcgcgcttgtgtcaggaccccacctagaggctgggacctaagactggtgtgtctgtggcctgaggatggtacatcccggggtcccaaagccagcccactggtgctcatttgctcaaaggctctcagcccttgaggtctgcccttccctggctccttccagctggctcccaccagggctccagagcccaagacccagcatccgcgggcggctctgggaagcctggcagctccgctaactccaacatgcctcatttgacagcaaattcggcgggagatcagccgaaagagcaagtgggtggatatgctgggagactgggagaaatacaaaagcagcagaaaggtaacgtgtggagggaggaagcactctctgcagagacaggggacaggcacccatggcttgtggcctggcaccatcagcctctcagagggtgggcggcacactgtcctcgcccagaggactgcaggcctggtcgccagatttcctgcctattcgtgcaagcgtcaccttgcagggagggaatctgaatctagggctgggactacccggagctcaaggctagggatgccctggtgacctgaaggaaggaaaaggttcagatcagagtttcgactctgagtgtccatccactctttcagtcctgggaagggagaccctgtcccagcttgatctcacctctactgaggaatcatggggccaaaaccgacaatttccagaatccccgggctctggtcctcactggggtcaccccgtggcctgtgacaccagatcgttttctgcccacagctcatagatcgagcatacaagggaatgcccatgaacatccggggcccgatgtggtcagtcctcctgaacattgaggaaatgaagttgaaaaaccccggaagataccaggtacgctcagccagagcacaacaaacaggacaggccgtgtcggggcccaggtctccagctggagggaacgtcaagaccaccctggggagctgggggtgaaggtcagatgaacaccctgggcacagatggtgacacagtcaccacagacaaactcagctctggtgaccctccctggcttcagtaacaagccaaaatgcagctttctgcagaaggaaaccttccttctgtccttccttcccgaagtgctgactgtgggctgactgccactgggggcagggagtcttccatctgttctgagactgcttcctcctcttggccctgccctacagatcatgaaggagaagggcaagaggtcatctgagcacatccagcgcatcgaccgggacgtaagcgggacattaaggaagcatatattcttcagggatcgatacggaaccaagtaagcctacgggagccacagggtcccagcagagatggggtgaatgagagggatgggggcttccccggagcagaagccagggtcacccaggagggatgacacagctgccaagagctctcccggcccagggagcagccggcaccatgaaccgagcacctccctggttccaagccctgggccagactggaacatgtggggccagaacccaggaggatcctgaggagatggaaggcagcaaacaaaatcatgcacaatggtgaagggtgctctccctgacccatggggacccatggtaggacccacgggagggtggcaggatagagggcccatgagcccccgccaggcaacagtgacagcaccaaatgctgggagaattaggggtcctggaaactctcatccaggtccgctgggaacatgacatggcacagccacgttggcagccagttgggcagtggctcacaaagctcgatggacttgaaccacacatccccaaagtgtcacagatattgaacccactgatttggaaactgacatccacatgaaaccagcatgccaggttcactgcttgactcctcgtcactcacacacggagccttcggggacggccttcaacacgggaatggggagagcaaggctggtcctcccttcaaacggaagacccagtgagaaaagggaacgagccggtgatgcccgcacgaacgtgggtggatcctagatgcattttgctgagggacagaagccagacccaataagctaccacagtaggattcccattcctaggccattctggaaaaggccaaaccacagggactgagaagcagtctgggtggccaggggctgacggatcggggagaggctgggtgcataggggccaccctggagacttggaggatgaaggagtcgccccaggaggggctggagcggtggccgggagactctgcacattggtttggaaccgtggaggaactgtacacccacagactgaactggcgtgtgtgcaaactgaaaaaaaaaaaaaaattattcagagtgaaaaggatcaggcaagtcactgtacaactgggctatttgcatgtcacagatgtggattttactgaaacatttcttcaagagtctcaggccctgaagagctcactgcttatctggtgaaacatctgaacctgaaatgggatttgctgttaggctttgtagacaaagtgaaattaacaacatctgcacaaaacaaaccaaagccccctttctctgtttcctaggcagcgggaactactccacatcctcctggcatatgaggagtataacccggtgagtattcccggcagtgaggttcccgggccatatttccatattgacaggagtgggtgtctggtgggggtgtcgttgcttcttttaaagttagtatttgtgacccaccaggatataggaggtaggatgtcagctcaccgctggcataaacctccaaggaagggggtggtctcaaggggtcaagctgagacacaaaggagtcagggcccggactcctggtgtcacctgggcctgaccaccacttctcagaacaagaaatgacgccctcctcctggggctgccccaaagcccaggagcttggcagcatcgcacacaggatggtgctatcagcagacattttggacaaggtgctgaagtgcctgatggacttggctcttgtcatgaaatgaatgtgcatcctgaggaagcctctttttcagaggaagcctctccttcagaggaagcctctccagtcacctctgccctctccaatgacatgagtcctcccaggtgacctcagccctcccaggtgatgtccttccatggtgactctggctcttgcaggaggtgggctactgcagggatctgagccacatcgccgccttgttcctcctctatcttcctgaggaggatgcattctgggcactggtgcagctgctggccagtgagaggcactccctgcaggg

SEQ ID NO: 7854 - DNA, 8515 bp, Homo sapiens
gggcagttggtgggcacaagagcgagaggacatcattatgaaatacgaaaaggtacaagtcggtctgcttcttggagggaggcctcttccagtgtgccctggtcaaagggtcctgggctccctaggagcacagggcagggacgggtggccaatgcccccaggcccttgcaccctttaccttggacccctcaccaaggctccctctgggctacagggacaccgagctgggctgccagaggacaaggggcctaagccttttcgaagctacaacaacaacgtcgatcatttggggattgtacagtgagtcctctgcactcccctcacccctaaagcacctgtctcagctcagggatgggtttgcttttagaaaggcctttctgacgcaggacatgtctcaccaggtcgggtcaacctcctttccagggatagaactcctccctgactcccctgcaggtccagcccgaggttgttaggccagaggtgtggggcccatctagggagccggtgggaatggagactgggctaggtcaggcccctgggcgctcagcagttctgtcggcaagtgagcacaagaggagcggggcagcctgagggtctggccctgtctacttggagacaaccccggtgagatgcaagggttatggccacagggtgaggggacgcctggcccagcctcagggctgttgtccagcaggtctctgagggcccacctgcccctgttctcccccattcccctagagctacagccctcactgtcccgtgaggggaaaaggcatggtgacaatgggggctgtagccctaggagaacgggggagaagatgggcagggccccgttctgggcatctcacggtgaggccagggaggcagcagggctcgcggctaaagacctgggtctggtgctgggaagggatctggggccgggtaagaggagcccagccaggagcccatccctcagggatcacaggatggagagacagaggatccctggggaggtagggcgggagggagctgacgagccgtgccacttctgaaacgcagggtgtgtggctcgggtgcagggagaggcaggtggatgctgggaggtcagaacctgcaagggccttggggctgtcaagtggggtgggcccctggtgcagccagagtacaccgggcaggtctcagggcaggctcccttgaccctggcggggggatgtggtcactccctgagggactcctgtcagggcccggtcgcccaccctgggcggcccccatcccatctcagggctaacctttctcagctccagcagaaagcaccacctcgagtccaggacgggcagccccactgggcagcctgaccgccccccacgccaggggccccagtaaccccggccaggctgtccctacactccttcttctcccaggtcctgcccctcctgggagtcagccccacaggaaggcccttgtcctcccttccctgtgccttctcctgggctgagccctgagctggaaagggacagagccagtcctttctgggggtcggcacccaggctggggccgctccaggccccgtgcagttcctcagctctgcctgggttgccttacagtgagacggagctgcctcctctgactgcgcgggaggcgaaggtaagagcctgatgcgtggaggggctggtccagggacgtagggactgggcgggtggtcagtgaggcagaggaagcagctggcctgagcggtggcgggtgagggcaacacgctgtcactgggaggggcagcagtccctgctggacctgaccccaggttgctgttcactttggcagtttgataaaattccaaaaggagaaccacagtcctggcttgggggtggctgcgcgcttgtgtcaggaccccacctagaggctgggacctaagactggtgtgtctgtggcctgaggatggtacatcccggggtcccaaagccagcccactggtgctcatttgctcaaaggctctcagcccttgaggtctgcccttccctggctccttccagctggctcccaccagggctccagagcccaagacccagcatccgcgggcggctctgggaagcctggcagctccgctaactccaacatgcctcatttgacagcaaattcggcgggagatcagccgaaagagcaagtgggtggatatgctgggagactgggagaaatacaaaagcagcagaaaggtaacgtgtggagggaggaagcactctctgcagagacaggggacaggcacccatggctgtggcctggcaccatcagcctctcagagggtgggcggcacactgtcctcgcccagaggactgcaggcctggtcgccagatttcctgcctattcgtgcaagcgtcaccttgcagggagggaatctgaatctagggctgggactacccggagctcaaggctagggatgccctggtgacctgaaggaaggaaaaggttcagatcagagtttcgactctgagtgtccatccactctttcagtcctgggaagggagaccctgtcccagcttgatctcacctctactgaggaatcatggggccaaaaccgacaatttccagaatccccgggctctggtcctcactggggtcaccccgtggcctgtgacaccagatcattttctgcccacagctcatagatcgagcgtacaagggaatgcccatgaacatccggggcccgatgtggtcagtcctcctgaacattgaggaaatgaagttgaaaaaccccggaagataccaggtacgctcagccagagcacaacaaacaggacaggccgtgtcggggcccaggtctccagctggagggaacgtcaagaccaccctggggagctgggggtgaaggtcagatgaacaccctgggcacagatggtgacacagtcaccacagacaaactcagctctggtgaccctccctggcttcagtaacaagccaaaatgcagctttctgcagaaggaaaccttccttctgtccttccttcccgaagtgctgactgtgggctgactgccactgggggcagggagtcttccatctgttctgagactgcttcctcctcttggccctgccctacagatcatgaaggagaagggcaagaggtcatctgagcacatccagcgcatcgaccgggacgtaagcgggacattaaggaagcatatattcttcagggatcgatacggaaccaagtaagcctacgggagccacagggtcccagcagagatggggtgaatgagagggatgggggcttccccggagcagaagccagggtcacccaggagggatgacacagctgccaagagctctcccggcccagggagcagccggcaccatgaaccgagcacctccctggttccaagccctgggccagactggaacatgtggggccagaacccaggaggatcctgaggagatggaaggcagcaaacaaaatcatgcacaatggtgaagggtgctctccctgacccatggggacccatggtaggacccacgggagggtggcaggatagagggcccatgagccccccccaggcaacagtgacagcaccaaatgctgggagaattaggggtcctggaaactctcatccaggtccgctgggaacatgacatggcacagccacgttggcagcccgttgggcagtggctcacaaagctcgatggacttgaaccacacatccccaaagtgtcacagatattgaacccactgatttgcaaactgacatccacatgaaaccagcatgccaggttcactgcttgactcctcgtcactcacacacggagccttcggggacggccttcaacacggggatggggagagcaaggctggtcctcccttcaaacggaagacccagtgagaaaagggaacgagccggtgatgcccgcacgaacgtgggtggatcctagatgcattttgctgagggacagaagccagacccaataagctaccacagtaggattcccattcctaggccattctggaaaaggccaaaccacagggactgagaagcagtctgggtggccaggggctgacggatcggggagaggctgggtgcataggggccaccctggagacttggaggatgaaggagtcgccccaggaggggctggagcggtggccgggagactctgcacattggtttggaaccgtggaggaactgtacacccacagactgaactggcgtgtgtgcaaactgaaaaaaaaaaaaaaaaatcattcagagtgaaaaggatcaggcaagtcactgtacaactgggctatttgcatgtcacagatgtggattttactgaaacatttcttcaagagtctcaggccctgaagagctcactgcttatctggtgaaacatctgaacctgaaatgggatttgctgttaggctttgtagacaaagtgaaattaacaacatctgcacaaaacaaaccaaagccccctttctctgtttcctaggcagcgggaactactccacatcctcctggcatatgaggagtacaacccggtgagtattcccggcagtgaggttcccgggccatatttccatattgacaggagtgggtgtctggtgggggtgtcgttgcttcttttaaagttagtatttgtgacccaccaggatataggaggtaggatgtcagctcaccgctggcataaacctccaaggaagggggtggtctcaaggggtcaagctgagacacagaggagtcagggcctggactcctggtgtcacctgggcctgaccaccacttctcagaacaagaaatgacgccctcctcctggggctgccccaaagcccaggagcttggcagcatcgcacacaggatggtgctatcagcagacattttggacaaggtgctgaagtgcctgatggacttggctcttgtcatgaaatgaatgtgcatcctgaggaagcctctttttcagaggaagcctctccttcagaggaagcctctccagtcacctctgccctctccaatgacatgagtcctcccaggtgacctcagccctcccaggtgatgtccttccatggtgactctggctcttgcaggaggtgggctactgcagggacctgagccacatcgccgccttgttcctcctctatcttcctgaggaggatgcattctgggcactggtgcagctgctggccagtgagaggcactccctgcagggtaagtgaacagctgccccggggacctcctgcagccagacctggggatggccaccctggccaggtgatcacagctttcagccaaggcaccctccttgtgtcgccagcttgttgggagactttaggatgtctctgctgagggtcccacaggagtccacggctgacccccaaagcccaaatcagacgcctctcatccccatcagcagagggcatctcatcctccccgtggccaccctctgtgtcctggagccacgccctccggctctgattctgtgcagctgactctcccctccctgagagtcctcctgccctccagctgcccgggctcctgctgccatcggtgcccacgaatgggccgaccaagcccaggtggcagcatctccccatcccctgttccctggcccgaccccactaccaggagatgaccgggaagcccagcgcccacccagttccggccaccctgtcgtggcctgaaagtcaggcttgccctttttgcaccctggcccaggaggcctccaggggaacctccagccaggctccagggaatgttcccgccccacctccccagggtaaaggccgcatgttggggtcaccagatgggagggtgggaggccttggggtttgggggcctctccagctgcccagctcttgcagctgatggctccacatcttgggggaaggctctgatttcatgatgggctgggggcttctcaggatttcacagcccaaatggcgggaccgtccaggggctccaagaccaacaggagcatgtggtagccacgtcacaacccaagaccatggggcatcaggtgagtttatggtcccctcagctcttcccagaggccctgcctcccgtggggctgtaggagcaggggggctggagcccctcgtggggctggtgactggctgagtcccagccagggcctgacctgggacgtcgggttctccatgggctgggagttggtttcctttcctgccctggaggagacagaggcacagggatgggggcccagctcccgcagagcagggcaaagggcagtgtgtccaccgggagtgtgggaaggtgacagtgttgtggggagctctggacaccgcccagtgttctgcactaggggaagggtcttcagaggccctggaagagggaggtttttagggcagcccagtggcctgagcacctctgttgcttccatcaggacaagaaagatctatgtgggcagtgttccccgttaggctgcctcatccggatattgattgacggggtaaggaggcatagggagaccctggctcagggaccttccttgccctgcagtgccctgcttccccagcccgggggtctggctcactcccagcccacaggaggctcaggcgggtccccaaaggacacacaagcaaaaccctctgcccaaggggggtcatcccagggccatggctggggctcaggcccagcctcatgggcagactgggccaggacccgacttgagagggctcagggaagcctcaagccctgggcaagcccctctctccaggagccacatccccactcaaatgagtgccccccatgaggagcttcaagaccttgtctgacccagcgtcctggagggctcaggcgaccctcatggggaaggtcactgactctggagactgaagccccagtgtgcgcagctcgagccaccagccccagcctggaaggaccaggttctttcacacctgctgtccccacagatctctctcgggctcaccctgcgcctgtgggacgtgtatctggtagaaggcgaacaggcgttgatgccgataacaagaatcgcctttaaggttcagcagagtaagtctacgtgtgcccagcggggcctggggagccctggggtcagaccccgactggcccgagggcagcttcctcacactgtcctcatgatcctctgttctggcccagagggaggtctggccaggtgggctgggcaggacactgtgacaccgagcccatcccccacatgacccagatgaaagtcgagagtgtggtgagcacttccctgtccggatcgccccccagccacagtctcctgtgtatatctggacacctggggtggccacaaaaggatccggcaccgcccagtaggagactgaagtggccacggggtatgagctgtgaccattcccaggtaactcccctggcctgatatccaccctgtccctagagcgcctcacgaagacgtccaggtgtggcccgtgggcacgtttttgcaaccggttcgttgatacctgggccagggatgaggacactgtgctcaagcatcttagggcctctatgaagaaactaacaagaaagaagggggacctgccacccccaggtgggctccagtgccatgtcccctcccatgtcaccctctggggtagtcagtagtaggggagtgcccgggacccgcaaccctactacctgggccttcctcttcaccttttcttcctcctcttcctcctggactctaagaaagtacaggaggcccaccggtcctcagggcaggcgctcagtgcgtgtatactggacatgctgtgcacgcaggagggggatgtgggcaagaccctccaacaagccccctcccactttccacggtgtctccctctccccctcgcagggccctccaagttactagacgagcccagacccatttgtgggagaccccgcccctccctgcaagcacccacagcctcagagagcagcagaggcccctcactcctgcacgctcctccaaggttgccaggacaagaagcctggagccagggagacaagggaatccgtgtccctgacccacagagcattcagggagagggcccagagccagagccaagagttcagccagaagtgggaacggtcagtcctggcatggactgggcagcccaggagggcagagggtgacccacgtccgggcccaatcacccactgcggagacgggtccccacgtgaggtgacaaggggctgggtgacatccaaggcccctcccacctgagttctgactgggggccgtatcccaggcccaacagccctgggacgaaggtgtgtggcaggaagcccccagccagtctgaaccctgggggcagtcccaggagccacccgccatgccacgacagcttccccacgccaggcagcacgcacccctccctctgggatcagcagactacaggcgtgtcctcggtgtcaggccacgggggccacacagagaccccgaggactccagagacgcaggcaggtggggcccagcccggaaaggcctgcgtgggctcactggagatgctgaccgcgtctgttttcctttcagccaaacccgagcaaggggtcgtcggcatccaggcctgtgccggcttcacgtggcgggaagaccc

SEQ ID NO: 7855 - DNA, 5015 bp, Homo sapiens
ggaattcccatgaacatccggggcccgatgtggtcagtcctcctgaacattgaggaaatcaagttgaaaaaccccggaagataccaggtacactcagccagagcacaaccaacaggacaggccgtgtcaggggcccaggtctccagctggagggaacgtcaagaccaccctggggagctgggggtgaaggtcagttgaacaccctgggcacagatggtgacacagtcaccacagacaaactcagctctggtgaccctccctggcttcagtaacaagccaaaatgcagctttctgcagaaggaaaccttccttctgtccttccttcccgaagtgctgactgtgggctgactgccactgggggcagggagtcttccatctgttctgagactgcttcctcctcttggccctgccctacagatcatgaaggagaagggcaagaggtcatctgaacacatccagcagatggacctggacgtaagcgggacattaaggaggcatatattcttcagggatcgatacggaaccaagtaagcctacgggagccacagggtcccagcagagatggggtgaatgagagggatgggggcttccccggaacagaagccagggtcacccaggagggatgacacagctgccaagagctctcctggcccagggagcagccggcaccatgaaccgagcacctccctggttccaaaccctgggccagactggaacatgtggggccagaacccaggaggatcctgaggagatggaaggcagcaaacaaaatcatgcacaatggtgaaaggtgctctccctgacccatggggacccatggtaggagccacgggagagtggcaggatagagggcccatgagcccccccaggcaacagtgacagcaccaaatgctgggagaattaggggtcctggaaactctcatccaggtctgctgggaacatgacatggcacagccacgttggcagccagttgggcagtggctcacaaagctcgatggacttgaaccacgcatccccaaagtgtcacagagattgaacccactgatttggaaactgacatccacatgaaacctgcatgccaggttcactgcttgactcctcgtcactcacacacggagccttcggggacggccttcaacacgggaatgggtagagcaaggctggtcctcccttcaaacggaagacccagtgagaaaagggaacgagccagtgatgcccgcacgaacgtgggtggatcctagatgcattttgctgagggacagaagccagacccaataagctaccacagtaggattcccattcctaggccattctggaaaaggccaaaccacagggactgggaagcagtctgggtggccaggggctgacggatcggggagaggctgggtgcataggggccaccctggagacttggaggatgaaggagtcgccccaggaggggctggagcggtggccgggagactctgcacattggtttggaaccgtggaggaactgtacacccacagaccgaattggtgtgtgtgcaaactgaaaaaaaaaaaaaatcattcagagtgaaaaggatcaggcaagtcactgtacaactgggctatttgcatgtcacagatgtggattttactgaaacatttcttcaagagtctcaggccctgaagagctcactgcttatctggtgaatcatctgaacctgaaatgggatttgctgttaggctttgtagacaaagtgaaattaacaacatctgcacaaaacaaaccaaagccccctttctctgtttcctaggcagcgggaactactttacatcctcctggcgtatgaggagtataacccggtgagtattcccggcagtgaggttcccgggccatatttccatattcacaggagtgggtgtctggtgggggtgtcgttgcttcttttaaaattagtatttgtgacccaccaggatataggaggtaggatgtgagctcaccgctggcataaacctccaaggaagggggtggtctcaaggggtcaagctgatacacaaaggagtcagggcctggactcctggtgtcacctgggcctgaccaccacttctcagaacaagaaatgacgccctcctcctggggctgccccaaagcccaggagcttggcagcatcgcacacaggatggtgctatcagcagacattttggacaaggtgctgaagtgcctgatggacttggctcttgtcatgaaatgaatgtgcatcctgaggaagcctctttttcagaggaagcctctccttcagaggaagcctctccagtcacctctgccctctccaatgacatgagtcctcccaggtgacctcagccctcccagctgatgtccttccatggtgactctggctcttgcaggaggtgggctactgcagggacctgagccacatcgccgccttgttcctcctttatcttcctgaggaggatgcattctgggcactggtgcagctgctggccagtgagaggcactccctgcagggtaagtgaacagctgccccggggacctcctgcagccagacctggggatggccaccctggccaggtgatcacagcttttagccaaggcaccctccttgtgtcgccagcttgttgggagactttaggatgtctctgctgagggtcccacaggagtccacggctgacccccaaagcccaaatcagacgcctctcatccccatcagcagagggcatctcatcctccccgtggccaccctctgtgtcctggagccacgccctccggctctgattctgtgcagctgactctcccctccctgagagtcctcctgccctccagctgcccgggctcctgccgccatcggtgcccacgaatgggccgaccaagcccaggtggcagcatctccccatcccctgttccctggcccgaccccactaccaggagatgaccaggaagcccagcacccacccagttccggctgccctgtggtggcctgaaagtcaggcttgccctttttgcaccctggcccaggaggcctccaggggaacctccagccaggctccagggaatgttcccgccccacctccccagggtaaaggccgcatgttggggtcaccagatgggagggtgggaggccttggggtttgggggcctctccagctgcccagctcttgcagctgatggctccacatcttgagggaaggctctgatttcacgatgggctgggggcttctcaggatttcacagcccaaatggcgggaccgtccaggggctccaagaccaacaggagcatgtggtagccacgtcactacccaagaccatgtggcattaggtgagtttatggtcccctcagctcttcccagaggccctgcctcccgtggggctgtaggagcaggggggctggagcccctcgtggggctggtgactggctgagtcccagccagggcctgacctgggacgtcgggttctccatgggctgggagttggtttcctttcctgccctggaggagacagaggcacagggatgggggcccagctcccgcagagcagcgcaaagggcagcgtgtccaccgggagtgtgggaaggtgacagtgttgtggggagctctggacaccgcccagtgttctgcattaggggaagggtcttcagaggccctggaagagggaggtttttagggcagcccagtggcctgagcacctctgttgcttccatcaggacaagaaagatctatgtgggcagtgttcgtccttaggctgcctcatccggatattgattgatggggtaaggaggcatagggagaccctggctcagggaccctccttgccctgcagtgccctgcttccccagcccgggggtctggctcactcccagcccacaggaggctcaggcgggtccccaaaggacacacaagcaaaaccctctgcccaagaggggtcatcccagggcaatggctggggctcaggcccagcctcatgggcagactgggccaggacccgacttgagagggctcagggaagcctcaagccctgggcaagcccctctctccaggagccacatccccactcaaatgagtgccccccatgaggagcttcaagaccttgtctgacccagcgtcctggagggctcaggcgaccctcatggggaaggtcactgactctggagactgaagccccagtgtgcgcagctcgagccaccagccccagcctggaaggaccaggttctttcacacctgctgtccccacagatctctctcgggctcaccctgcgcctctgggacgtgtatctggtagaaggcgaacaggcgttcatgccgataacaaaatcgcctttaaggttcagcagagtaagtctacgtgtgcccagcggggcctggggagccctggggtcagaccccgactggcccgagggcagcttcctcacactgtcctcatgatcctctgttctggcccagagggaggtctggccaggtgggctgggcaggacactgtgacactgagcccatcccccacatgacccagatgaaagtcgagagtgtggtgagcacttccctgtccagatcgccccccagccacagtctcctgtgtatatctggacgcctggggtggccacaaaaggatccggcaccgcccagtgggagactgaagtggccacggggtatgagctgtgaccattcccaggtaactcccctggcctgatatccaccctgtccctagagcgcctcacgaagacgtccaggtgtggcccgtgggcacgtttttggaaccggttcgttgatgcctgggccagggatgatgacactgtgctcaagcatcttagggcctctatgaagaaactaacaagaaagcagggggacctgccacccccaggtgggctccagtgccatgtcccctcccatgtcaccctctggggtagtcaatagtaggggagtgcccgggacccgcaaccctactacctgggccttcctcttcaccttttcttcctcctcttcctcctggactctaagaaagtacaggaggcccaccggtcctcagggcaggcgctcagtgc

SEQ ID NO: 7856 - DNA, 6696 bp, Homo sapiens
ggaatgcccatgaacatccggggcccgatgtggtcagtcctcctgaacactgaggaaatgaagttgaaaaaccccggaagataccaggtacgctcagccagagcacaacaaacaggacaggccgtgtcggggcccaggtctccagctggagggaacgtcaagaccaccctggggatctgggggtgaaggtcagatgaacaccctgggcacagatggtgacacagtcaccacagacaaactcagctctggtgaccctccctggcttcagtaacaagccaaaatgcagctttctgcagaaggaaaccttccttctgtccttccttcccgaactgctgactgtgggctgactgccactgggggcagggagtcttccatctgttctgagactgcttcctcctcttggccctgccctacagatcatgaaggagaagggcaagaggtcatctgagcacatccagcgcatcgaccgggacgtaagcgggacattaaggaagcatatattcttcagggatcgatacggaaccaagtaagcctacgggagccacagggtcccagcagagatggggtgaatgagagggatgggggcttccccggagcagaagccagggtcacccaggagggatgacacagctgccaagagctctcccggcccagggagcagccggcaccatgaaccgagcacctccctggttccaagccctgggccagactggaacatgtggggccagaacccaggaggatcctgaggagatggaaggcagcaaacaaaatcatgcacaatggtgaagggtgctctccctgacccatggggacccatggtaggacccacgggagggtggcaggatagagggcccatgagcccccgccaggcaacagtgacagcaccaaatgctgggagaattaggggtcctggaaactctcatccaggtccgctgggaacatgacatggcacagccacgttggcagcccgttgggcagtggctcacaaagctcgatggacttgaaccacacatccccaaagtgtcacagatattgaacccactgatttgcaaactgacatccacatgaaaccagcatgccaggttcactgcttgactcctcgtcactcacacacggagccttcggggacggccttcaacacggggatggggagagcaaggctggtcctcccttcaaacggaagacccagtgagaaaagggaacgagccggtgatgcccgcacgaacgtgggtggatcctagatgcattttgctgagggacagaagccagacccaataagctaccacagtaggattcccattcctaggccattctggaaaaggccaaaccacagggactgagaagcagtctgggtggccaggggctgacggatcggggagaggctggttgcataggggccaccctggagacttggaggatgaaggagtcgccccaggaggggctggagcggtggccgggagactctgcacatcggtttggaaccgtggaggaactgtacacccacagactgaactggcgtgtgtgcaaactgaaaaaaaaaatcattcagagtgaaaaggatcaggcaagtcactgtacaactgggctatttgcatgtcacagatgtggattttactgaaacatttcttcaagagtctcaggccctgaagagctcactgcttatctggtgaaacatctgaacctgaaatgggatttgctgttaggctttgtagacaaagtgaaattaacaacatctgcacaaaacaaaccaaagccccctttctctgtttcctaggcagcgggaactactccacatcctcctggcatatgaggagtataacccggtgagtattcccggcagtgaggttcccgggccatatttccatattgacaggagtgggtgtctggtgggggtgtcgttgcttcttttaaagttagtatttgtgacccaccaggatataggaggtaggatgtcagctcaccgctggcataaacctccaaggaagggggtggtctcaaggggtcaagctgagacacaaaggagtcagggcctggactcctggtgtcacctgggcctgaccaccacttctcagaacaagaaatgacgccctcctcctggggctgccccaaagcccaggagcttggcagcatcgcacacaggatggtgctatcagcagacattttggacaaggtgctgaagtgcctgatggacttggctcttgtcatgaaatgaatgtgcatcctgaggaagcctctttttcagaggaagcctctccttcagaggaagcctctccagtcacctctgccctctccaatgacatgagtcctcccaggtgacctcagccctcccaggtgatgtccttccatggtgactctggctcttgcaggaggtgggctactgcagggacctgagccacatcgccgccttgttcctcctctatcttcctgaggaggatgcattctgggcactggtgcagctgctggccagtgagaggcactccctgcagggtaagtgaacagctgccccggggacctcctgcagccagacctggggatggccaccctggccaggtgatcacagctttcagccaaggcaccctccttgtgtcgccagcttgttgggagactttagaatgtctctgctgagggtcccacaggagtccacggctgacccccaaagcccaaatcagacgcctgtcatccccatcagcagagggcatctcatcctccccgtggccaccctctgtgtcctggagccacgccctccggctctgattctgtgcagctgactctcccctccctgagagtcctcctgccctccagctgcccgggctcctgctgccatcggtgcccacgaatgggccgaccaagcccaggtggcagcatctccccatcccctgttccctggcccgaccccactaccaggagatgaccgggaagcccagcgcccacccagttccggccaccctgtcgtggcctgaaagtcaggcttgccctttttgcaccctggcccaggaggcctccaggggaacctccagccaggctccagggaatgttcccgccccacctccccagggtaaaggccgcatgttggggtcaccagatgggagggtgggaggccttggggtttgggggcctctccagctgcccagctcttgcagctgatggctccacatcttgggggaaggctctgatttcatgatgggctgggggcttctcaggatttcacagcccaaatggcgggaccgtccaggggctccaagaccaacaggagcatgtggtagccacgtcacaacccaagaccatggggcatcaggtgagtttatggtcccctcagctcttcccagaggccctgcctcccgtggggctgtaggagcaggggggctggagcccctcgtggggctggtgactggctgagtcccagccagggcctgacctgggacgtcgggttctccatgggctgggagttggtttcctttcctgccctggaggagacagaggcacagggatgggggcccagctcccgcagagcagggcaaagggcagtgtgtccaccgggagtgtgggaaggtgacagtgttgtggggagctctggacaccgcccagtgttctgcactaggggaagggtcttcagaggccctggaagagggaggtttttagggcagcccagtggcctgagcacctctgttgcttccatcaggacaagaaagatctatgtgggcagtgttccccgttaggctgcctcatccggatattgattgacggggtaaggaggcatagggagaccctggctcagggaccttccttgccctgcagtgccctgcttccccagcccgggggtctggctcactcccagcccacaggaggctcaggcgggtccccaaaggacacacaagcaaaaccctctgcccaaggggggtcatcccagggccatggctggggctcaggcccagcctcatgggcagactgggccaggacccgacttgagagggctcagggaagcctcaagccctgggcaagcccctctctccaggagccacatccccactcaaatgagtgccccccatgaggagcttcaagaccttgtctgacccagcgtcctggagggctcaggcgaccctcatggggaaggtcactgactctggagactgaagccccagtgtgcgcagctcgagccaccagccccagcctggaaggaccaggttctttcacacctgctgtccccacagatctctctcgggctcaccctgcgcctgtgggacgtgtatctggtagaaggcgaacaggcgttgatgccgataacaagaatcgcctttaaggttcagcagagtaagtctacgtgtgcccagcggggcctggggagccctggggtcagaccccgactggcccgagggcagcttcctcacactgtcctcatgatcctctgttctggcccagagggaggtctggccaggtgggctgggcaggacactgtgacaccgagcccatcccccacatgacccagatgaaagtcgagagtgtggtgagcacttccctgtccggatcgccccccagccacagtctcctgtgtatatctggacacctggggtggccacaaaaggatccggcaccgcccagtaggagactgaagtggccacgggatatgagctgtgaccattcccaggtaactcccctggcctgatatccaccctgtccctagagcgcctcacgaagacgtccaggtgtggcccgtgggcacgtttttgcaaccggttcgttgatacctgggccagggatgaggacactgtgctcaagcatcttagggcctctatgaagaaactaacaagaaagcagggggacctgccacccccaggtgggctccagtgccatgtcccctcccatgtcaccctctggggtagtcagtagtaggggagtgcccgggacccgcaaccctactacctgggccttcctcttcaccttttcttcctcctcttcctcctggactctaagaaagtacaggaggcccaccggtcctcagggcaggcgctcagtgcgtgtatactggacatgctgtgcacgcaggagggggatgtgggcaagaccctccaacaagccccctcccactttccacggtgtctccctctccccctcgcagggccctccaagttactagacgagcccagacccatttgtgggagaccccgcccctccctgcaagcacccacagcctcagagagcagcagaggcccctcactcctgcacgctcctccaaggttgccaggacaagaagcctggagccagggagacaagggaatccgtgtccctgacccacagagcattcagggagagggcacaggcgggaccccgggcccagagccagagccaagagttcagccagaagtgggaacggtcagtcctggcatggactgggcagcccaggagggcagagggtgacccacgtccgggcccaatcacccactgcggagacgggtccccacgtgaggtgacaaggggctgggtgacatccaaggcccctcccacctgagttctgactgggggccgtatcccaggcccaacagccctgggacgaaggtgtgtggcaggaagcccccagccagtctgaaccctgggggcagtcccaggagccacccgccatgccacgacagcttccccacgccaggcagcatgcacccctccctctgggatcagcagactacaggcgtgtcctcggtgtcaggccacgggggccacacagagaccccgaggactccagagacgcaggcaggtggggcccagcccggaaaggcctgcgtgggctcactggagatgctgaccgcgtctgttttcctttcagccaaacccgagcaagggtcgtcggcatccaggcctgtgccggcttcacgtggcgggaagaccctctgcaagggggacaggcaggcccctccaggcccaccagcctggttcccgcggcccatttggtcagcttccccgccacgggcacctcgttcttccacaccctgtcctggtggggctgtccgggaagacacctaccctgtgggcactcagggtgtgcccagcccggccctggctcagggaggacctcagggttcctggagattcctgcagtggaactccatgccccgcctcccaacggacctggacgtagagggcccttggttccgccattatgatttcagacagagctgctgggtccgtgccatatcccaggaggaccagctggccccctgctggcaggctgaacaccctgcggagcgggtgagatcggctttcgctgcacccagcactgattccgaccagggcacccccttcagagctagggacgaacagcagtgtgctcccacctcagggccttgcctctgcggcctccacttggaaagttctcagttccctccaggcttctagaagcatctgggccagggctcatggctggataatttccctaggcttaacaacccaagcaagcttcgcatcctcgttttatttttggttaaacttatgaaaatgtattaagaaagagtgcagctcgagagagattcagagatggaacacaccagaccccagatcacaaagccaaccatgcccagcccctcccagcacccccagccccacgaccatcgttctgaattctgacgacaccgtgagcctgcctttgtacttcaaactcatggaaggataaccaccttcatgttttgaaataaatgtttcctgttgaaatga

SEQ ID NO: 7857 - DNA, 9805 bp, Homo sapiens
ggagagatcttgttccctgtaggaaactgggcatcgctgaggccctgagcatcccaggaggccgattgcacagagacctctggtcgctgaccccagtctgcctccacatccctggaatagcccatcatgggcccttcacccttggcaggtggaaaccattcaacctgctggggccggtgtgtccccatttcatggcattgggggacaacaggattctctgtctaggtcccactgtactcaagtccttgggaagacgcccacccctgcttgggacttgagactccagagactggagcagctgtgggccactgggtctggcccctttttccctgggggcggcggtggaatgggggctacgcagccagccagcatctgggagcccggcgagagcggttcaggtgttctccgaagccgcggcgtacagtgtgacctttagacaattctgtctcacaggatggacgtggtagaggtcgcgggcagttggtgggcacaagagcgagaggacatcattatgaaatacgaaaaggtacaagtcggtctgcttcttggagggaggcctcttccagtgtgccctggtcaaagggtcctgggctccctaggagcacagggcagggacgggtggccaatgcccccaggcccttgcaccctttaccttggacccctcaccaaggctccctctgggctacagggacaccgagctgggctgccagaggacaaggggcctaagccttttcgaagctacaacaacaacgtcgatcatttggggattgtacagtgagtcctctgcactcccctcacccctaaagcacctgtctcagctcagggatgggtttgcttttagaaaggcctttctgacgcaggacatgtctcaccaggtcgggtcaacctcctttccagggacagaactcctccctgactcccctgcaggtccagcccgaggttgttaggccagaggtgtggggcccatctagggagccggtgggaatggagactgggctaggtcaggcccctgggcactcagcagttctgtcggcaagtgagcacaagaggagcggggcagcctgagggtctggccctgtctacttggagacaaccccggtgagatgcaagggttatggccacagggtgaggggacgcctggcccagcctcagggctgttgtccagcaggtctctgagggcccacctgcccctgttctcccccattcccctagagctacagccctcactgtcccgtgaggggaaaaggcatggtgacaatgggggctgtagccctaggagaacgggggagaagatgggcagggccccgttctgggcatctcacggtgaggccagggaggcagcagggctcgcggctaaagacctgggtctggtgctgggaagggatctggggccgggtaagaggagcccagccagaagcccatccctcagggatcacaggatggagagacagaggatccctggggaggtagggcgggagggagctgacgagcggtgccacttctgaaacgcagggtgtgtggctcgggtgcagggagaggcaggtagatgctgggaggtcagaacctgcaagggccttggggctgtcaagtggggtgggcccctggtgcagccagagtacaccgggcaggtctcagggcaggctcccttgaccctggcggggggatgtggtcactccctgagggactcctgtcagggcccggtcgcccaccctgggcggcccccatcccatctcagggctaacctttctcagctccagcagaaagcaccacctcgagtccaggacgggcagccccattgggcagcctgaccgccccccacgccaggggccccagtaaccccggccaggctgtccctacactccttcttctcccaggtcctgcccctcctgggagtcagccccacaggaaggcccttgtcctcccttccctgtgccttctcctgggctgagccctgagctggaaagggacagagccagtcctttctgggggtcggcacccaggctggggccgctccaggccccgtgcagttcctcagctctgcctgggttgccttacagtgagacggagctgcctcctctgactgcgcgggaggcgaaggtaagagcctgatgcgtggaggggctggtccagggacgtagggactgggcgggtggtcagtgaggcagaggaagcagctggcctgagcggtggcgggtgagggcaacacgctgtcactgggaggggcagcagtccctgctggacctgaccccaggttgctgttcactttggcagtttgataaaattccaaaaggagaaccacagtcctggcttgggggtggctgcgcgcttgtgtcaggaccccacctagaggctgggacctaagactggtgtgtctgtggcctgaggatggtacatcccggggtcccaaagccagcccactggtgctcatttgctcaaaggctctcagcccttgaggtctgcccttccctggctccttccagctggctcccaccagggctccagagcccaagacccagcatccgcgggcggctctgggaagcctggcagctccgctaactccaacatgcctcatttgacagcaaattcggcgggagatcagccgaaagagcaagtgggtggatatgctgggagactgggagaaatacaaaagcagcagaaaggtaacgtgtggagggaggaagcactctctgcagagacaggggacaggcacccatggcttgtggcctggcaccatcagcctctcagagggtgggcggcacactgtcctcgcccagaggactgcaggcctggtcgccagatttcctgcctattcgtgcaagcgtcaccttgcagggagggaatctgaatctagggctgggactacccggagctcaaggctagggatgccctggtgacctgaaggaaggaaaaggttcagatcagagtttcgactctgagtgtccatccactctttcagtcctgggaagggagaccctgtcccagcttgatctcacctctactgaggaatcatggggccaaaaccaacaatttccagaatccccgggctctggtcctcactggggtcaccccgtggcctgtgacaccagattgttttctgcccacagctcatagatcgagcatacaagggaatgcccatgaacatccggggcccgatgtggtcagtcctcctgaacattgaggaaatgaagttgaaaaaccccggaagataccaggtacgctcagccagagcacaacaaacaggacaggccgtgtcggggcccaggtctccagctggagggaacgtcaagaccaccctggggagctgggggtgaaggtcagatgaacaccctgggcacagatggtgacacagtcaccacagacaaactcagctctggtgaccctccctggcttcagtaacaagccaaaatgcagctttctgcagaaggaaaccttccttctgtccttccttcccgaagtgctgactgtgggctgactgccactgggggcagggagtcttccatctgttctgagactgcttcctccgcttggccctgccctacagatcatgaaggagaagggcaagaggtcatctgagcacatccagcgcatcgaccgggacataagcgggacattaaggaagcatatgttcttcagggatcgatacggaaccaagtaagcctacgggagccacagggtcccagcagagatggggtgaatgagagggatgggggcttccccggagcagaagccagggtcacccaggagggatgacacagctgccaagagctctcccggcccagggagcagccggcaccatgaaccgagcacctccctggttccaagccctgggccagactggaacatgtggggccagaacccaggaggatcctgaggagatggaaggcagcaaacaaaatcatgcacaatggtgaagggtgctctccctgacccatggggacccatggtaggacccacgggagggtggcaggatagagggcccatgagcccccccaggcaacagtgacagcaccaaatgctgggagaattaggggtcctggaaactctcatccaggtccgctgggaacatgacatggcacagccacgttggcagccagttgggcagtggctcacaaagctcgatggacttgaaccacacatccccaaagtgtcacagatattgaacccactgatttggaaactgacatccacatgaaaccagcatgccaggttcactgcttgactcctcgtcactcacacacggagccttcggggacggccttcaacacgggaatggggagagcaaggctggtcctcccttcaaacggaagacccagtgagaaaagggaacgagccggtgatgcccgcacgaacgtgggtggatcctagatgcattttgctgagggacagaagccagacccaataagctaccacagtaggattcccattcctaggccattctggaaaaggccaaaccacagggactgagaagcagtctgggtggccaggggctgacggatcggggagaggctgggtgcataggggccaccctggagacttggaggatgaaggagtcgccccaggaggggctggagcggtggccgggagactctgcacattggtttggaaccgtggaggaactgtacacacacagactgaactggcgtgtgtgcaaactgaaaaaaaaaaaaaaatcattcagagtgaaaaggatcaggcaagtcactgtacaactgggctatttgcatgtcacagatgtggattttactgaaacatttcttcaagagtctcaggccctgaagagctcactgcttatctggtgaaacatctgaacctgaaatgggatttgctgttaggctttgtagacaaagtgaaattaacaacatctgcacaaaacaaaccaaagccccctttctctgtttcctaggcagcgggaactactccacatcctcctggcatatgaggagtataacccggtgagtattcccggcagtgaggttcccgggccatatttccatattgacaggagtgggtgtctggtgggggtgtcgttgcttcttttaaagttagtatttgtgacccaccaggatataggaggtaggatgtcagctcaccgctggcataaacctccaaggaagggggtggtctcaaggggtcaagctgagacacaaaggagtcagggcccggactcctggtgtcacctgggcctgaccaccacttctcagaacaagaaatgacgccctcctcctggggctgccccaaagcccaggagcttggcagcatcgcacacaggatggtgctatcagcagacattttggacaaggtgctgaagtgcctgatggacttggctcttgtcatgaaatgaatgtgcatcctgaggaagcctctttttcagaggaagcctctccttcagaggaagcctctccagtcacctctgccctctccaatgacatgagtcctcccaggtgacctcagccctcccaggtgatgtccttccatggtgactctggctcttgcaggaggtgggctactgcagggacctgagccacatcgccgccttgttcctcctctatcttcctgaggaggatgcattctgggcactggtgcagctgctggccagtgagaggcactccctgcagggtaagtgaacagctgccccggggacctcctgcagccagacctggggatggccaccctggccgggtgatcacagctttcagccaaggcaccctccttgtgtcgccagcttgttgggagactttaggatgtctctgctgagggtcccacaggagtccacggctgacccccaaagcccaaatcagacgcctctcatccccatcagcagagggcatctcatcctccccgtggccaccctctgtgtcctggagccacgccctccggctctgattctgtgcagctgactctcccctccctgagagtcctcctgccctccagctgcccgggctcctgctgccatcggtgcccacgaatgggccgaccaagcccaggtggcagcatctccccatcccctgttcccctggcccgaccccactaccaggagatgaccgggaagcccagcgcccacccagttccggccgccctgtcgtggcctgaaagtcaggcttgccctttttgcaccctggcccaggaggcctccaggggaacctccagccaggctccagggaatgttcccgccccacctccccagggtaaaggccgcatgttggggtcaccagatgggagggtgggagtagccttggggtttgggggcctctccagctgcccagctcttgcagctgatggctccacatcttgggggaaggctctgatttcatgatgggctgggggcttctcaggatttcacagcccaaatggcgggaccgtccaggggctccaagaccaacaggagcatgtggtagccacgtcacaatccaagaccatggggcatcaggtgagtttatggtcccctcagctcttcccagaggccctgcctcccgtggggctgtaggagcaggggggctggggcccctcgtggggctggtgactggctgagtcccagccagggcctgacctgggacgtcgggttctccatgggctgggagttggtttcctttcctgccctggaggagacagaggcacagggatgggggcccagctcccgcagagcagggcaaagggcagtgtgtccaccgggagtgtgggaaggtgacagtgttgtggggagctctggacaccgcccagtgttctgcactaggggaagggtcttcagagacccgagaagagggaggtttttagggcagcccagtggcctgagcacctctgttgcttccatcaggacaagaaagatctatgtgggcagtgttccccgttaggctgcctcatccggatattgattgacggggtaaggaggcatagggagaccctggctcagggaccttccttgccctgcagtgccctgcttccccagcccgggggtctggctcactcccagcccacaggaggctcaggcgggtccccaaaggacacacaagcaaaaccctctgcccaagaggggtcatcccagggcaatggctggggctcaggcccagcctcatgggcagactgggccaggacccgacttgagagggctcagggaagcctcaagccctgggcaagcccctctctccaggagccacatccccactcaaatgagtgccccccatgaggagcttcaagaccttgtctgacccagcgtcctggagggctcaggcgaccctcatggggaaggtcactgactctggagactgaagccccagtgtgcgcagctcgagccaccagccccagcctggaaggaccaggttctttcacacctgctgtccccacagatctctctcgggctcaccctgcgcctgtgggacgtgtatctggtagaaggcgaacaggcgttgatgccgataacaagaatcgcctttaaggttcagcagagtaagtctacgtgtgcccagcggggcctggggagccctggggtcagaccccgactggcccgagggcagcttcctcacactgtcctcatgatccgctgttctggcccagagggaggtccggccaggtgggctgggcaggacactgtgacaccgagcccatccctcacatgatccggacagggaagtgctcaccacactctcgactttcatctgggtccccagccacagtctcctgtgtatatctggacacctggggtggccacaaaaggatccggcaccgaccagtaggagactgaagtggccacggggtatgagctgtgaccattcccaggtaactcccctggcctgatatccaccctgtccctagagcgcctcacgaagacgtccaggtgtggcccgtgggcacgtttttgcaaccggttcgttgatacctgggccagggatgaggacactgtgctcaagcatcttagggcctctatgaagaaactaacaagaaagcagggggacctgccacccccaggtgggctccagtgccatgtcccctcccatgtcaccctctggggtagtcagtagtaggggagtgcccgggacccgcaaccctactacctgggccttcctcttcaccttttcttcctcctcttcctcctggactctaagaaagtacaggaggcccaccggtcctcagggcaggcgctcagtgcgtgtatactggacatgctgtgcacgcaggagggggatgtgggcaagaccctccaacaagccccctcccactttccacggtgtctccctctccccctcgcagggccctccaagttactagacgagcccagacccatttgtgggagaccccgcccctccctgcaagcacccacagcctcagagagcagcagaggcccctcactcctgcacgctcctccaaggttgccaggacaagaagcctggagccagggagacaagggaatccgtgtccctgacccacagagcattcagggagagggcccagagccagagccaagagttcagccagaagtgggaacggtcagtcctggcatggactgggcagcccaggagggcagagggtgacccacgtccgggcccaatcacccactgcggagacgggtccccacgtgaggtgacaaggggctgggtgacatccaaggcccctcccacctgagttctgactgggggccgtatcccaggcccaacagccctgggacgaaggtgtgtggcaggaagcccccagccagtctgaaccctgggggcagtcccaggagccacccgccatgccacgacagcttccccacgccaggcagcatgcacccctccctctgggatcagcagactacaggcgtgtcctcggtgtcaggccacgggggccacacagggaccccgaggactccgagatgcaggcaggtggggcccagcccggaaaggcctgcgtgggctcactggagatgctgaccgcgtctgttttcctttcagccaaacccgagcaagggtcgtcggcatccaggcctgtgccggcttcacgtggcgggaagaccctctgcaagggggacaggcaggcccctccaggcccaccagcccggttcccgcggcccatttggtcagcttccccgccacgggcacctcgttcttccacaccctgtcctggtggggctgtccgggaagacacctaccctgtgggcactcagggtgtgcccagcccggccctggctcagggaggacctcagggttcctggagattcctgcagtggaactccatgccccgcctcccaacggacctggacgtagagggcccttggttccgccattatgatttcagacagagctgctgggtccgtgccatatcccaggaggaccagctggccccctgctggcaggctgaacaccctgcggagcgggtgagatcggctttcgctgcacccagcactgattccgaccagggcacccccttcagagctagggacgaacagcagtgtgctcccacctcagggccttgcctctgcggcctccacttggaaagttctcagttccctccaggcttctagaagcatctgggccagggctcatggctggataatttccctaggcttaacaacccaagcaagcttcgcatcctcgttttatttttggttaaacttatgaaaatgtattaagaaagagtgcagctcgagagagattcagagatggaacacaccagaccccagatcacaaagccaaccatgcccagcccctcccagcacccccagccccacgaccatcgttttgaattctgacgacaccgtgagcctgcctttgtacttcaaactcatggaaggataaccaccttcatgttttgaaataaatgtttcctgttgaaatga

SEQ ID NO: 7858 - DNA, 9796 bp, Homo sapiens
ggagagatcttgttccctgtaggaaactgggcatcgctgaggccctgagcatcccaggaggccgattgcacagagacctctggtcgctgaccccagtctgcctccacatccctggaatagcccatcatgggcccttcacccttggcaggtggaaaccattcaacctgctggggccggtgtgtccccatttcatggcattgggggacaacaggattctctgtctaggtcccactgtactcaagtccttgggaagatgcccacccctgcttgggacttgagactccagagactggagcagctgtgggccactgggtctggcccctttttccctgggggcggcggtggaatgggggttacgcagccagccagcatctgggagcccggcgagagcggttcaggtgttctccgaagccgccgcgtacagtgtgacctttagacaattctgtctcacaggatggacgtggtagaggtcgcgggtagttggtgggcacaagagcgagaggacatcattatgaaatacgaaaaggtacaagtcggtctgcttcttggagggaggcctcttccagtgtgccctggtcaaagggtcctgggctccctaggagcacagggcagggacgggtggccaatgcccccaggcccttgcaaccctttaccttggacccctcaccaaggctccctctgggctacagggacaccaagctgggctgccagaggacaaggggcctaagccttttcgaagctacaacaacaacgtcgatcatttggggattgtacagtgagtcctctgcactcccctcacccctaaagcacctgtctcagctcagggatgggtttgcttttagaaaggcctttctgacgcaggacatgtctcaccaggtcgggtcaacctcctttccagggacagaactcctccctgactcccctgcaggtccagcccgaggttgttaggccagaggtgtggggcccatctagggagccggtgggaatggagactgggctaggtcaggcccctgggcgctcagcagttctgtcggcaagtgagcacaagaggagcggggcagcctgagggtctggccctgtctacttggagacaaacccggtgagatgcaagggttatggccacagggtgaggggactcctggcccagcctcagggctgttgtccagcaggtctctgagggcccacctgcccctgttctcccccattcccctagagctacagccctcactgtcccgtgaggggaaaaggcatggtgacaatgggggctgtagccctaggagaacggggggaagatgggcagggccccgttctgggcatctcacggtgaggccagggaggcagcagggctcgcggctaaagacctgggtctggtgctgggaagggatctggggccgggtaagaggagcccagccaggagcccatccctcagggatcacaggatggagagacagaggatccctggggaggtagggcgggagggagctgatgagccgtgccacttctgaaacgcagggtgtgtggctcgggtgcagggagaggcaggtggatgctgggaggtcagaatctgcaagggccttggggctgtcaagtggggtgggcccctggtgcagccagagtacaccgggcaggtctcagggcaggctcccttgaccctggtggggggatgtggtcactccctgagggactcctgtcagggcccggtcgcccaccctgggcggcccccatcccatctcagggctaacctttctcagctccagcagaaagcaccacctcgagtccaggacgggcagccccattgcgagctgaccgccccccacgccagggccccagtaaccccggccaggctgtccctacactccttcttctcccaggtcctgcccctcctgggaatcagccccacaggaaggcccttgtcctcccttccctgtgccttctcctgggctgagccctgagctggaaagggacagagccagtcctttctgggggtcggcacccaggctgggccgctccaggccccgtgcagttcctcagctctgcctgggttgccttacagtgagacggagctgcctcctctgactgcgcgggaggcgaaggtaagagcctgatgcgtggaggggctggtccagggacgtagggactgggcgggtggtcagtgaggcagaggaagcagctggcctgagcggtggcgggtgagggcaacacgctgtcactgggaggggcagcagtccctgctggacctgaccccaggttgctgttcactttggcagtttgataaaattccaaaaggagaaccacagtcctggcttgggggtggctgcgcgcttgtgtcaggaccccacctagaggctgggacctaagactggtgtgtctgtggcctgaggatggtacatcccggggtcccaaagccagcccactggtgctcatttgctcaaaggctctcagcccttgaggtctgcccttccctggctccttccagctggctcccaccagggctccagagcccaagacccagcatccgcgggcggctctgggaagcctggcagctccgctaactccaacatgcctcatttgacagcaaattcggcgggagatcagccgaaagagcaagtgggtggatatgctgggagactgggagaaatacaaaagcagcagaaaggtaacgtgtggagggaggaagcactctctgcagagacaggggacaggcacccatggctgtggcctggcaccatcagcctctcagagggtgggcggcacactgtcctcgcccagaggactgcaggcctggtcgccagatttcctgcctattcgtgcaagcgtcaccttgcagggagggaatctgaatctagggctgggactacccggagctcaaggctagggatgccctggggacctgaaggaaggaaaaggttcagatcagagtttcgactctgagtgtccatccactctttcagtcctgggaagggagaccctgtcccagcttgatctcacctctactgaggaatcatggggccaaaaccgacaatttccagaatccccgggctctggtcctcactggggtcaccccgtggcctgtgacaccagatcgttttctgcccacagctcatagatcgagcgtacaagggaatgcccatgaacatccggggcccgatgtggtcagtcctcctgaacattgaggaaatgaagttgaaaaaccccggaagataccaggtacgctcagccagagcacaacaaacaggacaggccgtgtcggggcccaggtctccagctggagggaacgtcaagaccaccctggggagctgggggtgaaggtcagatgaacaccctgggcacagatggtgacacagtcaccacagacaaactcagctctggtgaccctccctggcttcagtaacaagccaaaatgcagctttctgcagaaggaaaccttccttctgtccttccttcccgaagtgctgactgtgggctgactgccactgggggcagggagtcttccatctgttctgagactgcttcctcctcttggccctgccctacagatcatgaaggagaagggcaagaggtcatctgagcacatccagcgcatcgaccgggacataagcgggacattaaggaagcatatgttcttcagggatcgatacggaaccaagtaagcctatgggagccacagggtcccagcagagatggggtgaatgagagggatgggggcttccccggagcagaagccagggtcacccaggagggatgacacagctgccaagagctctcccggcccagggagcagccggcaccatgaaccgagcacctccctggttccaagccctgggccagactggaacatgtggggccagaacccaggaggatcctgaggagatggaaggcagcaaacaaaatcatgcacaatggtgaagggtgctctccctgacccatggggacccatggtaggacccacgggagggtggcaggatagagggcccatgagccccccccaggcaacagtgacagcaccaaatgctgggagaattaggggtcctggaaactctcatccaggtccgctgggaacatgacatggcacagccacgttggcagccagttgggcagtggctcacaaagctcgatggacttgaaccacacatccccaaagtgtcacagatattgaacccactgatttgcaaactgacatccacatgaaaccagcatgccaggttcactgcttgactcctcgtcactcacacacggagccttcggggacggccttcaacacggggatggggagagcaaggctggtcctcccttcaaacggaagacccagtgagaaaagggaacgagccggtgatgcctgcacgaacgtgggtggatcctagatgcattttgctgagggacagaagccagacccaataagctaccacagtaggattcccattcctaggccattctggaaaaggccaaaccacagggactgagaagcagtctgggtggccaggggctgacggatcggggagaggctggttgcataggggccaccctggagacttggaggatgaaggagtcgccccaggaggggctggagcggtggccgggagactctgcacatcggtttggaaccgtggaggaactgtacacccacagactgaactggcgtgtgtgcaaactgaaaaaaaaaatcattcagagtgaaaaggatcaggcaagtcactgtacaactgggctatttgcatgtcacagatgtggattttactgaaacatttcttcaagagtctcaggccctgaagagctcactgcttatctggtgaaacatctgaacctgaaatgggatttgctgttaggctttgtagacaaagtgaaattaacaacatctgcacaaaacaaaccaaagccccctttctctgtttcctaggcagcgggaactactccacatcctcctggcatatgaggagtataacccggtgagtattcccggcagtgaggttcccgggccatatttccatattgacaggagtgggtgtctggtgggggtgtcgttgcttcttttaaagttagtatttgtgacccaccaggatataggaggtaggatgtcagctcaccgctggcataaacctccaaggaagggggtggtctcaaggggtcaagctgagacacaaaggagtcagggcctggactcctggtgtcacctgggcctgaccaccacttctcagaacaagaaatgacgccctcctcctggggctgccccaaagcccaggagcttggcagcatcgcacacaggatggtgctatcagcagacattttggacaaggtgctgaagtgcctgatggacttggctcttgtcatgaaatgaatgtgcatcctgaggaagcctctttttcagaggaagcctctccttcagaggaagcctctccagtcacctctgccctctccaatgacatgagtcctcccaggtgacctcagccctcccaggtgatgtccttccatggtgactctggctcttgcaggaggtgggctactgcagggacctgagccacatcgccgccttgttcctcctctatcttcctgaggaggatgcattctgggcactggtgcagctgctggccagtgagaggcactccctgcagggtaagtgaacagctgccccggggacctcctgcagccagacctggggatggccaccctggccaggtgatcacagctttcagccaaggcaccctccttgtgtcgccagcttgttgggagactttagaatgtctctgctgagggtcccacaggagtccacggctgacccccaaagcccaaatcagacgcctgtcatccccatcagcagagggcatctcatcctccccgtggccaccctctgtgtcctggagccacgccctccggctctgattctgtgcagctgactctcccctccctgagagtcctcctgccctccagctgcccaggctcctgctgccatcggtgcccacgaatgggccgaccaagcccaggtggcagcatctccccatcccctgttccctggcccgaccccactaccaggagatgaccgggaagcccagcgcccacccagttccggccaccctgtcgtggcctgaaagtcaggcttgccctttttgcaccctggcccaggaggcctccaggggaacctccagccaggctccagggaatgttcccgccccacctccccagggtaaaggccgcatgttggggtcaccagatgggagggtgggaggccttggggtttgggggcctctccagctgcccagctcttgcagctgatggctccacatcttgggggaaggctctgatttcatgatgggctgggggcttctcaggatttcacagcccaaatggcgggaccgtccaggggctccaagaccaacaggagcatgtggtagccacgtcacaacccaagaccatggggcatcaggtgagtttatggtcccctcagctcttcccagaggccctgcctcccgtggggctgtaggagcaggggggctggagcctcgtggggctggtgactggctgagtcccagccagggcctgacctgggacgtcgggttctccatgggctgggagttggtttcctttcctgccctggaggagacagaggcacagggatgggggcccagctcccacagagcagggcaaagggcagtgtgtccaccgggagtgtgggaaggtgacagtgttgtggggagctctggacaccgcccagtgttctgcactaggggaagggtcttcagaggccctggaagagggaggtttttagggcagcccagtggcctgagcacctctgttgcttccatcaggacaagaaagatctatgtgggcagtgttccccgttaggctgcctcatccggatattgattgacggggtaaggaggcatagggagaccctggctcagggaccttccttgccctgcagtgccctgcttccccagcccgggggtctggctcactcccagcccacaggaggctcaggcgggtccccaaaggacacacaagcaaaaccctctgcccaaggggggtcatcccagggccatggctggggctcaggcccagcctcatgggcagactgggccaggacccgacttgagagggctcagggaagcctcaagccctgggcaagcccctctctccaggagccacatccccactcaaatgagtgccccccatgaggagcttcaagaccttgtctgacccagcgtcctggagggctcaggcgaccctcatggggaaggtcactgactctggagactgaagccccagtgtgcgcagctcgagccaccagccccagcctggaaggaccaggttctttcacacctgctgtccccacagatctctctcgggctcaccctgcgcctgtgggacgtgtatctggtagaaggcgaacaggcgttgatgccgataacaagaatcgcctttaaggttcagcagagtaagtctacgtgtgcccagcggggcctggggagccctggggtcagaccccgactggcccgagggcagcttcctcacactgtcctcatgatcctctgttctggcccagagggaggtctggccaggtgggctgggcaggacactgtgacaccgagcccatcccccacatgacccagatgaaagtcgagagtgtggtgagcacttccctgtccggatcgccccccagccacagtctcctgtgtatatctggacacctggggtggccacaaaaggatctggcaccgcccagtaggagactgaagtggccacgggatatgagctgtgaccattcccaggtaactcccctggcctgatatccaccctgtccctagagcgcctcacgaagacgtccaggtgtggcccgtgggcacgtttttgcaaccggttcgttgatacctgggccagggatgaggacactgtgctcaagcatcttagggcctctatgaagaaactaacaagaaagcagggggacctgccacccccaggtgggctccagtgccatgtcccctcccatgtcaccctctggggtagtcagtagtaggggagtgcccgggacccgcaaccctactacctgggccttcctcttcaccttttcttcctcctcttcctcctggactctaagaaagtacaggaggcccaccggtcctcagggcaggcgctcagtgcgtgtatactggacatgctgtgcacgcaggagggggatgtgggcaagaccctccaacaagccccctcccactttccacggtgtctccctctccccctcgcagggccctccaagttactagacgagcccagacccatttgtgggagaccccgcccctccctgcaagcacccacagcctcagagagcagcagaggcccctcactcctgcacgctcctccaaggttgccaggacaagaagcctggagccagggagacaagggaatccgtgtccctgacccacagagcattcagggagagggcccagagccagagccaagagttcagccagaagtgggaacggtcagtcctggcatggactgggcagcccaggagggcagagggtgacccacgtccgggcccaatcacccactgcggagacgggtccccacgtgaggtgacaaggggctgggtgacatccaaggcccctcccacctgagttctgactgggggccgtatcccaggcccaacagccctgggacgaaggtgtgtggcaggaagcccccagccagtctgaaccctgggggcagtcccaggagccacccgccatgccacgacagcttccccacgccaggcagcatgcacccctccctctgggatcagcagactacaggcgtgtcctcggtgtcaggccacgggggccacacagggaccccgaggactccgagatgcaggcaggtggggcccagcccggaaaggcctgcgtgggctcactggagatgctgaccgcgtctgttttcctttcagccaaacccgagcaagggtcgtcggcatccaggcctgtgccggcttcacgtggcgggaagaccctctgcaagggggacaggcaggcccctccaggcccaccagcccggttcccgcggcccatttggtcagcttccccgccacgggcacctcgttcttccacaccctgtcctggtggggctgtccgggaagacacctaccctgtgggcactcagggtgtgcccagcccggccctggctcagggaggacctcagggttcctggagattcctgcagtggaactccatgccccgcctcccaacggacctggacgtagaggggccttggttccgccattatgatttcagacagagctgctgggtccgtgccatatcccaggaggaccagctggccccctgctggcaggctgaacaccctgcggagcgggtgtgagatcggctttcgctgcacccagcactgattccgaccagggcacccccttcagagctagggacgaacagcagtgtgctcccacctcagggccttgcctctgcggcctccacttggaaagttctcagttccctccaggcttctagaagcatctgggccagggctcatggctggataatttccctaggcttaacaacccaagcaagcttcgcgtcctcgttttatttttggttaaacttatgaatatgtattaagaaagagtgcagcttgagagacattcagagatggaacacaccagaccccagatcacaaagccaaccatgcccagcccctcccagcaccccaagccccacgaccatcgttctgaattctgacgacaccgtgagcctgcctttgtactttaaactcatggaaggataactaccttcacgttttgaaataaatgtttcctgttgaaatg

SEQ ID NO: 7859 - DNA, 9404 bp, Homo sapiens
acagtgtgacctttagacaattctgtctcacaggatggacgtggtagaggtcgcgggcagttggtgggcacaagagcgagaggacatcattatgaaatacgaaaaggtacaagtcggtctgcttcttggagggaggcctcttccagtgtgccctggtcaaagggtcctgggctccctaggagcacagggcagggacgggtggccaatgcccccaggcccttgcaccctttaccttggacccctcaccaaggctccctctgggctacagggacaccgagctgggctgccagaggacaaggggcctaagccttttcgaagctacaacaacaacgtcgatcatttggggattgtacagtgagtcctctgcactcccctcacccctaaagcacctgtctcagctcagggatgggtttgcttttagaaaggcctttctgacgcaggacatgtctcaccaggtcgggtcaacctcctttccagggacagaactcctccctgactcccctgcaggtccagcccgaggttgttaggccagaggtgtggggcccatctagggagccggtgggaatggagactgggctaggtcaggcccctgggcgctcagcagttctgtcggcaagtgagcacaagaggagcggggcagcctgagggtctggccctgtctacttggagacaaccccggtgagatgcaagggttatggccacagggtgaggggacgcctggcccagcctcagggctgttgtccagcaggtctctgagggcccacctgcccctgttctcccccattcccctagagctacagccctcactgtcccgtgaggggaaaaggcatggtgacaatgggggctgtagccctaggagaacgggggagaagatgggcagggccccgttctgggcatctcacggtgaggccagggaggcagcagggctcgcggctaaagacctgggtctggtgctgggaagggatctggggccgggtaagaggagcccagccaggagcccatccctcagggatcacaggatggagagacagaggatccctggggaggtagggcgggagggagctgacgagccgtgccacttctgaaacgcagggtgtgtggcccgggtgcagggagaggcaggtggatgctgggaggtcataacctgcaagggccttggggctgtcaagtggggtgggcccctggtgcagccagagtacaccgggcaggtctcatggcaggctcccttgaccctggcggggggatgtggtcactccctgagggactcctgtcagggcccggtcgcccaccctgggcggcccccatcccatctcaggctaacctttctcagctccagcagaaagcaccacctcgagtccaggacgggcagccccattgggcagcctgaccgccccccacgccaggggccccagtaaccccggccaggctgtccctacactccttcttctcccaggtcctgcccctcctgggagtcagccccacaggaaggcccttgtcctcccttccctgtgccttctcctgggctgagccctgagctggaaagggacagagccagtcctttctgggggtcggcacccaggctggggccgctccaggccccgtgcagttcctcagctctgcctgggttgccttacagtgagacggagctgcctcctctgactgcgcgggaggcgaaggtaagagcctgatgcgtggaggggctggtccagggacgtagggactgggcgggtggtcagtgaggcagaggaagcagctggcctgagcggtggcgggtgagggcaacacgctgtcactgggaggggcagcagtccctgctggacctgaccccaggttgctgttcactttggcagtttgataaaattccaaaaggagaaccacagtcctggcttgggggtggctgcgcgcttgtgtcaggaccccacctagaggctgggacctaagactggtgtgtctgtggcctgaggatggtacatcccggggtcccaaagccagcccactggtgctcatttgctcaaaggctctcagcccttgaggtctgcccttccctggctccttccagctggctcccaccagggctccagagcccaagacccagcatccgcgggcggctctgggaagcctggcagctccgctaactccaacatgcctcatttgacagcaaattcggcgggagatcagccgaaagagcaagtgggtggatatgctgggagactgggagaaatacaaaagcagcagaaaggtaacgtgtggagggaggaagcactctctgcagagacaggggacaggcacccatggctgtggcctggcaccatcagcctctcagagggtgggcggcacactgtcctcgcccagaggactgcaggcctggtcaccagatttcctgcctattcgtgcaagcgtcaccttgcagggagggaatctgaatctagggctgggactacccggagctcaaggctagggatgccctggtgacctgaaggaaggaaaaggttcagatcagagtttcgactctgagtgtccatccactctttcagtcctgggaagggagaccctgtcccagcttgatctcacctctactgaggaatcatggggccaaaaccgacaatttccagaatccccgggctctggtcctcactggggtcaccccgtggcctgtgacaccagatcgttttctgcccacagctcatagatcgagcgtacaagggaatgcccatgaacatccggggcccgatgtggtcagtcctcctgaacactgaggaaatgaagttgaaaaaccccggaagataccaggtacgctcagccagagcacaacaaacaggacaggccgtgtcggggcccaggtctccagctggagggaacgtcaagaccaccctggggagctgggggtgaaggtcagatgaacaccctgggcacagatggtgacacagtcaccacagacaaactcagctctggtgaccctccctggcttcagtaacaagccaaaatgcagctttctgcagaaggaaaccttccttctgtccttccttcccgaagtgctgactgtgggctgactgccactgggggcagggagtcttccatctgttctgagactgcttcctcctcttggccctgccctacagatcatgaaggagaagggcaagaggtcatctgagcacatccagcgcatcgaccgggacgtaagcgggacattaaggaagcatatattcttcagggatcgatacggaaccaagtaagcctacgggagccacagggtcccagcagagatggggtgaatgagagggatgggggcttccccggagcagaagccagggtcacccaggagggatgacacagctgccaagagctctcccggcccagggagcagccggcaccatgaaccgagcacctccctggttccaagccctgggccagactggaacatgtggggccagaacccaggaggatcctgaggagatggaaggcagcaaacaaaatcatgcacaatggtgaagggtgctctccctgacccatggggacccatggtaggacccacgggagggtggcaggatagagggcccatgagcccccgccaggcaacagtgacagcaccaaatgctgggagaattaggggtcctggaaactctcatccaggtccgctgggaacatgacatggcacagccacgttggcagcccgttgggcagtggctcacaaagctcgatggacttgaaccacacatccccaaagtgtcacagatattgaacccactgatttgcaaactgacatccacatgaaaccagcatgccaggttcactgcttgactcctcgtcactcacacacggagccttcggggacggccttcaacacggggatggggagagcaaggctggtcctcccttcaaacggaagacccagtgagaaaagggaacgagccggtgatgcccgcacgaacgtgggtggatcctagatgcattttgctgagggacagaagccagacccaataagctaccaccgtaggattcccattcctaggccattctggaaaaggccaaaccacagggactgagaagcagtctgggtggccaggggctgacggatcggggagaggctgggtgcataggggccaccctggagacttggaggatgaaggagtcgccccaggaggggctggagcggtggccgggagactctgcacatcggtttggaaccgtggaggaactgtacacccacagactgaactggcgtgtgtgcaaactgaaaaaaaaaaaaaaatcattcagagtgaaaaggatcaggcaagtcactgtacaactgggctatttgcatgtcacagatgtggattttactgaaacatttcttcaagagtctcaggccctgaagagctcactgcttatctggtgaaacatctgaacctgaaatgggatttgctgttaggctttgtagacaaagtgaaattaacaacatctgcacaaaacaaaccaaagccccctttctctgtttcctaggcagcgggaactactccacatcctcctggcatatgaggagtataacccggtgagtattcccggcagtgaggttcccgggccatatttccatattgacaggagtgggtgtctggtgggggtgtcgttgcttcttttaaagttagtatttgtgacccaccaggatataggaggtaggatgtcagctcaccgctggcataaacctccaaggaagggggtggtctcaaggggtcaagctgagacacaaaggagtcagggcctggactcctggtgtcacctgggcctgaccaccacttctcagaacaagaaatgacgccctcctcctggggctgccccaaagcccaggagcttggcagcatcgcacacaggatggtgctatcagcagacattttggacaaggtgctgaagtgcctgatggacttggctcttgtcatgaaatgaatgtgcatcctgaggaagcctctttttcagaggaagcctctccttcagaggaagcctctccagtcacctctgccctctccaatgacatgagtcctcccaggtgacctcagccctcccaggtgatgtccttccatggtgactctggctcttgcaggaggtgggctactgcagggacctgagccacatcgccgccttgttcctcctctatcttcctgaggaggatgcattctgggcactggtgcagctgctggccagtgagaggcactccctgcagggtaagtgaacagctgccccggggacctcctgcagccagacctggggatggccaccctggccaggtgatcacagctttcagccaaggcaccctccttgtgtcgccagcttgttgggagactttaggatgtctctgctgagggtcccacaggagtccacggctgacccccaaagcccaaatcagacgcctctcatccccatcagcagagggcatctcatcctccccgtggccaccctctgtgtcctggagccacgccctccggctctgattctgtgcagctgactctcccctccctgagagtcctcctgccctccagctgcccgggctcctgctgccatcggtgcccacgaacgggccgaccaagcccaggtggcagcatctccccatcccctgttccctggcccgaccccactaccaggagatgaccgggaagcccagcgcccacccagttccggccaccctgtcgtggcctgaaagtcaggcttgccctttttgcaccctggcccaggaggcctccaggggaacctccagccaggctccagggaatgttcccgccccacctccccagggtaaaggccgcatgttggggtcaccagatgggagggtgggaggccttggggtttgggggcctctccagctgcccagctcttgcagctgatggctccacatcttgggggaaggctctgatttcatgatgggctgggggcttctcaggatttcacagcccaaatggcgggaccgtccaggggctccaagaccaacaggagcatgtggtagccacgtcacaacccaagaccatggggcatcaggtgagtttatggtcccctcagctcttcccagaggccctgcctcccgtggggctgtaggagcaggggggctggagcccctcgtggggctggtgactggctgagtcccagccagggcctgacctgggacgtcgggttctccatgggctgggagttggtttcctttcctgccctggaggagacagaggcacagggatgggggcccagctcccgcagagcagggcaaagggcagtgtgtccaccgggagtgtgggaaggtgacagtgttgtggggagctctggacaccgcccagtgttctgcactaggggaagggtcttcagaggccctggaagagggaggtttttagggcagcccagtggcctgagcacctctgttgcttccatcaggacaagaaagatctatgtgggcagtgttccccgttaggctgcctcatccggatattgattgacggggtaaggaggcatagggagaccctggctcagggaccttccttgccctgcagtgccctgcttccccagcccgggggtctggctcactcccagcccacaggaggctcaggcgggtccccaaaggacacacaagcaaaaccctctgcccaaggggggtcatcccagggccatggctggggctcaggcccagcctcatgggcagactgggccaggacccgacttgagagggctcagggaagcctcaagccctgggcaagcccctctctccaggagccacatccccactcaaatgagtgccccccatgaggagcttcaagaccttgtctgacccagcgtcctggagggctcaggcgaccctcatggggaaggtcactgactctggagactgaagccccagtgtgcgcagctcgagccaccagccccagcctggaaggaccaggttctttcacacctgctgtccccacagatctctctcgggctcaccctgcgcctgtgggacgtgtatctggtagaaggcgaacaggcgttgatgccgataacaagaatcgcctttaaggttcagcagagtaagtctacgtgtgcccagcggggcctggggagccctggggtcagaccccgactggcccgagggcagcttcctcacactgtcctcatgatcctctgttctggcccagagggaggtctggccaggtgggctgggcaggacactgtgacaccgagcccatcccccacatgacccagatgaaagtcgagagtgtggtgagcacttccctgtccggatcgccccccagccacagtctcctgtatatatctggacacctggggtggccacaaaaggatccggcaccgcccagtaggagaatgaagtggccacggggtatgagctgtgaccattcccaggtaactcccctggcctgatatccaccctgtccatagagcgcctcacgaagacgtccaggtgtggcccgtgggcacgtttttgcaaccggttcgttgatacatgggccagggatgaggacactgtgctcaagcatcttagggcctctatgaagaaactaacaagaaagcagggggacctgccacccccaggtgggctccagtgccatgtcccctcccatgtcaccctctggggtagtcagtagtaggggagtgcccgggacccgcaaccctactacctgggccttcctcttcaccttttcttcctcctcttcctcctggactctaagaaagtacaggaggcccaccggtcctcagggcaggcgctcagtgcgtgtatactggacatgctgtgcacgcaggagggggatgtgggcaagaccctccaacaagccccctcccactttccacggtgtctccctctccccctcgcagggccctccaagttactagacgagcccagacccatttgtgggagaccccgcccctccctgcaagcacccacagcctcagagagcagcagaggcccctcactcctgcacgctcctccaaggttgccaggacaagaagcctggagccagggagacaagggaatccgtgtccctgacccacagagcattcagggagagggcacaggcgggaccccgggcccagagccagagccaagagttcagccagaagtgggaacggtcagtcctggcatggactgggcagcccaggagggcagagggtgacccacgtccgggcccaatcacccactgcggagacgggtccccacgtgaggtgacaaggggctgggtgacatccaaggcccctcccacctgagttctgactgggggccgtatcccaggcccaacagccctgggacgaaggtgtgtggcaggaagcccccagccagtctgaaccctgggggcagtcccaggagccacccgccatgccacgacagcttccccacgccaggcagcacgcacccctccctctgggatcagcagactacaggcgtgtcctcggtgtcaggccacgggggccacacagagaccccgaggactccagagacgcaggcaggtggggcccagcccggaaaggcctgcgtgggctcactggagatgctgaccgcgtctgttttcctttcagccaaacccgagcaagggtcgtcggcatccaggcctgtgccggcttcacgtggcgggaagaccctctgcaagggggacaggcaggcccctccaggcccaccagcccggttcccgcggcccatttggtcagcttccccgccacgggcacctcgttcttccacaccctgtcctggtggggctgtccgggaagacacctaccctgtgggcactcagggtgtgcccagcccggccctggctcagggaggacctcagggttcctggagattcctgcagtggaactccatgccccgcctcccaacggacctggacgtagagggcccttggttccgccattatgatttcagacagagctgctgggtccgtgccatatcccaggaggaccagctggccccctgctggcaggctgaacaccctgcggagcgggtgagatcggctttcgctgcacccagcactgattccgaccagggcacccccttcagagctagggacgaacagccgtgtgctcccacctcagggccttgcctctgcggcctccacttggaaagttctcagttccctccaggcttctagaagcatctgggccagggctcatggctggataatttccctaggcttaacaacccaagcaagcttcgcatcctcgttttatttttggttaaacttatgaaaatgtattaagaaagagtgcagctcgagagagattcagagatggaacacaccagaccccagatcacaaagccaaccatgcccagcccctcccagcacccccagccccacgaccatcgttctgaattctgacgacaccgtgagcctgcctttgtacttcaaactcatggaaggataaccaccttcatgttttgaaataaatgtttcctgttgaaatga

SEQ ID NO: 7860 - DNA, 940 bp, Homo sapiens
gagcagaagccaggatcacccaggagggatgacagagctgccaagagctctcctagcccagggagcagccggcaccatgaaccaagcacctccctggttccaagccctgggccaggctggaacatgtggggccagaacccaggaggatcctgaggagacagaagacagcaaacaaaatcatgcataatggtgaaaggtgctctccctgacccacggggacccatggtaggacccacgggagggtggcaggatggagagcccatgagcctccccaggcaacactgacagcaccaaatgctgggagaattaggggtcctggaaactctcatccaggtctgctgggaatatgacatggcacagccacgttggcagccagttgggcagtggctcacaaagctcaatggacttgaaccacacgtccccaaggtgtcacagatattgaacccactgatttgaaaactgacatccacatgaaacctgcatgccacgttcactgcttgattcctcatcagtcacacacgaagccttcggggatggccttcaacacgggaatggggagagacagtctggtcctcctttcaaacagaagacccagtgagaaaagggaatgagccagtgatgcccgcaggaatgtgggtggatcctagatgcattttgctaagggaaagaagccagacccaataagctaccacagtaggattcccattcctaggccattctggaaaagaccaaaccatagggactgagaagcagtctgggtggccaggggctgacggatcggggagaggctgggtgcataggggaaaccctggagatttgaaagatcaggagtcactccaggaggggctggagtggtggccgggagactctgcacactggtttggaaccgtggaggaactgtacacccaaagactgaactggcgtgtgtgcaaactgaaaa

SEQ ID NO: 7861 - DNA, 9804 bp, Homo sapiens
ggagagatcttgttccctgtaggaaactgggcatcgctgaggccctgagcatcccaggaggccgattgcacagagacctctggtcgctgaccccagtctgcctccacatccctggaatagcccatcatgggcccttcacccttggcaggtggaaaccattcaacctgctggggccggtgtgtccccatttcatggcattgggggacaacaggattctctgtctaggtcccactgtactcaagtccttgggaagatgcccacccctgcttgggacttgagactccagagactggagcagctgtgggccactgggtctggcccctttttccctgggggcggcggtggaatgggggttacgcagccagccagcatctgggagcccggcgagagcggttcaggtgttctccgaagccgccgcgtacagtgtgacctttagacaattctgtctcacaggatggacgtggtagaggtcgcgggtagttggtgggcacaagagcgagaggacatcattatgaaatacgaaaaggtacaagtcggtctgcttcttggagggaggcctcttccagtgtgccctggtcaaagggtcctgggctccctaggagcacagggcagggacgggtggccaatgcccccaggcccttgcaaccctttaccttggacccctcaccaaggctccctctgggctacagggacaccgagctgggctgccagaggacaaggggcctaagccttttcgaagctacaacaacaacgtcgatcatttggggattgtacagtgagtcctctgcactcccctcacccctaaagcacctgtctcagctcaggaatgggtttgcttttagaaaggcctttctgacgcaggacatgtctcaccaggtcgggtcaacctcctttccagggacagaactcctccctgactcccctgcaggtccagcccgaggttgttaggccagaggtgtggggcccatctagggagccggtgggaatggagactgggctaggtcaggcccctgggcgctcagcagttctgtcggcaagtgagcacaagaggagcggggcagcctgagggtctggccctgtctacttggagacaaccccggtgagatgcaagggttatggccacagggtgaggggacgcctggcccagcctcagggctgttgtccagcaggtctctgagggcccacctgcccctgttctcccccattcccctagagctacagccctcactgtcccgtgaggggaaaaggcatggtgacaatgggggctgtagccctaggagaacgggggagaagatgggcagggccccgttctgggcatctcacggtgaggccagggaggcagcagggctcgcggctaaagacctgggtctggtgctgggaagggatctggggccgggtaagaggagcccagccaggagcccatccctcagggatcacaggatggagagacagaggatccctggggaggtagggcgggagggagctgacgagccgtgccacttctgaaacgcagggtgtgtggctcgggtgcagggagaggcaggtggatgctgggaggtcagaacctgcaagggccttggggctgtcaagtggggtgggcccctggtgcagccagagtacaccgggcaggtctcagggcaggctcccttgaccctggcggggggatgtggtcactccctgagggactcctgtcagggcccggtcgcccaccctgggcggcccccatcccatctcagggctaacctttctcagctccagcagaaagcaccacctcgagtccaggacgggcagccccactgggcagcctgaccgccccccacgccaggggccccagtaaccccggccaggctgtccctacactccttcttctcccaggtcctgcccctcctgggagtcagccccacaggaaggcccttgtcctcccttccctgtgccttctcctgggctgagccctgagctggaaagggacagagccagtcctttctgggggtcggcacccaggctggggccgctccaggccccgtgcagttcctcagctctgcctgggttgccttacagtgagacggagctgcctcctctgactgcgcgggaggcgaaggtaagagcctgatgcgtggaggggctggtccagggacgtagggactgggcgggtggtcagtgaggcagaggaagcagctggcctgagcggtggcgggtgagggcaacacgctgtcactgggaggggcagcagtccctgctggacctgaccccaggttgctgttcactttggcagtttgataaaattccaaaaggagaaccacagtcctggcttgggggtggctgtgcgcttgtgtcaggaccccacctagaggctgggacctaagactggtgtgtctgtggcctgaggatggtacatcccggggtcccaaagccagcccactggtgctcatttgctcaaaggctctcagcccttgaggtctgcccttccctggctccttccagctggctcccaccagggctccagagcccaagacccagcatccgcgggcggctctgggaagcctggcagctccgctaactccaacatgcctcatttgacagcaaattcggcgggagatcagccgaaagagcaagtgggtggatatgctgggagactgggagaaatacaaaagcagcagaaaggtaacgtgtggagggaggaagcactctctgcagagacaggggacaggcaccaatggctgtggcctggcaccatcagcctctcagagggtgggcggcacactgtcctcgcccagaggactgcaggcctggtcgccagatttcctgcctattcgtgcaagcgtcaccttgcagggagggaatctgaatctagggctgggactacccggagctcaaggctagggatgccctggtgacctgaaggaaggaaaaggttcagatcagagtttcgactctgagtgtccatccactctttcagtcctgggaagggagaccctgtcccagcttgatctcacctctactgaggaatcatggggccaaaaccgacaatttccagaatccccgggctctggtcctcactggggtcaccccgtggcctgtgacaccagattgttttctgcccacagctcatagatcgagcgtacaagggaatgcccatgaacatccggggcccgatgtggtcagtcctcctgaacattgaggaaatgaagttgaaaaaccccggaagataccaggtacgctcagccagagcacaacaaacaggacaggccgtgtcggggcccaggtctccagctggagggaacgtcaagaccaccctggggagctgggggtgaaggtcagatgaacaccctgggcacagatggtgacacagtcaccacagacaaactcagctctggtgaccctccctggcttcagtaacaagccaaaatgcagctttctgcagaaggaaaccttccttctgtccttccttcccgaagtgctgactgtgggctgactgccactgggggcagggagtcttccatctgttctgagactgcttcctccgcttggccctgccctacagatcatgaaggagaagggcaagaggtcatctgagcacatccagcgcatcgaccgggacataagcgggacattaaggaagcatatgttcttcagggatcgatacggaaccaagtaagcctacgggagccacagggtcccagcagagatggggtgaatgagagggatgggggcttccccggagcagaagccagggtcacccaggagggatgacacagctgccaagagctctcccggcccagggagcagccggcaccatgaaccgagcacctccctggttccaagccctgggccagactggaacatgtggggccagaacccaggaggatcctgaggagatggaaggcagcaaacaaaatcatgcacaatggtgaagggtgctctccctgacccatggggacccatggtaggacccacgggagggtggcaggatagagggcccatgagcccccccaggcaacagtgacagcaccaaatgctgggagaattaggggtcctggaaactctcatccaggtccgctgggaacatgacatggcacagccacgttggcagccagttgggcagtggctcacaaagctcgatggacttgaaccacacatccccaaagtgtcacagatattgaacccactgatttggaaactgacatccacatgaaaccagcatgccaggttcactgcttgactcctcgtcactcacacacggagccttcggggacggccttcaacacgggaatggggagagcaaggctggtcctcccttcaaacggaagacccagtgagaaaagggaacgagccggtgatgcccgcacgaacgtgggtggatcctagatgcattttgctgagggacagaagccagacccaataagctaccaccgtaggattcccattcctaggccattctggaaaaggccaaaccacagggactgagaagcagtctgggtggccaggggctgacggatcggggagaggctgggtgcataggggccaccctggagacttggaggatgaaggagtcgccccaggaggggctggagcggtggccgggagactctgcacattggtttggaaccgtggaggaactgtacacacacagactgaactggcgtgtgtgcaaactgaaaaaaaaaaaaaaatcattcagagtgaaaaggatcaggcaagtcactgtacaactgggctatttgcatgtcacagatgtggattttactgaaacatttcttcaagagtctcaggccctgaagagctcactgcttatctggtgaaacatctgaacctgaaatgggatttgctgttaggctttgtagacaaagtgaaattaacaacatctgcacaaaacaaaccaaagccccctttctctgtttcctaggcagcgggaactactccacatcctcctggcatatgaggagtataacccggtgagtattcccggcagtgaggttcccgggccatatttccatattgacaggagtgggtgtctggtgggggtgtcgttgcttcttttaaagttagtatttgtgacccaccaggatataggaggtaggatgtcagctcaccgctggcataaacctccaaggaagggggtggtctcaaggggtcaagctgagacacaaaggagtcagggcccggactcctggtgtcacctgggcctgaccaccacttctcagaacaagaaatgacgccctcctcctggggctgccccaaagcccaggagcttggcagcatcgcacacaggatggtgctatcagcagacattttggacaaggtgctgaagtgcctgatggacttggctcttgtcatgaaatgaatgtgcatcctgaggaagcctctttttcagaggaagcctctccttcagaggaagcctctccagtcacctctgccctctccaatgacatgagtcctcccaggtgacctcagccctcccaggtgatgtccttccatggtgactctggctcttgcaggaggtgggctactgcagggacctgagccacatcgccgccttgttcctcctctattttcctgaggaggatgcattctgggcactggtgcagctgctggccagtgagaggcactccctgcagggtaagtgaacagctgccccggggacctcctgcagccagacctggggatggccaccctggccgggtgatcacagctttcagccaaggcaccctccttgtgtcgccagcttgttgggagactttaggatgtctctgctgagggtcccacaggagtccacggctgacccccaaagcccaaatcagacgcctctcatccccatcagcagagggcatctcatcctccccgtggccaccctctgtgtcctggagccacgccctccggctctgattctgtgcagctgactctcccctccctgagagtcctcctgccctccagctgcccgggctcctgctgccatcggtgcccacgaatgggccgaccaagcccaggtggcagcatctccccatcccctgttcccctggcccgaccccactaccaggagatgaccgggaagcccagcgcccacccagttccggccaccctgtcgtggcctgaaagtcaggcttgccctttttgcaccctggcccaggaggcctccaggggaacctccagccaggctccagggaatgttcccgccccacctccccagggtaaaggccgcatgttggggtcaccagatgggagggtgggagtagccttggggtttgggggcctctccagctgcccagctcttgcagctgatggctccacatcttgggggaaggctctgatttcatgatgggctgggggcttctcaggatttcacagcccaaatggcgggaccgtccaggggctccaagaccaacaggagcatgtggtagccacgtcacaatccaagaccatggggcatcaggtgagtttatggtcccctcagctcttcccagaggccctgcctcccgtggggctgtaggagcaggggggctggggcccctcgtggggctggtgactggctgagtcccagccagggcctgacctgggacgtcgggttctccatgggctgggagttggtttcctttcctgccctggaggagacagaggcacagggatgggggcccagctcccgcagagcagggcaaagggcagtgtgtccaccgggagtgtgggaaggtgacagtgttgtggggagctctggacaccgcccagtgttctgcactaggggaagggtcttcagaggccctggaagagggaggtttttagggcagcccagtggcctgagcacctctgttgcttccatcaggacaagaaagatctatgtgggcagtgttccccgttaggctgcctcatccggatattgattgacggggtaaggaggcatagggagaccctggctcagggaccttccttgccctgcagtgccctgcttccccagcccgggggtctggctcactcccagcccacaggaggctcaggcgggtccccaaaggacacacaagcaaaaccctctgcccaagaggggtcatcccagggcaatggctggggctcaggcccagcctcatgggcagactgggccaggacccgacttgagagggctcagggaagcctcaagccctgggcaagcccctctctccaggagccacatccccactcaaatgagtgccccccatgaggagcttcaagaccttgtctgacccagcgtcctggagggctcaggcgaccctcatggggaaggtcactgactctggagactgaagccccagtgtgcgcagctcgagccaccagccccagcctggaaggaccaggttctttcacacctgctgtccccacagatctctctcgggctcaccctgcgcctgtgggacgtgtatctggtagaaggcgaacaggcgttgatgccgataacaagaatcgcctttaaggttcagcagagtaagtctacgtgtgcccagcggggcctggggagccctggggtcagaccccgactggcccgagggcagcttcctcacactgtcctcatgatccgctgttctggcccagagggaggtccggccaggtgggctgggcaggacactgtgacaccgagcccatccctcacatgatccggacagggaagtgctcaccacactctcgactttcatctgggtccccagccacagtctcctgtgtatatctggacacctggggtggccacaaaaggatccggcaccgaccagtaggagactgaagtggccacggggtatgagctgtgaccattcccaggtaactcccctggcctgatatccaccctgtccctagagcgcctcacgaagacgtccaggtgtggcccgtgggcacgtttttgcaaccggttcgttgatacctgggccagggatgaggacactgtgctcaagcatcttagggcctctatgaagaaactaacaagaaagcagggggacctgccacccccaggtgggctccagtgccatgtcccctcccatgtcaccctctggggtagtcagtagtaggggagtgcccaggacccgcaaccctactacctgggccttcctcttcaccttttcttcctcctcttcctcctggactctaagaaagtacaggaggcccaccggtcctcagggcaggcgctcagtgcgtgtatactggacatgctgtgcacgcaggagggggatgtgggcaagaccctccaacaagccccctcccactttccacggtgtctccctctccccctcgcagggccctccaagttactagacgagcccagacccatttgtgggagaccccgcccctccctgcaagcacccacagcctcagagagcagcagaggcccctcactcctgcacgctcctccaaggttgccaggacaagaagcctggagccagggagacaagggaatccgtgtccctgacccacagagcattcagggagagggcccagagccagagccaagagttcagccagaagtgggaacggtcagtcctggcatggactgggcagcccaggagggcagagggtgacccacgtccgggcccaatcacccactgcggagacgggtccccacgtgaggtgacaaggggctgggtgacatccaaggcccctcccacctgagttctgactgggggccgtatcccaggcccaacagccctgggacgaaggtgtgtggcaggaagcccccagccagtctgaaccctgggggcagtcccaggagccacccgccatgccacgacagcttccccacgccaggcagcatgcacccctccctctgggatcagcagactacaggcgtgtcctcggtgtcaggccacgggggccacacagggaccccgaggactccgagatgcaggcaggtggggcccagcccggaaaggcctgcgtgggctcactggagatgctgaccgcgtctgttttcctttcagccaaacccgagcaagggtcgtcggcatccaggcctgtgccggcttcacgtggcgggaagaccctctgcaagggggacaggcaggcccctccaggcccaccagcccggttcccgcggcccatttggtcagcttccccgccacgggcacctcgttcttccacaccctgtcctggtggggctgtccgggaagacacctaccctgtgggcactcagggtgtgcccagcccggccctggctcagggaggacctcagggttcctggagattcctgcagtggaactccatgccccgcctcccaacggacctggacgtagagggcccttggttccgccattatgatttcagacagagctgctgggtccgtgccatatcccaggaggaccagctggccccctgctggcaggctgaacaccctgcggagcgggtgagatcggctttcgctgcacccagcactgattccgaccagggcacccccttcagagctagggacgaacagcagtatgctcccacctcagggccttgcctctgcggcctccacttggaaagttctcagttccctccaggcttctagaagcatctgggccagggctcatggctggataatttccctaggcttaacaacccaagcaagcttcgcgtcctcgttttatttttggttaaacttatgaaaatgtattaagaaagagtgcagctcgagagagattcagagatggaacacaccagaccccagatcacaaagccaaccatgcccagcccctcccagcacccccagccccacgaccatcgttctgaattctgacgacaccgtgagcctgcctttgtactttaaactcatggaaggataactaccttcacgttttgaaataaatgtttcctgttgaaatg

SEQ ID NO: 7862 - DNA, 529 bp, Homo sapiens
gggcttccccggagcagaagccagggtcacccaggagggatgacacagctgccaagagctctcccggcccagggagcagccggcaccatgaaccgagcacctccctggttccaagccctgggccagactggaacatgtggggccagaacccaggaggatcctgaggagatggaaggcagcaaacaaaatcatgcacaatggtgaagggtgctctccctgacccatggggacccatggtaggacccacgggagggtggcaggatagagggcccatgagccccccccaggcaacagtgacagcaccaaatgctgggagaattaggggtcctggaaactctcatccaggtccgctgggaacatgacatggcacagccacgttggcagcccgttgggcagtggctcacaaagctcgatggacttgaaccacacatccccaaagtgtcacagatattgaacccactgatttgcaaactgacatccacatgaaaccagcatgccaggttcactgcttgactcctcgtcactcaca

SEQ ID NO: 7863 - DNA, 358 bp, Homo sapiens
aagagcaagtgggtggatatgctgggagactgggagaaatacaaaagcagcagaaaggtaacgtgtggagggaggaagcactctctgcagagacaggggacaggcacccatggctgtggcctggcaccatcagcctctcagagggtgggcggcacactgtcctcgcccagaggactgcaggcctggtcgccagatttcctgcctattcgtgcaagcgtcaccttgcagggagggaatctgaatctagggctgggactacccggagctcaaggctagggatgccctggggacctgaaggaaggaaaaggttcagatcagagtttcgactctgagtgtccatccactctttcagtcctgg

SEQ ID NO: 7864 - DNA, 297 bp, Homo sapiens
acacctacaaaaacagcagaaaggtaatgtgtggagggaggaagcactctctgcagagacaggggacaggcacccatggctgtggcctggcgccgtcagcctctcagagggtgggtggcacgctgtcctcgcccagaggactgcaggcctggtcgccagatttcctgcctactcgtgcaagcgtcaccttgctgggagggaatctgaatctagggctgggactacccggagctcaaggctagggatgccctggtgacctgaaggaaggaaaaggttcagatcagagtttcgactctg

SEQ ID NO: 7865 - DNA, 371 bp, Homo sapiens
ctattatctaaggttatgaaggctagaattatcccatttttgcctaacttctcgtacctgtcccaagatcccaccttggactcaccctctgccttcagctcacgtctcttcagcttcctccacatggtccagcaaacacacacctgggctgaatggtagagctgattgctcatacacaaaggtagaccggtgggcagggattttcagacttacacagtcaatgagttttccttggtgttctggagagcaccgtttgagaaacactttgacagtgaatctaggcctcaagatccatcagctgctctagcttgaattttgctcaagctcagtgaacacctgctctgccgggtgcacgtgaaaggggcaaggat

SEQ ID NO: 7866 - DNA, 371 bp, Homo sapiens; identical to SEQ ID NO: 7865

SEQ ID NO: 7867 - DNA, 243 bp, Homo sapiens
tagagccactggtacagatccactgacggtcctcagaacacctctgtgccctaagctgggtcctgatggtcgctgtgggccccactgaacacacatggtcccttgtccgggggagcctgctgcccttgggcagctgtggaaaatgaaggagccctggagggctggctgaggggagactatcttcccttgtgttcaaaggggtccgggcactagggttctccccaggtatttcttgctctgcgt

SEQ ID NO: 7868 - DNA, 243 bp, Homo sapiens; identical to SEQ ID NO: 7867

SEQ ID NO: 7869 - DNA, 371 bp, Homo sapiens
ctattatctaaggttatgaaggctagaattatcccatttttgcctaacttctcgtacctgtcccaagatcccaccttggactcaccctctgccttcagctcatgtctcttcagcttcctccacatggtccagcaaacacacacctgggctgaatggtagagctgattgctcatacacaaaggtagaccggtgggcagggattttcagacttatagagtaaatgagttttccttggtgttctggagagcaccgtttgagaaacactttgacagtgaatctaggcctcaagatccatcagctgctctagcttgaattttgctcaagctcagtgaacacctgctctgccgggtgcacgtgaaagggacaaggat

SEQ ID NO: 7870 - DNA, 371 bp, Homo sapiens
ctattatctaaggttatgaaggctagaattatcccatttttgcctaacttctcgtacctgtcccaagatcccaccttggactcaccctctgccttcagctcacgtctcttcagcttcctccacatggtccagcaaacacacacctgggctgaatggtagagctgatcgctcatacacaaaggtagaccggtgggcagggattttcagacttacacagtcaatgagttttccttggtgttctggagagcaccgtttgagaaacactttgacagtgaatctaggcctcaagatccatcagctgctctagcttgaattttgctcaagctcagtgaacacctgctctgccgggtgcacgtgaaaggggcaaggat

SEQ ID NO: 7871 - DNA, 527 bp, Homo sapiens
tatttgcatgtcacagatgtggattttactgaaacatttcttcaataatctcaggccctgaaagttcactgcttatctggtgaatcatctgaacctgaaatgggatttgtttttaggatttgtagacaaagtgaaactaacagcatctgcacaaaccaaaccctagccccctttctctgtttcctaggcagcgggaactattctacatccttgtggcatattcagagtataacccggtgagtattcccggcagtgaggttcctgggccatatttccatattcacaggagtgggtgtctgatgggggtgtcgttgcttcttttaaagttagtatttgtgacccaccaggatataggaggtaggattccaggtcactgctggcataaacctccaagcaagggggtggtctcaaggggtcaagctgagacacaaaggacttggggcctggactcctggtgtcacctgggcctgtcacctgggcacttctcagaacaagaaatgacaccctcctcctggggctgccccaaa

SEQ ID NO: 7872 - DNA, 639 bp, Homo sapiens
gtcactccctgagggactcctgtcagggcccggtcgcccaccctgggtggcccccatcccatctcagggctaacctttctcagctccagcagaaagcaccaccttgagtccaggacgcgcagccccattgtgcagcctgaccaccccccatgccagggccccagtaaccccagccaggctgtccctgcactccttctcccaggtcctgcccctcctgggagtcagccccacaggaaggtccttgtcctcccttccctgtgacttctcctgggctgagccctgagctggatagggacagtgccagtcctttctgggggtcggctcccaggcttgggtggctccaggccctgtgcaggtcctcagctctgcctgagttgccttacagtgagacggagctgcctcctgtgactgcacgggaggcaaaggtaagagcctgatgcatggaggggctggtccagggacgtagggactgggcgggtggtcagtgaggcagaggaagcagctggcctgggcggtggcgggtgagggcaacacgctgtcactgggaggggcagcagagacctgaccccagttgctgtaactttggcagtttgataaaattccaaagtgagaaccacagtcctggcttgggggtggctg

SEQ ID NO: 7873 - DNA, 371 bp, Homo sapiens; identical to SEQ ID NO: 7869

SEQ ID NO: 7874 - DNA, 243 bp, Homo sapiens; identical to SEQ ID NO: 7867

SEQ ID NO: 7875 - DNA, 2500 bp, Homo sapiens
ttaaaactttcttctactttctccaagttaccttttgtttttatgagtttaatgcttagctaattaattttcagtctttcttcttaactaaatattctaatattttatctgcatatgaaacatgtttatccctaatgtttcatatgtggtaatttcattattcagttctaaatattttctaatttccataacaagtcttctttgactcaattattcagaggtataattttttcaaatatataaaaagggatttttttcatttctctttttctattgacttctaattttttcacagtgtaaacacagaatatatatagtctgtaatgatatagatttaaaactctaaaattttttaaatttctatcaaagtaatagttcacagtttaaaatacgtaagctccaggccctgctcaacactaggccctactccccacaccctgcccctagaagcaatcaatttcaaactctgtgacttctaaatgtcttgcttacacagctattttttcttttcctttctttgagacagtcttgctctgtcgcccaggctcgagggcagtggtacaatcacggctcactgcagccttcaattcctgggcaagcaatcctcccacctcagcctcccaaagtgttgggattacaggcatgagccacgaccacggcctatttcttcatttttcaactttagacattttctcttcactgtagaaagtcatgctttagctaatccatcccccactccaatatcttttacaaagaatcaaattttctatgaccttgcaaatctgaaaatatttttactccgaaattcaaagttgggctaagcatgcaatcttaggttgaaaatcagattcactttgtattttgaatgaacagcttcattagagtctaagtttccactgttcctaatggtaagtctaggactattctgattcctaaattttaaaggtagtatgccacctgccttccctcctattgccccctatcccagacaggaactttctgggagttttactttatcgcagaagttctaaaatttcagtcagtgtggcaatttttacattttttaagctagtctctctcaatggtgtacctttgcaaactgaaggctcctgctctatcagttcaaggaaatgttcctgtctttttgagtttctcttctggccgggcacagtggcacacgcctgtaatccctagcactttgagaggccgaagtgggcacatcacctaaggtccggagttcgagaccagcctggccaacatggtgaaaccccaactctactaaaaatacaaaaatcagctgggcgtggtggtgtgtgcctgtaatctcagctacccaggaggctgaggcaggagaatcactggaacccacgaggtggaggctgtggtgagccgagattgcaccactgcactccagcctgggtgacagagcaagattctgttgcaaaaatgaaaattaaaaaatcctcttcccatttcctctgctttctgttttactagatagatgttggttctgctggactggttctcaaatctatttttctgttttctatctgttttttctactgcttggaagtttcctcaacttcatctttaacacttttactgggttttttatacctatcataatttccaagttttcctgctgtaattcttcctatctgatggcattctgtcctgtccttgtttaatgcacgcaatgctttctcttaactctctaaggatagtaattagctatgggtttgttttttttttaactttctttagatttgtctttgctttttccaacttcctttatttctattatacttataattttgctttttgcccatctttcattagaaactttcggggggtgggctgcgcgcttgtgtcaggaccccacctagaggctgggacctaagactggtgtgtctgtggcctgaggatggtacatcccggggtcccaaagccagcccactggtgctcatttgctcaaaggctctcagcccttgaggtctgcccttccctggctccttccagctggctcccaccagggctccagagcccaagacccagcatccgcgggcggctctgggaagcctggcagctccgctaactccaacatgcctcatttgacagcaaattcggcgggagatcagccgaaagagcaagtgggtggatatgctgggagactgggagaaatacaaaagcagcagaaaggtaacgtgtggagggaggaagcactctctgcagagacaggggacaggcacccatggctgtggcctggcaccatcagcctctcagagggtgggcggcacactgtcctcgcccagaggactgcaggcctggtcgccagatttcctgcctattcgtgcaagcgtcaccttgcagggagggaatctgaatctagggctgggactacccggagctcaaggctagggatgccctggtgacctgaaggaaggaaaaggttcagatcagagtttcgactctgagtgtccatccactctttcagtcctgg

SEQ ID NO: 7876 - DNA, 103 bp, Homo sapiens
caggaggggctggagcggtggccgggagactctgcacatcggtttggaaccgtggaggaactgtacacccacagactgaactggcgtgtgtgcaaactgaaaa

SEQ ID NO: 7877 - DNA, 5617 bp, Homo sapiens
atcaggggatccccaaagaaagcaaggggaccaaggccgggactgctggggtgaaggtccgggaggctgagtaaggggacggaagggttagttctatgtattaaatgcctggggagggctgagaactggacacctgatttcggttactggccaccccagccccttcttggcgttcagattccctacgttggggtagggtggctatgggattggttggggacttcctgcttccttgcgctagggctgttggtgatgaccccgccacaaaatctagctcaactcactaggagtttgcagttcagagaggtcccacaagtaaatgccagagccacgactagaacccacgtagagaatctctctgcagtggctcacgcctgtaatcccagcactttgggaggccgaggcgcgcggattacttgaggtcaggatcgaaaattgcttgaaccccggaggcagaggttgcaatgagccaagatcgcgccactgcactccagcctgggcaacagagccagaaaaaaaaaaaaagaaaagaatatctctgtagaaatgatcagtcagcctcagatatgcagaaactacagaagtacagtgatagaactaaaggcattgcccaggtacctagggacctctgttccagccctgggctggacagagggatttggggatggggtcattgagctccttcctttgccccttctacttgatttcctgctcagtcattgcatctggtttgggtgaaagtctccttcctcattaaagacattcaatgaagaatgaaactttatccccgagctcaagggtaactaacaagagttctgcctttgtgtgaggtcccctgtcgaaacgacttgctgtagaacaatcctatgggggaagagtgaagaaactgaattctgagatcccaatgcctcctcgactgaagcaccaaaattaaaaatatttttagaggcaaagagcaaaattaagacagaactccaaattgaaagtcaggactctgtattctattttcagggacaagtcttgtgtaagtcctcactgtgaaattcaacttgtctttgtaaaatagaaaaccagatttttgtaacacctcccaatctgagtgacatgatgtccagagtgctttggggtcattttgtgttctggtgaataattcagaggtaccctctttcccctgatattgactgtccactgacatgtattccctttgccttcccaggcacaggccatggaaaggaatgacatcatcaacttcaaggctttggagaaagagctgcaggctgcactcactgctgatgagaagtacaaacgggagaatgctgccaagttacgggcagtggaacagagggtggcttcctatgaggagttcaggttggctcactgccatttttctcaggccctcctgttatggtggattatagtagttaactctgaaatcaaaccattctgggcttcagtcctggccccaccgtctactgtttgatcttatgcaatttccttaacttctctgagtctcaattatttatctgtagaacagtaactgttataattaaatgagttcttgcacataagactgagcaagtgtctgacacatgtgaggtgcttgaaagcagtcagctatcgctgttgttattattatggtcatattggtccgtaacaggtttatcctataccatgcaaagtctagctgcctcacacccacagacacagcattaagtccattgcctaatttctgtcctttgcctacaggggtattgtccttgcatcacatctgaagccactggagcggaaggataagatgggaggaaagagaactgtgccctggaactgtcacactattcagggaaggaccttccaggatgtggccactgaaatctccccggtaggtgaggccctgcccctttagtccagcaggattctctgccctaaagcttcaatcctgttttttcattttgttttgttttgttttgtttttttaaccacacatacctcttctttatttgtcatgttaaaccaacagagataggtttctgcctccaatcccagaaagaaaaacaaacagcagatggcaaagctgagttgaagtgggcagaatgagtcagaaagttgggctaggaaggtcggcttcccttagtcctttgactttcattctcagatcagaattgggatgctctgcctctgggttgtatggtgtctagtgtaatgatcctgtggcagtgttgagagagagaccccaacattcagatccttgagttcctttctctcttcctgagatttccaatcaacccatccacccgacttacagtaaaccctgacttactcttgaagaccagagctatgtctccattcatgagtaggaaaattccagtataaatgagaatctcaaatcatggcgtggattccttggggccctccctgtttcatccccagtttcctcatctgaaaatgaggccgccaaggaccacagctttcccagtgctcagacagtagtgagatgaagacagtaagatgaagagctacaggctcccctccctgtcactgttgcagaacagctggaagagctcctgactccctttccttcctttgtggtccaggagaaagcccccctccagcccgagacgtctgctgacttctatcgtgattggcgacgacacttgccaagtgggccagagcgctaccaggctctactgcagcttgggggtccaaggctcggctgcctcttccagacagatgtgggatttggacttcttggggagctgctggtggcactggctgatcacgtggggccggctgaccgggcagcggtgctggggatcctatgcagcctggcgagcactgggcgcttcaccctgaacctaagcctgctgagccgggcagagagagagagctgcaagggcttgtttcagaagctgcaagccatgggcaaccccagatccgtgaaggaggggctcagctgggaggagcagggtctggaggagcagtctggtgggctccaggaggaggagaggctcctgcaggagctgctggagctgtaccaggttgactgatgcggcaagctaccctcagaggtcccagtggtcactggaggcagttttttggttgttgtcttgggggttctgcaggaccataataagaaacccacacctggttcccttctcaacttggaattttcagagcaaaaacaggaatcaagtcttccccacttctccagtccctcagtgtctcgctgttttgaactgtgtgtatccatggacagtcaagagctcaggaagttgagagcggttttgtttcccacccttagagtctgccaagcctctagcccactggccttgagagatgagtgtgtgcccaaccaaatgctggctataccagttacagcctccactcataaaagggaaaaagcaaaatctttatggtaaacaaacactgatctccacagctcttaacaagaatgtttatagccccaaaccaatgaatggacatgtaatcaacaaatgatcaaatactacatcatttgaggtgttgaattttcccctagagactcagttcttgtgcaggttgggcctgggaaagtcccaagccatcagctcaggtccagccagcctcccggatggccagatatgcaggagggtgggtttccttcatcccccaggttgatgaaagacttttccaccaggctggcagggcagggcctggagcactgaggcagagatctccctgcccgagcacctcggcccgcccttctcattccggtttcctttgacccattcttgggtgagcgccagtgttctagaaaggggagtaaaggccaggttctagaatggctttccccccccaccctgagatcaggtctggaatgttagaagggcatcttgtacatccactgggaataaattgccttgcacttggcggcttcctctgcagattgttgctgcttttcctggctgcataatcctttcctcatctagaggcttccgcttagcagagctttctaggagccctatgagcctttaatgccctggttttgccctgcccctctgacccctgcctccttcaggtatgcacctggccctcaccactgtgctcctgtgggcatgggggctccaggcctttgaaattgtggagaaggaaaacatttttcagaggaccccctgccctgctttcctgatgtttgaaaatgcagcctacctggccgacatgagctttgagcttccctgtcactgcaaacccgaagaggtgccagctgtagtctggttctaccaaaagcacctaggtagcagccacaccaaagtgctgacggactttgatgggcgggtgctgacggaggcagcccaggtacgtgtgggcagcgacatgctgacccgcttcagcatccgcatgttcagcttgttggttttcagggctcagtctgaggactcaggcctgtacttctgcggcacccgcaagggggactacttttacgcctacgatgtggacatccagaacagtgagggaatggtggccactttccaggacaagggccaggagccctttgcagatgaatactatgggcacctccatgtcttcaccaccttctgggaatggaccccctgtgaccgctgcggagtgcgtggggagcagtggcgcatcggcctctgctacctgcagagcccagacctctccccacgctacctcaaggccgtgcccgatgtggtgtcttgtggctcaagggctgtgccaaggaagctgcggaccaaggccagggaccacacgcctgaggtgctggttcggagctgcttagtaccctgtgagaagacaaagaccatccgggagggcgtgctggccatcattaactatgtgtccaaagtgggcagccggccctgggtgccccaggtgcccattcagttccaccagcagagactgggccatggactcatcatctcctgtcctggggcccggccagagcatgcagtggcctgggacaaagaccgccagcacctctaccgcacacagtacctgaagggtgtcaacaggtccatgagggtgttcattgaccacggcaaccagctccacatccgcttcacccagctggatgaccggggcatctactattgctggaggcagggtgtgctagttgctggcttccggctgggtgtgacatctcatgggcactacccagcctcgttctcagatcctgagactcgctcggctgtggagctcaccctgataggctacctgctcatcacagcagtctttgtcaccattcacttctgtcgttgctgctgctacttatttcactgttgtcccagcttctccccctaggagctctcttcagctctgaagaccagttgtccttcaatgtgtttgttaaatgataccagatgtctctgggtgggtaccctgggttgggacaggtggtaggaacatgtggacaaatctgttacagcctgctccccattttcatgggcaggtctgggacctgatctgagaagtggaggggcctgaggctggtgggagattggggactgagctcaggatggaagtagggcacatgtgtttcctgacttcacatttaggtcagagaaggaaagtgtgaactcagatttatccagtggtaaacactgatcagtgttgaatcatg

SEQ ID NO: 7878 - DNA, 9875 bp, Homo sapiens
tggggaagggcgcagcatttgtctttatttttcctcagcgactaaaggcagcagcagtgccctgaagattagcagcagcagcagcagcaggtggcaggaaggagtggagggaaaggacaccaagtcttggggagagggaaggacccttcttcggccttagaggggagaggagaaccctgaagtgggccctcccagtcccatctctgggcacagatcccaccagtctgctcaccagtctgctcagtcaaagcagagtgggtgcactggggtggacgtgtcagccctgagcacccggcctccaggctgcaggaatatgagccagtgtcttcactttgctcgtgcctcagttttacaattgtaaaatagggcactacctagaatactgggtacattttgtgtgtgagtaagaagggaccgcaagaggcccttggcttagggaaaagcagccggtcactatggggtggagagggtcagacgtgtggcagtggcttactggggttaagaagcagcagtcccaggggctcagaggctggggcggcctggtatgacacagcaaggaagaggcctttagaaatgggacaaagtcatgccctgcccccatggatacatcccctttctctcctgtttcagcatcttcaagaggatgagtcacttccttaattcccacaatccagaggccaagtgcaactggtcacccacaacccctacttgtatgcctagcgccatcccaattgcctcctcctccatctctaccagcgtcccctccagtctgcacggggcagtcctcctgggcttgacctctctgtacccacagctgggggccaggcagcccccctctatccctcccagcacctcatccctctccacgtacacaacagatcccccaagtgctgagaatcaagctcccacctgcccacagcgtgcccacagatggcatccctggatggcagctcaggtggactgagacacttgagtcatcgctcaggaggtccttctgggatctgggcaggtgactgccccaggtggcaggacgtccccacccatcttagactgatcagggtcagtctaggagaacaaccctctgagctgggcatggtggctccaatctataatcccagctacacaggaggctgaggtgggtagactgcttgagcccaggagttcaaggtcagcctaggcagcatagggatatcccacctcataaaaaccaaaagacaaaacaagcctctggccagggctaccttgtctgtggggccttccctttcctgtctgagtctcagttttcctccagcagcctgaggaaactcaaaggcacagttcccagatactccgagagaacctccatctctggcaacagtttccataacaacaggaatcagggatgtggagggcgatgtagtaggtgccccccgccctcctccccttctctccttcctcctcattctaacgcaagctgctggccatgcccctccagactgccccttgggggtgagtttcttgttagttggagttgctgggtgctgggtgggtgccgtctggcaggcctgatactgacggagcctagggcagcaagctgacctagggacagaggagggaggggagcagctggggtggtggggagctcaggtctggggaaatgtgccagcagaggcggagcaactatcctgcttctgctcgggcccctcatgagacggggcagaggccaccaggtgggtcctgcctcacatcacatccttgtgctcctgcttggactccttaatgacctgcaggggacagggaacgtgcacagtgcaacagttaggagttcacacagaccccaggtccaccaccacgaggctgtgtaaccttgggaagtccccgacttcccaggtcttacttttcttgatagtaaccacagctgccttgcgtggtggacagagggggtggtgagataacactgggaaagcatttagcgtcatgcctggcgagtggtaagctgctggagtaagatgagctcccactgtggttggagtggcgtggcggatacgccaaatcccctcttcccattcccctggtagtttccttttaccaagctggaaatggaaagccctccccatccccaactgtgtctgctagagttggaagtgaaagctactaactttaattctctttctctccctggcaagcaaggcccccgagtttgagggtgagaaagagagagtgtgtattaggatcccatctagtggctttggtaccaaggctccccttagaacagcctatggagggactgaggaaacggaattacattcagtttccttgctctcctccagaattccctggggagctactgggagttgctgggaaccttctatgtgccagccccaggctttcctccatggcctggccttgagaatccctggggccagccagagcctgactgggcccaaatccctccttacctctccatcccgcatctccacggtcttcaccacgatgttcctcttgaggtggccttctgacacagacttggtgtccaggctggtttctgcagatgtggggagaggaggcctctcatggactttcagggcatgagcatcctctcccatgcccggcttccccatcgcacccccctccccatcatgagtatgagaacctatgcaaccgagcagagagagcctaggctcttccaaacgggctggagagcccccaaatcccaatagtgctgctgccagagtcctggctgctctgtcttctggcctggcttcatttcagcccctctgcaagccctggcctggcacctggctttctgaaaacccagcacggtattgaaatcaggagaccaggaggggtgcggtggctcacacctataatgccatcattttgggaggctgaggcaggtggatcacctgacgccaggagttcgagaccagcctggccaacatagtgaaacctctactaaaaatacaaaaaataggccaggcatggtggctcacacctgtaatcccagcactttgggaggccgaggcaggtggatcgcctgaggtcaggagtttgagaccagcctgactaatatggtgaaaccctgtctctactaaaaatacaaaaattagtcaggcatggtgacaggtgcctgtagtcccagctactcaggaggctgagagaggagaatcacttgaacctgggaggcggaggttgcagtaagctgcgatcgtgccactgcactccagcctgagcaacagagtaagactccgtcgaaagcaggcaagcaagcaagcaagcaagcaggaaagagaaaggaaggaaggaaggaaggaaggaagaaagaaagaaagaaagaaaaagaaagattagccaggtgtggtggctcgcacctgtaatccccttactcgggagtctgaggcacgagaattgcttgaacctgggaggtggaggttgcagtgagccaagattgcactactgcattccagcctgagtgacagagggacgctctgccgaaggaaggaaggaaagaaggaaggaaggaagaaaagaaggaaggaaggaaggaaggatcaggagaccagagctcaagaagtcccaacttagccaccaaccagccacatgactctgggcaagttaattgacctctcccagcctcagtttcctcatctgtaaaataaggatgatggggcctacttctctaggtgggagagaggagacaattaactaaaataaaggctgttaaacatgtggcacatattagtgctcaatacacataggtccctttcctgtcccctttcctctttcctacttctctctgccatttatctgtgctttagtgacctgtgactatctaggatttggcagtattacctctactagtcagcctggttagcctttctgatgctgaattaagtcctgagacatgcatatctagtggtcctaaatattctagtccagaagaagaggaattttgttccttagctaagaatcatttcagggccaatgcaagtaaaaagtaatttagctcccccctccccccgccccgcccgagagagaaaaatataacacgtcacattcactaatatttaacattaagagcagggaacataaaactttattcactgcaagagctgcggtcctgagggaagaatcctctgaactgagtcagcactgagctgagcgatggagcctcagggatgaaagaataaagcagagagcctggcgtccaggcacagcgagacccaaggggccctcccagtgacaggaagaggtgagacagaggctgctgcttgctcagaggccccagagcagctccactgcgcacccaaggactcaccacctttaccactaacaagctctgccagtttaatgtacagttactctgtaccacgtcctgggctgggcactgcagttcctgggaaaatgacgcagtccaggccctttaggggaagcctgggaagagggaactcagggggattgggaggatggggtgggtgaggctcactccctgtcaagctgggcaaagcgccgtgtctgagaggcaggcagctaaccgcgagccggcggcgttccatttacaatctggtgagcctgtattggtataactcgtattgtgaggcttttgagatatcttgtgaccttgtgattttccccgtctttggtgcttttgccccctgtagtgacaagcagttaaaaaaacaaaaacagaaaacactcagaagggcagtgcttgctcagggatctgcagacagggcagatgtcaagctctcacccagttctgctgtcgaatggggtgcagggaggggaagagggaccagggcctagcaggacaggggcagctgcaagccccacctagaagtaccctggtatgataggctctggctaggagcgctgcagtgtcacgaaggcccccagggagagctggatccctttgccctgatcctcagtcccagtctggagcaacctacaggccctggaggagggggcaggactccagtgcccttcccacgaggccctgctgtactgacctcgaatctgcaggttggagaaggtctgcacgggaatggtgatcctgaaagaaagcagagggagagggctgcccgggctgcctgggacacccctaggctgggtcttggtgcggggccatcatgacaacttgaacgcccttttccttgccaggaaagtctaactccatctcctagctttttccccagcagccaacgtgctatctggagttccaaacgtctgcaaggggcttgagtgttatctgggaggggcgcatgtctatctgaaggaagatggaaaagggaggggaaagtggtgaagaaagttccaaggaggcagaagagatgggtgaggtgaggagtccaatcttggctgggaagatggggagtatgcctcttagtttggagggtgacccaagtccttggccttgaggcctaatcaatattggttgaatccatccatccattcagtcatcaaacatctagtgactgcctgctatgtgtgaggcaggcactgtgctgggcattgaggtgggaagggatctgcacacaaggctgaaaaagactcagtccctgaagggagcaagatgagctctaccgtgaggcagcagggagacttccccaggggctgtgatgagggctcaccggttctcctcgccctctagcagcttcctgtaggtggcgatctcgatgtccagggccagcttgacattgagcaggtcctggtactcctgcaagtggcgggccatctcgtccttgaggctctgcccctcttcctccagccgcgccagcgcctcctgataactggccgcctcccgcacgtgccgctcctcctgctcgcgcatctgcctctccagggactcgttctgtgggatggagccggccggtcccgcggagccccgacccgacttggggaggtttcgaggcccggcccccggccccaggccccgcctctagcccgggggtaacgttcaggccccgccctcgacccaggtcctcgtccctggcccttctcccctggcatctcctggggtggccgtccctgctccgcccgtccccgtcctgccctggccgcgctcaccgtgccgcgcagagactccaggtcgcaggtcaaggactgcaactggcgccggtagtcgttggcttcgtgcttggcctggcggagcagctccgcgttgcgggcagcagcgtctgtcaggtctgcaaactaggtgggggacacatatggggggctgtgtgggcccatgggcaggcacgggctctgggaaatcagggaggtgagcagcaccccagttaaccccaggacgttggccctggctgggacttttcccaacaactgtgacccatggatgcgggcagggtagcgggctgccagacctcagcacctagcacaacacctggtcagcaagcgaatgaatgaacagtgccacagaatccagaaccttccacactgacagctgcatctgcgggactgaacgctgtcgtcttaggcgagcggaggcctgggtgttttgtgtgtttttgtttttttgttttttttgttttattttgagacagagtcttgctcttgtcgcccaggttggaagtcagtggcacaatcccgggtcactgcaacctctgcctcccaggttcaagcaattctcctgccccagccacctgagtagctgggattacaggcatgcgccactacacccggctgattttgtatttttagtagagacggggtttcaccatgttgaccaggctagtcttgaactgctgacctcaggtgatccgcatgcctcggcctcccaaagtgctgggattacaggtgtgagccacctcgcctggcctcaccctgggttctaatagccctttctcccctgcctgcagggaggtcctcccagccccatcgggccctcaccctgctcagacaccagtggcttctgccactcacactcctcagctaggtgccctggctaggctagcatcttggggccctgcctctctgtgcttttctgcctccaggctctgtcctccactaggaatggccctcccttcttctcttcctgtccacagcgtgcctgtcctgcctagcccaaatgccccctctacagtgtctttcctggctcccacactacatataagctctgagctgtggtgttctctacgggcactatgtttgggtgcacgtcaatatcacaccttccaggtcagacacctctctgtgtcctggggggtgcctggcatatggtagaggctcagtaacccaaaacagactggcagaggcatggaatgcaggctcccaagtgagatgtgctagagttggaaatccaactctaccacttaggagctgtgtgactttgagcaaattagttaacctctctggacttcggctctctcatctgtcaaagaacagcacctacttcatagtaaggtaatccatgaaaagcacagggcttagaacagaacagtatcagctactactaataatagcaatagtagcagtaataataatgggtacttttgaaagcaatagtgcctgtgtgaccctgggcaagccatctcacttctctggtgaaagtcagtcacctggagaggatattctcccagcttcctccaccctccttcccccattctcttgtacagagcaagaagggctgcctggaggaggcaggctggcccacaggcagggctaccttggagcggtaccactcttcggcttcatgcatgttgctggacgccattgcctcatactgcgtgcggatctctttcagggctgcggtgaggtctggcttggccacgtcaagctccacatggacctgctgtcgggccagctgctcctggagttcccgaacctcctgaccagggtgagagaagcggtaccagggctcagggtacaggccacagctggggttccccacgccattgtgtcctcttctgcctgcccctcggccaggagttcgaatgctctcttgtctctttccgtctcccttagtgtctttctgtttgtctttcatttcctgtctctacctgccaatctctgtttctctcctctctctgagtgtctctctcagtctcagcttctctgtctctgtctctccctctctcagttgcaatctctgtgttgagctttcctccctctgccctggcctcacctcctcgtggatcttcctcaagaaccggatctcctcctccagcgactcaatcttcctctccagatccagacgggccagggtggcttcatctgcttcctggagtggcaggaggggtgaggagtagagggccactgggggccccaggctccttctccccattcctcagccttgccttacccctccttctggggcagtggggagcagcacattgctctggcgggctgagcttgggggctgtgtttgggtgggtggccatcaatcctttcctccctcccctgcccctcccctccacctccctgacctgtctataggcagccaggttgttctcggcttccagcctcaggttggtttcatcctggagcctggagtggggggacacattcctgggtccaggctcttctgaggacacttgaatacctgcctcagtctcccttgaggcagctgtcacagagaccacccccacccaggaccagtagagcagcaggaggattaagggttggggggccttagacagaggacttgtctggaggatgagcagatgtgggcttttgccttaactcattactaaggtgccttatcagggttggtgcacctgcttctgctcacacaggcgcatccacaagcatacactcactgttgcacacacacacacacacacgcacatgtcctcctgcacttgaaggcacacatgcatgtcctgtcagctcagtgaagcgccatgcccctggggattcctctgatcccaggtaaccaccttttgaaatgaattttattatgaccaccgcttcacagctgtgcaagtcaaagtaacttgatgggggtcacaagctggtggcaggcagtcacctgtgctttgcgcccagacctgcctgctctttccctcactttcttcaccccagaatccaatctccctcatggacatcaaccttctccgcttccaactcctcctttatatggacacaggctcagaataggtgagctcgctgcccacagtcacaaagcccagccatgaatgaaacacaggggccccgctgctcctgcactgctttccccagtagggaggtgctgaggggaccctggactcctggcagaaggcatgcgggcatcagatccccggggccctgggcctgtttctggtccctcccatcatgttggggggcaaggatagtgccccatcaagaggtagggaggcccagggagcagggaggttcggcccctccctgagacttctcgggcactccttcttggggattcagccccttctgctcacaaggccccccttccccatcccctcctcacttctgcctcacagtggccaggtcctgtgccagattgtccctctcaacctccagccgggcgctgttggcggtgagttgatcgagccgcagccgcagctctcgcagctcagcctggtagacgtctgccagcttggtgggctccttggcccgcagctggttcagctcagcagccagcgccttgttttgctgttccaggaagcgaaccttctcgatgtagctggcaaagcggtcattgagctccatcatctctgcccgctcactggcccgggtctccttgaagccagcattgagtgccccagccagggagaaatccacccgggtcgggagtggagggggcattcgagccagggagaggcgggtgccaggacccagacggcggccaggagccaggccccccaccatcatctcccctgaggagacgtaggagcggcgagcagcggaggtgatgcgtctcctctccatcctgctctggctct

SEQ ID NO: 7879 - DNA, 3297 bp, Homo sapiens
gaaaaggactctctggaacatggcaacattaatctgaccacaagctgactggcaggtgctttaaccacaaggtgggcatcctaacgcgagcgaccgttttgaggcagaagcccgatggggcccgtgtccgagcttagggaggggccggagacgcaaacacaggtctcccaggaagcaggcggcgtcacaggtcgctctgcaggcgcccgctgcagcgggcggagtctggctggagagaggaggcgggcgtccgggaacgcccggaaggggcgaggccagcggcggggcggggcttatggagatcgtgagctgggcgtgaggagaaggccgggttgggagctgcgaggggccgggtttagcggggtgggcgtggccgtcgaggtggggctcggcgggtccgaaggaacctggggcagagctggaagaggaaaggtcttgggggccctgggcctgggtctgcgggagccccatctagcggggttccaaggcggcggcggcatcagtcgaggccctgctccgggagctcatcttgtcccctttcgcccctcacgccccccagctctgactccaggccctgtcccctgagctctgccctcggatgtccgaccgcccagagcctgcatgcgccgtggggcgccccaggaccaggagctggtgggtccggggccccctgggcgggggtcccggggcgcccctcctcccttgggacccgttgtcccggtcctggtctttcccccggatctagtattcagggcggaccagcggagcggaccccgacagctgctgaccctctataaccccacaggaactgcgcttcgcttccgaggtaaagggatcggcgcctcgtgggggctggtggccggacactggggggttgtgttggctggaggagtcagatgggtagggttgcacgtccagctttggtggactgggaaagtcatgtccagcctccggggcagaaggcagaggggacttaaatgacccacatggcagggcttgtctgtgtgtgtctctatcccccagtcctgtgcacagcacctgccaaatacacggtgtttgacgcagagggatatgtgaagccccagtcttgcattgacatgtgagtgagctgggagggtggggaggcttgtggaagccaggggtcgctgccacctgttgtctgaggtctgagaccttgccccctttaacctatttgccctatcctctgcctgtgcccctaagggagagacttctggggggaggcccagatttccttggattactgcctcattcaccccaatgggcttctctcctaccttgggaccagtgtgattcgccatgtggcacccattcccagccactatgatgtccaggaccgcttccgcattgagctgtctgaggaaggagctgagggccgagtggtgggacgcaaggacattacctccattctgagagccccagcgtacccccttgagcttcagggacagccagatccagcgcctcgcccagggcctcctgctgggacaccaccacccacggccagacacttccaggagcgtgagttgggagactgggatcttgagttctgtagggagggaggaactagcatttccctagagatgagataaattggatttgaagaagtctcctggttcagtcttttgtcttttggtggaaacattcctccgagttgagattttatatcaggtgagggggaaaagacttacagcttccctggtttctgacttctacttagaggaaaaagttcttccttgactgtaaccgcagtacttcctatcatgtggtagctcagttcagttcaataagaaacctgtattgagcaattaaccctgtaccaagttgtgtgctgggtatgagatcaagagaggtccctgcctgtcggataggtccacagaagagagaaaatgaatgctgagggactggaggagagagttcttgtggtggtggggacagaggctgtaggaaggagaggacacttgcagtgtacccctggagggcagtaaaaagtagatacagggtgtgatggctcacgcctataatcccagtgctttgggaggctgaggtgggctgataacctgaggccaggagttcaataccagcctgaccaacatgatggaaccccgtctctactaaaaacacacaaaaattagctgggagtggtggctcgcacctgtaatcccagctagtcgggaggctaaggcaggagaatcacttgaacctaggaggcagaggctgcagtgagtcaggattgtgtggctgcactccagcctgggtgcaacagagtgagactccgtctcaaaaaaaaaaaaaagtagatacagggtgtggtgactcacacctataatcccagtgctttgggaggctgaagtggtgggaggattgcaattgctcgaggccaggagttcaagatcagcttggacaacatagcaagaccatctacaaacaacttaaaaattagccgggcatggtagcatgaacccatagtcccagctacttaggaagctaaggcaggaggatcacctgaggccaagagttccagaccagcctggacaacgtagtgagactccatctctacaaaaaataaaagataattaaaaaaaaaaagtagatacatcttccttgttcaggcttctccctggaggacctgggctgggcaggagtgggggctgcagcatctgatgagtcttgtttctcagacccccgccagcaactggccaccagctccttcctcctcttcttgctgacggggattgtgtctgtggccttcctgctgctcccactcccggacgaactcggcagccagctgcctcaagtcctgcacgtctccctgggacaaaagttggtggccgcctacgtcttgggtgaggacagtagtggccagggacccaggccccaggaaaaagggagaagggacgggaggagagctaacagagccccagggctgcccatgcgaccctattctttctttgtcccccctccaggcctcctcaccatggtgttcctccggacctgagctccgtgctcaacccccagcccaccccaccctccctgggcagggtcttgaggcagccactgtgatgctcataccttaccttgcctcctaccctcttctctttcctgcctactccccactcctccctgacaaaaaacacccagggatttgtactcattttccaagttgaataaaatacatttttaaaatgataatcagaaatgtagggtacttgcccctgtcttcccacttcttttttggtactcagacatcctctagttctcccacccctgttcccaggggac

SEQ ID NO: 7880 - DNA, 434 bp, Homo sapiens
ttctctgagctgtagattctacctacaaaatgagagcattgggcaagttgattctcaagatccccttcagccctggaataggatcctgtccctaagccaatgtattaacctaaaaagaaatgaatgaaaataccacctaatcctgcctgcggtggaactcctgtcccaccatctggaggcaacaaagcctttcaccagggttacctgggtgtttacaacccctagaatccttttctgccttttggaccctatatctgttttcctgggtctttcctttaagacttcaactcccttggctgggcacagtggctcatgcctgtaatcccagcactttgcagggccgaggcgagtggatcacttgaggccaggagttcgagaccagcctggccaacatggtgaactcttgtctctaaaaatacaaaaaatacacccaa

SEQ ID NO: 7881 - DNA, 152 bp, Homo sapiens
acgcctataatcccagctactcgggaggctgagacaggagaatcgcttgaaccctggaggcggtggttgcagtgagccgagatcgtgccattgcactccagcctgggtgacagagcgagacttcgtctcaaaaaaaaaaaaaaaaaagcaaa

SEQ ID NO: 7882 - DNA, 1433 bp, Homo sapiens
tgctggggtctcaccctggggacacaggggagcctgagggacaacgggaaaagggcaaagtggagcagccgcaggaagaggacgggatgacctcagacccgggcctcctgagctacattgacaagctgtgttcccaggaagactttgtcaccaaggtgggcttgcctggagtgctgtggtctgtaggattccagggggtggcacttccaggtccttggaattaagctctgttccttagctactcagtagtatgtgtatttccatggatttgagtgtctgtgtatgtgactgtgtgtgtctgtgtgttgctgtgtgtttgtgtctgtgatttgttactgtgtctttgtgtgtctgtgtgggtgtgggtgtgagtctggagtgtgtatgttacctgtgtctgtcttttcctgtgttgtacatgggtctgtgtgtctgtgtgtggtttgtgtgtctctgtatgtgtgtatgctatgaggtctgtggtctgtgcgtgtagctggtggtcgccatgatatgaaacagccccaggagggtgggaatggggccctccctgctttctgcatctcctccgggtgtccttggctccaggttactccctccccaggaagttcacaccttcttccttctgtttccaggtggaggccgtcattcacccccgattcctggaagaattgctttccccagatccacagatggatttcttggccctaagccaggagctggagcaggaggaaggactcacccttgcccaggtagagcagcagagggaggggaacccaggtactccaggggcaggagggacccggcacacaaggcccacccgactgtctaagcccaccctgctggggatgttcagcttcttggggagccactccggggtgggaagatgcaggttcagagggagtaggatggagaggagccagggaggggagtcaggatgcaagctgcagtgaggcccaacgggatgcccggcagagcgacaccctctctctttgacatgaagcccagctgcctcaggcttccctgcctcccacccaagtgccctggtctccaccattctgggccctgctcacacctggggcagcgccagtaagtgccccctttccttccgcagctagtggagaagcgcctcctgtccttgaaggagaaagggtgcgggagggcagcccctcgacatggcacggccaggttggactcaagtccttctgagtttgcagctggccaagaagcagcgagagaggtccctgacccccaacaaagggtcagcgtggaaacctccccaccccagacggctgcccaggaccctcagggacagggcagagtgcgcactggcatggccaggtccgaagaccctgctgtgcttttgggatgtcaggactcccccaggctgaaggctgtccggccaacctctcctccccaggaccacagaccca

SEQ ID NO: 7883 - DNA, 550 bp, Homo sapiens
tggcaggacaggtgtggggaggacaggagccaggtgttgggaccaggtgggcccgggatggagggtgggcttacagactgggactgactgcactggtttacagcccagttctccgatccctggcccggcggaagcccaccatgacgctggaggagggactgtggcgggccatgcgggaatggcagcacacgagcaactttgaccggatgattttctacgagatggcggcaaagtgagtctggggtcctgggggcagggcccgtgtggcggggtgagagtgaatgacagaggcccggtggccgtggtggcttctcagcgtggagcatgaggagggtgtggacaaacacaggacgccctgggcccctggctccctcaggaagctgctcctgccacctagagtgctctggggtctctgtcccgccctcttgggaagcaccccctgcctggcctggggccaaccgctgccttgacactgggggtcatggcgggagcagccagcatcgcagcccaaagggggtctcctccagctgtggggatgggaagaaggggc

SEQ ID NO: 7884 - DNA, 694 bp, Homo sapiens
gcagtccatcttcggtgcaccatggaccctgtgatgatgactgtgtccccgcccccagctcaccgccatcgccgtcgaggctctcccacacgctgtgctcactgcccagtagcttgggctcctgacactgatgacgagaagcctcatcagtacccagccatctgctcctaccactgggatgtccctgaggactgggaaggcttccaacacactcaggggacctgggttccctggtctcaggatgccccagagtcccctccccagaccatccgcttccagcctaccgtagaggaaaggcccctcaaaacaggcatatggtccgagctgggcctaagggcctatgtgtatcctgtgaaccccccacctcccagccctgaggctcctagccacaagaacggtggggagggggcggtgcagaggcagaggcggctcagtaccagcctgtcccagctcccaccctgggcccagcagtcatccctgaattttcccggcaccgctcctcaggccgaatagtgtatgatgcccgggacatgagacggcggcttcgggaactgacccgggaggtggaggccctgtccggctgctaccccctagcctctggatccagcactgccgaggagacaagcaagaattgggtgtaccgttccctaactgggaggtgactggaaaaaaataaaaaggagagaggaggtga

SEQ ID NO: 7885 - DNA, 102 bp, Homo sapiens
tcacatctgtaatcccagcattttgggaggccgaggcgggcagatcacaaggtcaggagattgagaccatcctggctaacatggtgaaaccccatctctact

SEQ ID NO: 7886 - DNA, 1969 bp, Homo sapiens
gagtcgtcacacgccatccagcagcgctaaggtggacatgggattcctccctgcgatgcgtgtctttcccacgcagagaagcccagtctcttctctggatctgggcctttgaacaactggggggcgttttctcccccccattgggacaccagtcttcggtgtgtggaatgtggtattttcccgcgtggaggtgtgctttctcacaacggggtgtgttttcccatgtgcagggtgaggtttttttttgccaccctggacacatgttggccccctcaaagaatttctgtggggatttgtaccccagaatcctgttcccccatcccttctcccacctcctcccctctccctccccctggagaccctggaagtggtgtgttcacatacagtgacccttggccaccagaccacagaggatggagcctgggaagcagcgaggaaatcacagccccctcgcccctgcctcccttgcccctaccccggcgaagcatgttccccccgacgccccccttggcacaagtcagatgaagcacgttctgccggggaggccctcaccttccagagaggacagacacagatttcctgctgggggagggaggagtccacgcatcctgatgctgcctggaagcttattttcccgtggccaggacgcatttctctgagtggaaacaggttcttgcatgtggatgtgtgtttccccaggcagacggcccctctcttcccagcacttccctgcctcccccaggcctcaggcccagcacccagttcctcctcacatggcaggtgagcacagacttctagttggcaggagctgaggagggtgaacaaaccccgagggaggcccggcccttgctcccgagttggggggagggggtgtggcaacgtgccccccgcagaggccacgcatgtttgaccaaagccctcattgtggtccgaggacagccttttccccaggcctcagagcattgctcatccgtgccaaactgggtaggtggatttgagcggaaagactcccaaaatgtgccaagaatttcccggtcccaggcagggcaggggaaactaagggcaagcaggatacagggcgagggatgtggcaggtgagggggctcccgcctgtgccccttctcctcaccatgtctcccccaccctgcctcagttctccgttccccttcatctccgtccccctctttgaagctgtccccatctcagtgtcagaccagccttctcctcagctgaccaccctcctctgacccacgccccctccttgtctgaaagaaaggagccttgaatggtggagggaggcagtggggagaaaggtctcaccggacaggttgggagaatgaggtcagcggtgctggggaacagatggagggggcagtggggacagggcttgggcagacaccagcaggaataatttgaaatgtgtgaggtgactccccggagggccttgggcttgggcatttgggaaaagaatgatgtctggaagggcttaagggacacagtggacgaggggagagtcctcatctgctggcattttgtggggtgttagtgccaaacttgaataggggctggggtgctgtcttccactgacacccaaatccagaatccctggtcttgagtccccagaactttgcctcttgactgtcccttctcttcctacctccatccatggaaaattagttattttctgatcctttcccctgcctggtctagctcctctccaaacagccatgccctccaaatgctagagacctgggccctgaaccctgtagacagatgccctcagaattggggcatgggaggggggctgggggaccccatgattcagccacggactccaatgcccagctcctctccccaaaacaatcccgacaatcccttatccctaccccaaccctttgcggctctgtacacatttttaaacctggcaaaagatgaagagaatattgtaaatataaaagtttaactgttg

SEQ ID NO: 7887 - DNA, 1371 bp, Homo sapiens
gctgaggatgcagggctcccgggcacggtgctagccctgccttgagacaccccgagagctgtgggaagagctgtgggatcccctattgcatcacaaagcggccctggagggctggtctttattttgatgaggctgagaagggaaggctgcgggcatgtttaatccgcacgctttagactccccggctgtgatttttgacaatggctcggggttctgcaaagcgggcctgtctggggagtttggaccccggcacatggtcagctccatcgtggggcacctgaaattccaggctccctcagcagaggccaaccagaagaagtactttgtgggggaggaggccctgtacaagcaggaggccctgcagctgcactcccctttcgagcgtggcctgatcacagggtgggatgacgtggagagactctggaagcacctctttgagtgggagctaggcgtgaaacccatcgaccagcccctgcttgcaacggagccctccctgaaccccagggagaaccgtgagaagatggcagaagtcatgttcgagaacttcttcgtgcccgctttctacctgtcggaccaggcggtgctggctctctacgcctctgcctgtgtcacgggcctggtggtggacagcggggatgcggtcacctgcactgtccccatctttgagggttactccctgccccacgcagtcaccaagctccacgtggcgggcagggacatcacggagctcctcatgcagctgctcctggccagcggccacaccttcccctgccagctggacaagggtctcgtggacgacatcaaaaagaagctgtgctacgtggccttggagcccgagaaggagctttcccggaggccggaggaggtcctgagggagtacaagctgcccgacgggaacatcatcagcctcggggacccgctgcaccaggcgcccgaggccctgttcgtgccccagcagctgggcagccagagccccgggctctcgaatatggtctccagcagcatcaccaagtgtgataccgacatccagaagatcctctttggggagattgtgctgtcggggggcactaccctgttccacgggctggatgaccggcttctcaaggagctggagcagctggcctccaaggacacccccatcaagatcacggctccccccgaccggtggttctccacctggattggagcctccatcgtcacctctctgagtagcttcaagcagatgtgggtcaccgccgcagacttcaaggagtttgggacctccgtggtgcagagaagatgcttctgaaggccgcttctcgttgggtaccgtggggggtgaaccctagccccagctttgggaggatgttcaataaaggaccaatgccggaa

SEQ ID NO: 7888 - DNA, 2473 bp, Homo sapiens
cgcgcgtccaagccggcgcacctgcaggccgaggactggaggaccaacggcgtggggcgccaaggtgcggcggggccgggcgggggcggggacccggggcccacggggcgagtgactgctgcccttccgcgcagtgagccatcactacggatacgggctgctggacgccgggctgctggtggacaccgcccgcacctggctgcccacccagccgcagaggaagtgcgccgtccgggtccagagccgccccacgtgagacccctgcgcgcccctccgctatccccgctgggggtgtgggggacaggcctgaggcctcagtttacccatctgtaaaacgagggctggaccccgtgacctctgagccccgacctcgcctgctggccgcccacccaccccccagcaggccgcaggagggtcctcacccctcgaccccctcagccccatcctgccgctgatctacatcagggaaaacgtatcggcctgcgccggcctccacaactccatccgctcgctggagcacgtgcaggcgcagctgacgctgtcctacagccggcgcggagacctggagatctcgctcaccagccccatgggcacgcgctccacactcgtggccatacggtgagcggcccgcagaggagagggggcggcctcatgccctgtcggtaaacgctgccatctacccggagtgtcctcacggggaggggccaggcccataggagtcacacggcagcctagttggtgggaccccgagtcacaccctcacccacacccagaggacacgcggccaccagcgcgtgcggtcagacacttcatggggctctgccggcttcacaaagccatccctcttgacacccccacccccacccacccttctgtcccagacccttggacgtcagcactgaaggctacaacaactgggtcttcatgtccacccacttctgggatgagaacccacagggcgtgtggaccctgggcctagagaacaagggctactatttcaacacgggtgagggcggggcggtgttgtggtgggcggggcttggctctccaacctccccccagggctctggagctagccttggtgaccgcactgcaaaaggggttcccagtggccttctccaagagaacatgcacacagtaggcgtgcagtcacccgggagatggtgtgcaatgacaggcacacagtaggtgtgcggtaacacgggagatgtaggtgcccagtgacaggcgcacagtaggtgtgcagtcacccgggagatgtcggtgtccagtgacaggcgcacagtaggtgtgcaattccctgagagatgtgaaccagtccagggccccgcgtgggagctgaaggggagggagcccggggactaccaggaccaggctgccgagagcctccttttcctcctgtgcccacccgcgacccctgtccagggacgttgtaccgctacacgctgctgctctatgggacggccgaggacatgacagcgcggcctacaggcccccaggtgaccagcagcgcgtgtgtgcagcgggacacagaggggctgtgccagggtgagtgccggcggggcagggcccactgctgggaggcggtggcggccaccgtgggcagcgtgcatgtggccccaggcgggcgggtggcgagtaacaggctgcgggtggcaagctgacgggcctttgcgtgcgtgtccccgagcagcgtgtgacggccccgcctacatcctgggacagctctgcctggcctactgccccccgcggttcttcaaccacacaaggctggtgaccgctgggcctgggcacacggcggcgcccgcgctgagggtctgctccagctgccatgcctcctgctacacctgccgcggcggctccccgagggactgcacctcctgtcccccatcctccacgctggaccagcagcagggctcctgcatgggacccaccacccccgacagccgcccccggcttagagctgccgcctgtccccaccaccgctgcccagcctcggccatggtgctgagcctcctggccgtgaccctcggaggccccgtcctctgtggcatgtccatggacctcccactatacgcctggctctcccgtgccagggccacccccaccaaaccccaggtctggctgccagctggaacctgaagttgtcagctcagaaagcgaccttgcccccgcctgggtccctgacaggcactgctgccatgctgcctccccaggctggccccagaggagcgagcaccagcacctgatgcctggcctgccagggatgggccccgtggaaccccgaagcctggcgggagagagagagagagaagtctcctctgcattttgggtttgggcgggagtgggctggggggagaggctggagcaccccaaaagccaggggaaagtggagggagagaaacgtgacactgtccgtctcgggcaccgcgtccaacctcagagtttgcaaataaaggttgcttagaaggtg

SEQ ID NO: 7889 - DNA, 2474 bp, Homo sapiens
cgcgcgtccaagccggcgcacctgcaggccgaggactggaggaccaacggcgtggggcgccaaggtgcggcggggccgggcgggggcggggacccggggcccacggggcgagtgactgctgcccttccgcgcagtgagccatcactacggatacgggctgctggacgccgggctgctggtggacaccgcccgcacctggctgcccacccagccgcagaggaagtgcgccgtccgggtccagagccgccccacgtgagacccctgcgcgcccctccgctatccccgctgggggtgtgggggacaggcctgaggcctcagtttacccatctgtaaaacgagggctggaccccgtgacctctgagccccgacctcgcctgctggccgcccacccaccccccagcaggccgcaggagggtcctcacccctcgaccccctcagccccatcctgccgctgatctacatcagggaaaacgtatcggcctgcgccggcctccacaactccatccgctcgctggagcacgtgcaggcgcagctgacgctgtcctacagccggcgcggagacctggagatctcgctcaccagccccatgggcacgcgctccacactcgtggccatacggtgagcggcccgcagaggagagggggcggcctcatgccctgtcggtaaacgctgccatctacccggagtgtcctcacggggaggggccaggcccataggagtcacacggcagcctagttggtgggaccccgagtcacaccctcacccacacccagaggacacgcggccaccagcgcgtgcggtcagacacttcatggggctctgccggcttcacaaagccatccctcttgacacccccacccccacccacccttctgtcccagacccttggacgtcagcactgaaggctacaacaactgggtcttcatgtccacccacttctgggatgagaacccacagggcgtgtggaccctgggcctagagaacaagggctactatttcaacacgggtgagggcggggcggggctgtggtgggcggggcttggctctccaacctccccccaggggctctggagctagccttggtgaccgcactgcaaaaggggttcccagtggccttctccaagagaacatgcacacagtaggcgtgcagtcacccgggagatggtgtgcaatgacaggcacacagtaggtgtgcggtaacacgggagatgtaggtgcccagtgacaggcgcacagtaggtgtgcagtcacccgggagatgtcggtgtccagtgacaggcgcacagtaggtgtgcaattccctgagagatgtgaaccagtccagggccccgcgtgggagctgaaggggagggagcccggggactaccaggaccaggctgccgagagcctccttttcctcctgtgcccacccgcgacccctgtccagggacgttgtaccgctacacgctgctgctctatgggacggccgaggacatgacagcgcggcctacaggcccccaggtgaccagcagcgcgtgtgtgcagcgggacacagaggggctgtgccagggtgagtgccggcggggcagggcccactgctgggaggcggtggcggccaccgtgggcagcgtgcatgtggccccaggcgggcgggtggcgagtaacaggctgcgggtggcaagctgacgggcctttgcgtgcgtgtccccgagcagcgtgtgacggccccgcctacatcctgggacagctctgcctggcctactgccccccgcggttcttcaaccacacaaggctggtgaccgctgggcctgggcacacggcggcgcccgcgctgagggtctgctccagctgccatgcctcctgctacacctgccgcggcggctccccgagggactgcacctcctgtcccccatcctccacgctggaccagcagcagggctcctgcatgggacccaccacccccgacagccgcccccggcttagagctgccgcctgtccccaccaccgctgcccagcctcggccatggtgctgagcctcctggccgtgaccctcggaggccccgtcctctgcggcatgtccatggacctcccactatacgcctggctctcccgtgccagggccacccccaccaaaccccaggtctggctgccagctggaacctgaagttgtcagctcagaaagcgaccttgcccccgcctgggtccctgacaggcactgctgccatgctgcctccccaggctggccccagaggagcgagcaccagcacccgacgcctggcctgccagggatgggccccgtggaaccccgaagcctggcgggagagagagagagagaagtctcctctgcattttgggtttgggcgggagtgggctggggggagaggctggagcaccccaaaagccaggggaaagtggagggagagaaacgtgacactgtccgcctcgggcaccgcgtccaacctcagagtttgcaaataaaggttgcttagaaggtg

SEQ ID NO: 7890 - DNA, 80 bp, Homo sapiens
tttttttttgagacagagtcttgctctgtcgcccaggctggagtgcagtggcacgatctcggctcactgcaagctctgcc

SEQ ID NO: 7891 - DNA, 105 bp, Homo sapiens
gacatctgctgtaggaggtttcccatctgagggtctctgtctagagacttctagacgttcttctgtccctgggctccgcaggagttgcgttttccttgaccaagg

SEQ ID NO: 7892 - DNA, 1156 bp, Homo sapiens
caggcgctgaagacttggattggtttagacctagaaggaagtggcatttgattggttattataagtgaaaagggcccctccccgggtgagatatgccagccccataattaggacctgaaaatctctgccaggcctgcctttgtgacgtggcccagtctacctcagctatggaacaggccttgactggtgaggcccaaagccggtggccccgcagaggcgggagtggggccatggctgaggcgcctgggcccagtggcgaatcccgaggacactcagccactcagctgccagcggaaaaaactgtcgggggaccatcgaggggctgctcaagctccgtgctcagagtgtcccagttggtgctccaggccatctccactcacaaagggctgactctggcagctctcaagaaggagctccgaaacgccggctacgaagtgcgcaggaagagcggccgccacgaagcgcccagggggcaggccaaggccacgctcctccgggtcagcggcagcgacgcccgccggctacttcagggtctggaaggttcccaagcccaggagaaagccgggacgcgcgaggcaagaggagggcacgcgcgctccctggaggaccccagccgcgccccggagctcccggaggcgccgccagccccttcgcaaggcggccaggaaggccagagaagtgtggagacggaacgcgagggcgaaagccaaggccaatgccagggcgaggaggaccaggagggcaaggccgagagccaaggagccgccgtgtgccagagccaaggaggaagcgggagcgacagcggcagacgaggggcgaggacaggccgtgaaggaagacaccacgccgaggtcagggaaggacaagaggcgaagctccaagcccagggaagagaagcaggagcccaagaagcccgcacagcggaccatccagtagccaacgcgggctaaaaccgaccggacatctagcgggcaggggaagactccactaaagacttccacaaagacctcccctaaatctgaaggtcttcctgatccagttgggaatgcatcttgtgggagcagcttcactcccaccacggaccaatgcctttcccccataggccccaagaagagcggctgtcacactcattgaaatgaaatggacctctagacca

SEQ ID NO: 7893 - DNA, 496 bp, Homo sapiens
caaatgtatgattttagttctgaatgcaggggttaagaaaagtgcaggagtagttctcatgccataggctgacaggacacaaatgattcctcgggaagtaaaacgtcaaattagctgattgaaggaaagagtagctgttttcagccgaagtcaaaggaatggggacatggaagcggctgggaagtactttgtattcttaaagaggtaaaagtggcagtgggaaggtattagaacctcctgggagctttctccaggtacacctgaccaagcttttcctcaggagagtcttatatctcctacaagcggcaacagggtatgtgtatttaaaacagaccaaaaaaaaaaaaaaacaccaaaaaaccacccttaagtgatgctaatatttaccctttcacacccttgagaatcactgctttaagcctatgcaaagcctagtaaccgcagaattcttgcagcattatctcatctatagatgatcagaacttgacatttcccc

SEQ ID NO: 7894 - DNA, 529 bp, Homo sapiens
ttcactctgctcctttctcctgatcttctggaagtttctttctgaatctagagaaactctcctcaccagagaggaatgatgtaagcaggctcaattaaatgcccgctgtgtataatgaagcatattgttaggtgcagcatgggacatagaagttcaaagactatagctcttgaggatatctttatttagttggaaatacaagacagaaacattcaaagtaaagtaaatttattccttatatttaggtagcccttgttcatctacctcttctgaaattttgcaataattctgtgatgttggtaggaagggaatgtgatgttagataagaagtcagatggccggcacatccatctgacagccacaccactgatattaagggatttgttaatgtcatatggctcctaaagagctaggatatgcatccatatcttccagctccaagtacgagtttttttctttttaaaaaatattgtgtcacattataccctctaatgccaaattcatttaaaataaagaaaaagccatataa

SEQ ID NO: 7895 - DNA, 1937 bp, Homo sapiens
acttctaacctggcagagccctgccggccctccccctgctctgcttctgcgccttctgcgtttggacataggactctgcagggccgccctctctaactggcctggctctggaagggctggtgaggactctgcctccttgcctgcctacaaggtgcctggtttgcagcaggctctccgctctttccagcaaagctgctcagagagggtgtccagcacagtggagaggccggaagtgagacgggcagacggcacctgcagcctgaaacgcaccgctcctgcgtgcgcccccacctggtccccggatgcccccaccacctggacagaggccacactgactgcccacccagctgtggcgggaggtgcagagcagagggctttagggagcagtgactgcggtcacccctttagttctctgggtgtagaccacaccacctcccactgggcaccccccaacacggtgtcctgccacccagcgcctggctccaggaaaacacgcttgccttccttcccggcagcttcgccactctccttatggactctgttctgtttgtacatggctgacggaaatctctttggtacaaccgaataaagcctggtggcagtgctgcgcggggctcccagccctgctgggaaggaccagggaaccactcagcaaggagaccctcttggccctgcccccaccatgcacccagcagccgggagtgcagcgggcagcctggcagtgagtgaaacccaggcctccagccctccaaagcctggggccaccccctgtagcaggcgatgctagaataaggaggagagccagagctgaggctccttgccccttggcccctccaggggccatgggatctctgtctcccacacccctgtcacggcccgcctggagcagcccagaggccgaagaggttcttactgcagcctccgggaggtgtctagggaggccatagattgcctggtctcgccgcattcaaaatgaggcttatgatcagtacttttttcagccccacattcctctccagaatggcctctgccctacagcacctggcccatgtggcaccccatgggcctgtcctctgctgttgtgaggtcgacctcacgacccagcacaggagctggaggcgaggtgcacgcgaggctctccacagcccaggaaggcagcctgtcaccctgctctccgagccaggggccaaggtgtggggggcacaggccatcctcatcctgccaggcccccgctttcaggagtggggtggtgccaatgctcccactcagaaccctggactgcggggtcccctgagcagagggaccagccagttccccatagacagattggtgctggacaggggctgcctgggccccaggcttggggagggtagaaaggccctgcagtgctgctgcctgggcccggaggtgggcctggccccgtagcagcattggaggccagagcccaagccagttccggagtcacacccaacggcggagggagaacctacccatctcccaccttcagctctggggaggcatgctctgggcctctggagccagggctcaggcccccaactctcctccttgcccctgcaccctcggacttggcctggccagaagggatgggggcaagaggaaggcagccagggctccagcccatgccctcacagatttggctctcgagttggggagcgaagggctgggggaggacactgggaaacgggccagccgtggccctgcacttcccccagggagcaccaaggctaggcgcggcttcaccgcggggctgggtcgtggccagcttcgcccctgggtctgaagacctctgggcggcccaggccaaccttgccctgccgccgcacactcggctgccttctcatacccaggcttggggatttccaggtcccgttcccctcgtggcctggctgccagtcctccagcacacctcactccga

SEQ ID NO: 7896 - DNA, 744 bp, Homo sapiens
acccctacccacgtcctgcgccgccccccatcagtacacgcacgccggactcacgaggctccgcagcctggggtgcagttgcagctccggggaggcgccggccccgcccgggggttccgcccctctgtagggctgggagcgccgcgcgtacggggacctgcggaggccggacagcagccccgcgcggcccaccgagtaggagctgtgccccgccgctggcttgtaccacgcgaggccaggcggcgccagcagcaggcacagcgccagggcgcggccgccagtgtcgcggaccgggccatggggacgccggctgactggtgggcggcggcgtccgggctcggagcagccaccgcctgggccgccttatatctgcggcgagggcgggccgaggctgcggagggccgggaggggcggcgggcgggctggggtgcagcgggcgcgcgcggaggagccgtcgcacctccgcatcccaaaggaaccagccgcgcgggcgagctggaggcgcgcaaggatctggcgcttggtgggagcccaacgccccctcaagctccccacccatgccgctcgcgcccttcaggcccggcttgcgtgggccgcagtggcagcaggggagggcccacgggcgcccagccctaggagtcgtcccccaggcaatccccagtactcctgatgctggagagccagccacactgcacagtgccccgggggcggtttctaccaccctaaggggtattcttggctcca

SEQ ID NO: 7897 - DNA, 4747 bp, Homo sapiens
ggacaaggtgcactcggaggctgagcgccttgaggcccgcttccaggatgtgcggggacagctggagaagctcaaggctggtgagcacccatgggcgccccctcccgagcctggcttctccacttggaaggacaccatcagcccgcggggcttggaggcattgcatggacaacctggttcacttgcttatcagttgccccatatctgtccatctttccaaccagggtctatccctccaactgtcccatgtccatctatccatccatcatctgtccctccaactgtcctacacccatccatccatccatctatcaatgcatccatccatccatctagggttgatccctccaactgtcccatatccatccatccatccatccatccatccatccatccatccatccattcaacgtctgtctctccaattatcctatatccatccatccattcagagtctatcccttcaactgtcctatatccatcatccattcaggatctattccttcatctgtcctatatctatctctccatccagggtctatccctccattctgtcccatatccatctatctatccagggtctgttccttcatctgttctatatctatctacccatccaggacctacccctccatctgtcctatatccatccatccattcatccatccatccatccattcatccacccatccatccatccatccagggtctattcctccaactgtcctgtatccatcattcatccaggatctattccttcatctgtcctatatctatctctccatccaggttctatacctccatctgtcccatatccatctatctatccagggtctattccttcatctgtcccatatctatccatccaggatctaccccttcatctgtcctatatccatctgtccgtatatccatccatccatccatccatccatccatccatccatccatccatccaggatctattcctccaactgtcccatgtccatccatccatgcagggtctatccctccaactgtcccatgtccatccatccatccagggtctatccctccatctgtcccatgtccatcaatccatccattgtctatctgtccatctgcctccaacagccccacatccatctgttcatccatctatctgcaatgacatttgacttttgtcttcctagtcttagtcttagttaccaaatttcttcttagtcttagttaccaaatttcttcttagtcttagttaccaaaaatgttattatttgtaaagaaaatgatgataaaatataatagcaatgtttattatgtgtcattcactgtgcaaggcacttatgcattattccacttgtttcacaaaacactaaaaaacagatgctgtccctccaactgtcccatatccatcatccacccatccatccatctacccagtattcatccatggatcatccatgtacatctctgtctataaatgcctagcagtgggaccgatgggtcttagggtaggtatatgttgatatttattagaaaatgccgaacagttttccacactggtcgcaagattttatgctctcacctatgcgagcatatgggagtccccgatgatccacaccttttccaccacttcctagtgtcagccattttttatcttgttttgtttttgagatgcagtcttgctctgtcaccaggctggagtgcaatggcatgatctcggctcactgcaacctccgcttcctgggttcaagcgattctcctgcctcagcctctccagtagctgggactacaggtgtgcgccaccacgcccagctaatttttgtatttttagtagagtcggggtttcatcacgttggctaggatggtctcgatctcttgacctcgtgatctgcccgcctcggcctcccaaagtgctgggattacaggcgtgagcccccgtgcctggccgtcagccattttaatattagccatctaacgtgtgtgccgtactctctctattaatttaattggcatttccctggtgactaataatattgagcatcgtattggccattcagatgtttttgtaaagttcctgttcaatcttgtgcacttgtttttttaaaaattgggtttgtcttgctataactgagttgaaggagttctttgtatattctagatactagacttttggtaaatattttctcttatactgtagcttgccttttcattttttttggtgatgaactgaagtttcttagttttgaggatatctaatttatgaaattttctttttgtagttaatgactttgtggcctgcctaagaaatttttgcctgtcctgaggttacaaaggcattatgctgtgttttctcctagaagtttcattgtttgaactcccacattgaagtctgtgacttatgacaaattgatttgcattatggtatgaggtaggggtctagagtttcctttttaaaaatttttttagatttttttcatttatttattttttgagaggaatttcgctcttttgcccaggctggagtgcagtggcacaatctcggctcactgcaacctctgccacccaggttcaagcagttctgcctcagcctcctgagttgctgggattacaggtgcccgccaccacgcccaactaattttggtatttttagtagagacggggtttcgccatgttggcaggctggtctcaaactcctgacctcaggtgatctgcccgcctcagtatcccaaagtgctgggattacatatgcatgagccactgtgcccggccctttttttttttagagataggattttactatgttgtccaggctagtcttgaactcctggactcaagtgatcctcctgtcttggactcccaaagtgctgggattataggcatgagccaccactcctggctgagtttcttttttttttttttaatcccttctgtgggtatgttgcatccacctgtgcatcctttttttctattattattattattttttaaaatttgagaaagtctcgctctgttccccaggttggagtgcagtggcacgatctcggctcactgcaatctccccctcctggttcaagcgattctcctgcctcagcctcccagtagctgggattacaggcacacaccaccacacccagctaatttttgtatttttagtggaggggggttttgccatgttggtcaggctggtctcaaactcctgacttgaggtgatccacccgccttggcttcccaaagtgctgggattacaggtgtgagccactgcgccgggcctcatctttcttatttttcaggaagtagccatgcagagcactcaggagtcaggctgtcctgtttcttttctcttttttaaaacatttattgttagcttttatttgtttttttgagatggaatctcacgctgtcagccaggctggagagcagtggtgtgatctgggcttactgcaacgtccatctcccgggttcaagcaattctcctgcctcagcctctccagtaactgggattacaggcctgcactaccatgcccggctagtttttttgtatttttagtagagacagggtttcaccatggtggccaggctggtctcaaactcctgacctcaaatgatctgcctgccttggcttcccaaagtgctggattacaggcgtgagccactgcacccagcctgtcctgggtttgaatctcagctccaccaattgtgaaccttggtgtgtggcttcctccttccgctctgggaatggggatggcagtgcctactttgcagggttgtcatgagaattagaagggatgacggatggagagaaaggtggggggtggtggggagcgagctggagagcctcctcggggcataccgtaggagctcagatatgggcaggtcctccttcctgctgtcgtgatggctgatccgagccctgtgctaggtgatgtgggcacagtggggagaggccctggaggggactgacctgcgcactgggcactcatcactcaggggctaggacagaggacgcccaggcactgggggcgagagaaggccctaactcagtctggggtgcaagaccataatttgtggggcccagtgcagaatgaggggccccttgttaaaaaattgctgagattttcaagataggaagagcagcagcgtgtcaagccaagtgcaggcccctcaccactgcctggatctcacactcatgaggctggctctgctggggtcactgggaaggcttcctggaggcagtgacacttgaggctgactttgaaggacaagtcagggagagagggatgcacagcagtgccgtccccctgcctggctggctgagctcgggtgactcccttttggtctctgagccttgaccgcagtctctgtagaatggggcagtgaggacctgagtggggagagggctggcacccagctggcggtgccagatccctgacaaccggccctccatgacgcagatatccagctcctcttcaccaaggcccattgcgacagcagcatgatcgatgacctccttggggtcaagaccagcatgggagaccgggacatgggcctcttcctgagcctcattgagaagcggctggtggagctcctgacagtgcaggccttcctacatgcccaggtgggagacggcagggagccgggacaggaggccggtctcgggggtggcccagctgaccgcaggctcccacactctccagagcttcacctccctggccgacgctgccctcctagtgctgggccagagcctggaggaccttccgaagaagat

SEQ ID NO: 7898 - DNA, 4743 bp, Homo sapiens
ggacaaggtgcactcggaggctgagcgccttgaggcccgcttccaggatgtgcggggacagctggagaagctcaaggctggtgagcacccatgggcgccccctcccgagcctggcttctccacttggaaggacaccatcagcccgcggggcttggaggcattgcatggacaacctggttcacttgcttatcagttgccccatatctgtccatctttccaaccagggtctatccctccaactgtcccatgtccatctatccatccatcatctgtccctccaactgtcctacacccatccatccatccatctatcaatgcatccatccatccatctagggttgatccctccaactgtcccatatccatccatccatccatccatccatccatccatccatccatccattcaacgtctgtctctccaattatcctatatccatccatccatccagagtctatcccttcaactgtcctatatccatcatccattcaggatctattccttcatctgtcctatatctatctctccatccagggtctatccctccattctgtcccatatccatctatctatccagggtctgttccttcatctgttctatatctatctacccatccaggacctacccctccatctgtcctatatccatccatccattcatccatccatccatccattcatccacccatccatccatccatccagggtctattcctccaactgtcctgtatccatcattcatccaggatctattccttcatctgtcctatatctatctctccatccaggttctatacctccatctgtcccatatccatctatctatccagggtctattccttcatctgtcccatatctatccatccaggatctaccccttcatctgtcctatatccatctgtccgtatatccatccatccatccatccatccatccatccatccatccatccaggatctattcctccaactgtcccatgtccatccatccatgcagggtctatccctccaactgtcccatgtccatccatccatccagggtctatccctccatctgtcccatgtccatcaatccatccattgtctatctgtccatctgcctccaacagccccacatccatctgttcatccatctatctgcaatgacatttgacttttgtcttcctagtcttagtcttagttaccaaatttcttcttagtcttagttaccaaatttcttcttagtcttagttaccaaaaatgttattatttgtaaagaaaatgatgataaaatataatagcaatgtttattatgtgtcattcactgtgcaaggcacttatgcattattccacttgtttcacaaaacactaaaaaacagatgctgtccctccaactgtcccatatccatcatccacccatccatccatctacccagtattcatccatggatcatccatgtacatctctgtctataaatgcctagcagtgggaccgatgggtcttagggtaggtatatgttgatatttattagaaaatgccgaacagttttccacactggtcgcaagattttatgctctcacctatgcgagcatatgggagtccccgatgatccacaccttttccaccacttcctagtgtcagccattttttatcttgttttgtttttgagatgcagtcttgctctgtcaccaggctggagtgcaatggcatgatctcggctcactgcaacctccgcttcctgggttcaagcgattctcctgcctcagcctctccagtagctgggactacaggtgtgcgccaccacgcccagctaatttttgtatttttagtagagtcggggtttcatcacgttggctaggatggtctcgatctcttgacctcgtgatctgcccgcctcggcctcccaaagtgctgggattacaggcgtgagcccccgtgcctggccgtcagccattttaatattagccatctaacgtgtgtgccgtactctctctattaatttaattggcatttccctggtgactaataatattgagcatcgtattggccattcagatgtttttgtaaagttcctgttcaatcttgtgcacttgtttttttaaaaattgggtttgtcttgctataactgagttgaaggagttctttgtatattctagatactagacttttggtaaatattttctcttatactgtagcttgccttttcattttttttggtgatgaactgaagtttcttagttttgaggatatctaatttatgaaattttctttttgtagttaatgactttgtggcctgcctaagaaatttttgcctgtcctgaggttacaaaggcattatgctgtgttttctcctagaagtttcattgtttgaactcccacattgaagtctgtgacttatgacaaattgatttgcattatggtatgaggtaggggtctagagtttcctttttaaaaatttttttagatttttttcatttatttattttttgagaggaatttcgctcttttgcccaggctggagtgcagtggcacaatctcggctcactgcaacctctgccacccaggttcaagcagttctgcctcagcctcctgagttgctgggattacaggtgcccgccaccacgcccaactaattttggtatttttagtagagacggggtttcgccatgttggcaggctggtctcaaactcctgacctcaggtgatctgcccgcctcagtatcccaaagtgctgggattacatatgcatgagccactgtgcccggccctttttttttttagagataggattttactatgttgtccaggctagtcttgaactcctggactcaagtgatcctcctgtcttggactcccaaagtgctgggattataggcatgagccaccactcctggctgagtttcttttttttttttttaatcccttctgtgggtatgttgcatccacctgtgcatcctttttttctattattattattattttttaaaatttgagaaagtctcgctctgttccccaggttggagtgcagtggcacgatctcggctcactgcaatctccccctcctggttcaagcgattctcctgcctcagcctcccagtagctgggattacaggcacacaccaccacacccagctaatttttgtatttttagtggaggggggttttgccatgttggtcaggctggtctcaaactcctgacttgaggtgatccacccgccttggcttcccaaagtgctgggattacaggtgtgagccactgcgccgggcctcatctttcttatttttcaggaagtagccatgcagagcactcaggagtcaggctgtcctgtttcttttctcttttttaaaacatttattgttagcttttatttgtttttttgagatggaatctcacgctgtcagccaggctggagagcagtggtgtgatctgggcttactgcaacgtccatctcccgggttcaagcaattctcctgcctcagcctctccagtaactgggattacaggcctgcactaccatgcccggctagtttttttgtatttttagtagagacagggtttcaccatggtggccaggctggtctcaaactcctgacctcaaatgatctgcctgccttggcttcccaaagtgctggattacaggcgtgagccactgcacccagcctgtcctgggtttgaatctcagctccaccaattgtgaaccttggtgtgtggcttcctccttccgctctgggaatggggatggcagtgcctactttgcagggttgtcatgagaattagaagggatgacggatggagagaaaggtggggggtggtggggagcgagctggagagcctcctcggggcataccgtaggagctcagatatgggcaggtcctccttcctgctgtcgtgatggctgatccgagccctgtgctaggtgatgtgggcacagtggggagaggccctggaggggactgacctgcgcactgggcactcatcactcaggggctaggacagaggacgcccaggcactgggggcgagagaaggccctaactcagtctggggtgcaagaccataatttgtggggcccagtgcagaatgaggggccccttgttaaaaaattgctgagattttcaagataggaagagcagcagcgtgtcaagccaagtgcaggcccctcaccactgcctggatctcacactcatgaggctggctctgctggggtcactgggaaggcttcctggaggcagtgacacttgaggctgactttgaaggacaagtcagggagagagggatgcacagcagtgccgtccccctgcctggctggctgagctcgggtgactcccttttggtctctgagccttgaccgcagtctctgtagaatggggcagtgaggacctgagtggggagagggctggcacccagctggcggtgccagatccctgacaaccggccctccatgacgcagatatccagctcctcttcaccaaggcccattgcgacagcagcatgatcgatgacctccttggggtcaagaccagcatgggagaccgggacatgggcctcttcctgagcctcattgagaagcggctggtggagctcctgacagtgcaggccttcctacatgcccaggtgggagacggcagggagccgggacaggaggccggtctcgggggtggcccagctgaccgcaggctcccacactctccagagcttcacctccctggccgacgctgccctcctagtgctgggccagagcctggaggaccttccgaagaagat

SEQ ID NO: 7899 - DNA, 872 bp, Homo sapiens
tctcttggccacgtcacttttggcggcctcagctccagcactgggcatttgcccagccacatcacgcacggtgaccccaacactggccacgtgaccttcggctccaccagtgcctcgagtgggggccacgtgaccttcagacccgtcagcgccagcagctacctgggctccactggatacgtggggtccagcaggggcggagaaaacacagagggtggtgtggagagcggaggcacagcgtctgattcgagcggaggcctcgggtccagcagagaccacgtctccagcaccggccctgcctccagcactggcccgggctcctccaccagcaaagactcccggggctaacacgaggggcacgcagcccccaccctgccctggctctctgtggggtctttttttgtgtctctacttcccctgtttgccttgtgggtctctgtctttttctcccagtggcaggcctctgtctttttgccccttcaactgttttcatctgcccttcatcaccgcctcacctgtgtctcccggttcctttctctctgctcctgacactgcttttccctctgactcctgatctcctgttctctgggcttcctggtcagtgtctgtccgtcttgtctccatatctgccccttccctgtctgctgagccctggccccctgtggatcccccacctcctgtttccggctctctctcctcatctccatctcccaggctctccacgcatcctgtgtccctgtctctgtagctccttactccccaagagccccccagtgctgacaggtgtgggaaaagtcagggcgaagacgccaggttcagcatgggaaaatgggactgtggaaataaagtatatgtgtggagagctggcttca

SEQ ID NO: 7900 - DNA, 872 bp, Homo sapiens; identical to SEQ ID NO: 7899

SEQ ID NO: 7901 - DNA, 4026 bp, Homo sapiens
aagggagtgtgatgtgacgaggccgcagagagctcagcccccaggatggacgggaaaccctgggtcaccgttcttggagggggacatcaggtgggtagagaaagctgcctgggggaagtcaccacccagtcaccccttcagtcctcaaaggtgggggcgtggtgctgagggaatgtcagcttggggaggggcagccacagctttccatttacagaagcgctgaaacagagccacatgcacgcacacacgcgcacccaagcacacatgtgcagctgaacgctgcggtatgcacacaggtcgacatgctcaggaacacgcgggagcagtgcgggaaggtcaggcagagtcattgcacagacacattcctctaacaccgtacaaagaaaatgctttggaaaaccaagcaagcaatttattctcatttatttaataaacaagtattaagaacctaccaagtgcctgccagtagggctataaacacacacacacacacaccctgcatgcgtgtgtatgcatgtgaaggatatcaaggacacaggataaattcactgacatgatcactgctacggtaggactgttcacaaagtgccatgatgatacaggaagaaatgatgaatgtggggaggagaattagagaaacaagaggtgtcccacaggaggtaaaatttcactgggctttgaaggatgagtaggagtttgccagctggtgaagtagggtcctccaggcagaggagacaggaacagcaaaggcatggtggactgaaaggtcagagcttatgggataagcccagtgtgagaggagtttgaagtgtagaggagttcatgggagagaagaccccatacaagtcctggtgtggagagtataatttctgactcaaacactaacaccccacacaaagaaccgtgccatcacacagcgcccgcctgtcaaaccacacatccacgcacaacttcacacacacataaccgcagaccttcctggtgctgataaatattgagcaaatggaaaaaagatgattttgtttactgcaaacaaaatgagatgggaggggaggtgtcaagtaaaaggaaagcatcagaagttttcctttcttggcatgggggttaaatagggttgccaaaaaaaaaaaaaaccaaaaacagaaagaaaggggcacgggaggctgggcacagtggctcatgcctgtaatcccagcactttgggaggccaaggcaggtggattacctgaggtcaggagttcgagaccagcctgactaacatggtgaaaccctatctctattaaaaatacaaaaattagccaggcgtggtggtgggtgcctgtaatcccagctacttgggaggctgaggcaggagaatcatttgaacccaggaggcagagattgcagtgagctgagatcgtgccaccgcactccagcctgggcaacagagtgagactctgtttcaaaaaaaaaaaaaaggcatggagaaggaaacctcacagcttatcagggttgtgaagccagccagctcccatcggtttactgtacatttatgggacacctactgtgtgcaaggtgctgagctagggcctgcagagattttaaggctgggtcctatccttcaaagagctcaggtgctgggtgaggggaggagagaaagtaaatactaaacaacacagaaggggaaggggggctggtgtctgggagcctcgcatttcacaggtgggtgtgttggggctcagccatcatcaggagccaaggccgaggagtgcactggagaagccaggagcagtttattttgactggaacctaaaataggtccgtgtaaagttgtgggagtgtagagcagtcagtggaaaagcagttttggaaaaagaggctggttgcagtgaaggcctagaccagtgttttctcaactggggtgctcttgtcctccagggaatattcggcaatgtctgaggacactttttattgtcaccctgcacaggaatggctggatgggtgtggtggtgctaggattggggaggggtcctgcagaaatgggataagaactcacagcaaatcagaggcaggggtgaaggagggagccagggctccggtgcacagcagaactgggctttcatcacagaaatgggaagagctcagggagggctgtgtcttgggaagaagaggacaagggtggctctggacaagttgagcttggactgcgcacaggtcaggctgaaatcagagagaacagatttgggggttgttcttttcaagtcccagtccacaggctgcggaggcgctggttttcttccaggcatgctcgtggctgggtctcccttggctgtcctggtcacgtcccagcccactccttctcagcctccaggtttcagaatcaaggtcacggtcccagagaagcctcccctcccctcccccagttcaggcccccgagtctccaccatagccccgggcatagtttaatcacctaagtaaatctctgggggctttgtgcaaagatcacttgggagacaggggcctcacctgttttgaggccagttcatccatcactactgtactctcagccccagcacgtgcaaggcttaggacgggagagggacccctcattcttttgcctcaacccttcaaaaagagggaaacttcaaaatcttcaaaaaaaaaggggaaggaggcaactcctttccccttttcttcctccctccctttccccagccaccacaaggcttacaaaagcagatctctgcccttggcgcaatcttgcaaaagggacagaaacccagaaaacagcctgacctttaacggaagcatcccggagttagagatgaaaaatgcccagcatccccttttctcctcaccctaaactgccagtcctggagtctcctggtcttcaggtccccgctcacgtgcatcagcctttaacctcaattccagttgcttaaagtattttttttcttgacacatagtgcctggcacatagtagatgcccaaagaacatctgctgactgacctcacctaaagcatttgggcagttacccacaggtgctccatgacaccttctggccagcagaaaggacctgcagccaagtgagtcaatgggtggggcgggtggcaccgtcaaggagggcacctggagacgctctctgggtggccatgggggcctgcccttccagcagggaatatttaggggcatccaagcagcctgtgggggagggtggtgaaagcaggtcactaatctctcttggagattaagtaccacactggctttggagaccagaaaccagctgggggagggggcagaggcctatggagggctgtggagggacagagggtgaatcttgcctgggaggtgacagcccagggcaggggtaggtgtgggggcttcttttctgaggcctgggcagagcctagaaggatctctagggttgtggggtggaaggagaagctgaaattaggaagaaaaaaccatccatgatttattaaccagagtcactaattattaaccagtttgactcctggacttgaggccccaattcctggcctcccctagcttccagagtgttgagctccccaacgtgccccgcctccccccttcccctgccccctccccacccttaccccagactgtgactgtctccgcccagccttgcccttatctcctcttatctccaggtgctctggtggctgctactgaacaccaaccgctactcccagccttgggggtgacaggaaagaatgggaccgcagtgattgaaacttatttggggcaggaagcttggcctggatgacctgaggggcagtcatgtcctctggcccacccagtcttcacttctcacctcctcaccccccgccctctggagggcagctcccatctctcctgggttagcctcagagttcggcgaggggaggcactgtttggggctacagtcctgggcccggcgttgcttgccagtgagatgtctgatgccaggggggtgccaaggagcagcaagcctggggacttggggagaaactctaaacagagtctcctgggctttgggggcaagg

SEQ ID NO: 7902 - DNA, 530 bp, Homo sapiens; identical to SEQ ID NO: 7774

SEQ ID NO: 7903 - DNA, 530 bp, Homo sapiens; identical to SEQ ID NO: 7774

SEQ ID NO: 7904 - DNA, 530 bp, Homo sapiens; identical to SEQ ID NO: 7774

SEQ ID NO: 7905 - DNA, 1197 bp, Homo sapiens; identical to SEQ ID NO: 7777

SEQ ID NO: 7906 - DNA, 311 bp, Homo sapiens; identical to SEQ ID NO: 7778

SEQ ID NO: 7907 - DNA, 1197 bp, Homo sapiens; identical to SEQ ID NO: 7779

SEQ ID NO: 7908 - DNA, 311 bp, Homo sapiens; identical to SEQ ID NO: 7778

SEQ ID NO: 7909 - DNA, 1197 bp, Homo sapiens; identical to SEQ ID NO: 7781

SEQ ID NO: 7910 - DNA, 314 bp, Homo sapiens; identical to SEQ ID NO: 7782

SEQ ID NO: 7911 - DNA, 1178 bp, Homo sapiens
gaggaaggagcccctccctgggagccagacccccacaccatggcgagcgtggtggtgaagacgatctggcagtccaaagagatccatgaggccggggacaccccacgggggtggagagctgctcccagctagtcccagaggctccccggagggtgaccagccgggccaaggggatcccgaagaaaaagaaggccgtgtcgttccacgggtgggtttgttgcacactgtcagggatggttctaatgcccagcactacctccaacagagcaggagtccgactgtgggtgctagaggaaggggagggggaaaagccagcaggtcgggggcaggaaagagggcagcagtgaagagacatcaagtcacagggaggtagagaggaagaaggtaatggggatggatggagggaggaagaaggtaatggggatggatggagagaggaaaaagccagtggggagggaagaaggagaagggaggctagtgaatgaagaagaaagtaggtggcagagaagggaggagaaagtaggcagcggggaaggagaagaagaaagtagacagtggtggtcgggcacggtggctcacgcctgtaatcccagcactttgggaggccgaggcaggtggatcatgaggtcaggagttcaaaaccagcttggccaacatggtgaaaagccatctctactaaaaatactaaaattagctgggcgtgatggcacatgcctataaccccagctactcaggaggctgaggcaggagaattgcttgaactgggacccgcagtcggaggttgcagtgagctgagatcgcgccactgcactccagcctgggcaacagagtgagactctgtctcaaaaaaaaaaaaaaaagaaagaaagaaaaaagaaagaaagtaggcagcacagggaaggagaataaagtaggcagcagggacagagaagggagaaacttatatacagtgagggtggagtcacagggggtgaggtatggagaaaggaaggcaggagggcccagacaccctggggctgcttctccacttttctgcctgtttcttctctgcagggtggagcccagatgtcccatcagcccatgcactggtgcctgaacctcaaacggtcctcggcctgcaccaacgtgtcactgctcaacctggccgccatggagcccactgactccacggggacaga

SEQ ID NO: 7912 - DNA, 1155 bp, Homo sapiens
gaggaaggagcccctccctgggagccagacccccacaccatggcgagcgtggtggtgaagacgatctggcagtccaaagagatccatgaggccggggacacccccacgggggtggagagctgctcccagctagtcccagaggctccccggagggtgaccagccgggccaaggggatcccgaagaaaaagaaggccgtgtcgttccacgggtgggtttgttgcacactgtcagggatggttctaatgcccagcactacctccaacagagcaggagtccgactgtgggtgctagaggaaggggagggggaaaagccagcaggtcgggggcaggaaagagggcagcagtgaagagacatcaagtcacagggaggtagagaggaagaaggtaatggggatggatggagggaggaagaaggtaatggggatggatggagagaggaaaaagccagtggggagggaagaaggagaagggaggctagtgaatgaagaagaaagtaggtggcagagaagggaggagaaagtaggcagcggggaaggagaagaagaaagtagacagtggtggtcgggcacggtggctcacgcctgtaatcccagcactttgggaggccgaggcaggtggatcatgaggtcaggagttcaaaaccagcttggccaacatggtgaaaagccatctctactaaaaatactaaaattagctgggcgtgatggcacatgcctataaccccagctactcaggaggctgaggcaggagaattgcttgaactgggacccgcagtcggaggttgcagtgagctgagatcgcgccactgcactccagcctgggcaacagagtgagactctgtctcaaaaaaaaaaaaaaaagaaagaaagaaaaaagaaagaaagtaggcagcacagggaaggagaataaagtaggcagcggggacagagaagggagaaacttatatacagtgagggtggagtcacagggggtgaggtatggagaaaggaaggcaggagggcccagacaccctggggctgcttctccacttttctgcctgtttcttctctgcagggtggagccccagatgtcccatcagcccatgcactggtgcctgaacctcaaacggtcctcggcctgcaccaacgtgtcactgctcaacctggccgccatgg

SEQ ID NO: 7913 - DNA, 150 bp, Homo sapiens
ggttcaagccattctcctgcctcagcctcccgagtagctgggactacaggcatgtgccaccacacccagctaattttgtatttttagtagaaacagggtttctccatgttggtcaggctggtctcgaactccggacctcaggtgatctgc

SEQ ID NO: 7914 - DNA, 334 bp, Homo sapiens
gaagttctttttttttttttttgagatggagtctcgctctgtcgcccaggctggggtgcagtggcgcgatctcagctcactgcaacctccgcctcccgggttcacgccattctcctgcctcagcctcccaagtagctgggactacaggcgcacgccaccatgcctggctaattttttgtgtttttagtagagacggggtttcaccgtgttagccaggatggtctcgatctcctgaccttgtgatccgcccacctcggcctcccaaagtgctgggattacaggcgtgagccactgcgcccggccttttttttttttttttttttttgagacagag

SEQ ID NO: 7915 - DNA, 150 bp, Homo sapiens; identical to SEQ ID NO: 7913

SEQ ID NO: 7916 - DNA, 325 bp, Homo sapiens
cccaggacttgaagttctttttttttttttttgagatggagtctcgctctgtcgcccaggctggggtgcagtggcgcgatctcagctcactgcaacctccgcctcccgggttcacgccattctcctgcctcagcctcccaagtagctgggactacaggcgcacgcgaccatgcctggctaattttttgtgtttttagtagagacggggtttcaccgtgttagccaggatggtctcgatctcctgaccttgtgatccgcccacctcggcctcccaaagtgctggaattacaggcgtgagccactgcgcccggcctttttttttttt

SEQ ID NO: 7917 - DNA, 23748 bp, Homo sapiens
  SITE (14721): n equals a,t,g, or c
agacatgggtgcaggtccacctccagggcctgcagaaggtggtgttccggagctggcagcaggcagcagctcatcagagatgcacagtgacccggccagagcagctgctactgcagaggtgggtgggcctgggggtgggagggtgttggtcctccccacgcaaggaatagcaaggagagcacccagggggtgggaagctcagacggtggcccagataggaggcctgtggcctgggaaaaaaggggcatgaagggagatcctagcctggaaacacagggccatgaccactgacaccttattacctattttgggagtggtggcaaaccccacccctaacctgtggccccaacaagccccgggagtccagctcctggccaggtcagttctttggttttagaggatatgattaagatgggagaaatcagctgggaacagtggatcatacctataatcccagcactttgggaggccgaggaaggtggatcacttgagatcaggagttcgagaccagcctggccaacatggtgaaaccccatctctactaaaaatatgaaaaattagacgggcatggtggcaggtgcctgtagtcccagctacttgggctcaggcaggagaatcacttgaatccgggaggcggaggttgcagtgagccgagattgcaccactgcactccagcctgggcgacagtgcgagactccatctcaaaaaaaaaaaaaaaaaaggaggagaaatccactcctcggaaatctaccataacgcccattgtgaggagttacagcaaggagaattctgctgtacactgtcgctaagagaagagagtgaaatcttcatttaagtaaagatgttctggtggaacatgtatacagttcatgaatgcatattgtaaaaccaagcagaggacacagaatggctcctcccacagttcagtacaaatttgcgaatgttcagtgtccccgtggggcagtgaactgttggctacagaatggctgacgtctgtgcttttgcatctgagggtgtagatggttattttgtttgtttgtttgttttttgagacagagtttcgctcttgttgcccaggttggagtgcaatggcgcgatctcggcttaccacaacctccgcctcccgggttcaagtgattctcctgcctcagcctcccgagtagctgggattacaggcatgtggcaccacacctggctaattttgtatttttagtagagacggggtttctccatgttggtcaggctggtctcgaactcccgacctcaggtgatccgcccgcctctgcctcccaaaatgctgggattacaggtgtgagccactgtgcctggccgtagatggttttttttcttggcttctcactgagtgagagatggtgttcctctccctcaccaaccacctgggcatgtgatgggaggcagggcatggctgatgtgggacttgaacccatactgctggttcccatccccctcgcagggcagcccctgccctctgaggctgaggttgcaagatggaaagccagtgctttcacctgttactggtcgtttactgttttgtgggagatttgcaagtgtaactttgaataaatgtgacttttgactctgagaacgagacaagccctcccatgcatctgtttttgttttgtttttttgagatggagtttcactcttgtcacccaggctggagtgcacttgcgcgatctcggcttactgcaacctctgcctcctgggttcaggcaattcttctgcctcagactcccaagtagctgggattacaggtgcccactaccaggcctggctaatttttgtatttttaatagagacggggtttcaccacgttggtcaggctggtctcaaactgacttcaggtgatccactcaccttggcttcccaaagtgctgggattacaagcatgagccaccacacctggcccaatgtgtctgttttgcagctacttccaggcctggtgtgaggttgtaagagacacgggggtgctccgggcccagcatcaagcctttcaggatggcctgaggagaagagcactgggggccgtgtttgccacatggcgggaagcccaggaagtggcagccggggcacaggagcagcgtgtggcccaggcctcccttgcccgctggagaagctgcgggcagcaaggccaggaagatgggcagcagcagaaggcccgggccccacaggccttcccagcatggccagtggccccgggcatgcaccatgaggcccagcagcaggcaggagagagcgctggggcccaggcagcccagtgctggacttggtgctgggctctgtgggtgcatgagtcctgtcggggccaggtcagccgagcccatgcttcctggaagccgcgagcctggtgagtgctgtggtctaagtgcagccccactctgtgcttccagctcaggcctcaagcctgtttttggcaggggtagagcgtaattcatggctgggtggcagggcaaaggctcaagagggtggttgggggtgacagggagaggccgccctggccatctagtcctgggccacatcctggcaccgcctcttgctgtgtgtcccctccttggggaagtctctaatggtcatgccttgcagtcaccagcacagccagccactcagcaagcgccataaacgcgctcttgccagggaaggggaggcaaagtggcactggcaggactgtcccctctctgcccctaaacaggatgcttgtccccgtctgtgattttctccttccaggtcgctctccatcctgtttacccagattctccctccagaaaagggagtgtgggaggtgggtgggccccagcctggggctgggcccagaaggccccctcccgcagggcactgggggggctccctgcagagagtcctggcctttatggccctggctgcagactccttcctctcccgcagggtcctagaggcctcggtgcagtcggcggtgcgcggcggtgtccagcgagccatcctcacccagctccggccggctgagctcaggcgcttcctgcggacagtgcagctcagggtgcggctgggactgccaggggccggcaaggtacgccccaagccccagactgacctcacgctctggccccggatggccagcagggggagcctgctgctggacgccccagccccttggaaacaggtgaagggagcctaggcagggcgggaggtccaaaaatgaccctcggaccaccggccttagaatcagcttgattcagccggtggtggcagcatggctggatgcctccccaggggcccagcaacctcgtatgcaccacctctccccagttctcagtcagcctctgacaagcaactctgaatccatcagcaaagatgaacctggcacctctcgagtgccaggccactgcaggtccggccgcaaagaccagcatgttgggtcacagcctgttagggagacattgaaatgcatgctttctcacggtgcagttgaggatcagaataggtacacgaggacagtagcatttttttgtcaagtttttttgtttatttttgagacagagtctggctcaattgcccaggctgaagcagaggagtgatctcagctcactgcaacctctgcctcccgggttcaagtgattctcccgcctcagcttcctgagtagctgggactacaagtgcacgccaccacgcctggctaatttttgtatttttagtagagacggggtttcaccatattgcccaagctggtctcgaactcctgaactcaagtgatcctcccacctcgacttcccaaagtgctgggattacaggtgtgagccaccgcgccaggccaagttttttttttttcttattggaaaagtgaaatatgcttattacagaaacctcagaaaatataaagtagaaaaataccaaaatttctttcataattctctctacccaaaggcatcggtcagtccctctccagaccagaagcagttagttctgacaccaacaagtggtgataagaggttgatagcctagcaagggggaagaagccaccaccaaaccaaacacaaaaaatgacactgcacagcagtctggggacatgtccttgaaggacacagccccaaagatactggcaggtgaggtagtgtccctaagatcaacaggcatcatcatgaatcctatttcagaatgccacaaagaatacattttagagaagattctaagagaaaaagctaaggtgattttttttttcagtcgttttttgttctcagacagtgtctcactctgtcgcccaggccagagtgcagtggtgcgatcacagctcactgcagcctcaacctccagggctcaaacgatcctcccacctcagccacctgagtagctgagactacaggcgtgtgccaccacacccggctaatttttttttttgtagaaatgggatctcactatgttgccagggcttgtctcaaactcctgggctcaagcgatctacctgccttggcctcccaaagcattgggcaggcccattacgccatgagccaccacacctgctggtttttgttttttaaatggaattgaaaggaactagccttggctagttgcagaattcacacatatggggctatggcaacagcagattctggagtctcagggtcttttctttctagataagttacagggcaattgcttttcagagtacttttacatttctattccattcttgtcagtaaagacaaggatcccataagctgatggagaaactgaggcctctagaaactaaacgctgggaatggcacccagggtgctgaattccagggtctcctcttttctgccacaggcacacatgccccagcagcccctttggagagccccctctctatagggtactagccgggggctcagactctggagtcagacggcttccgagggatgaggcctcagacaagtaactcagctttgaaatgttttcagtggggagagaaatagccccctcccagggctgtgctccgggaactgactgagggctaactattatgggcccaccccattgttggaatgtcttcagccacatgggggaatgggtggaagaggccgggatgtgtcctgccagctagagcagcgaagaaatcccagcggggccccaggaagtccaagcccatggggttcaggtgctcctctctggctactccttcagacccgcagctgctggacacaggccacagagctggtgcctcccgcgccatcactgcagtgcagcctgggtggacggaggaagccaaggggaacggcctgggctcagagtaaggagaccttgccccgggggacaaacggtgtctgaagtgcaggggtgaagcggtctccagtcctcaggggcctggaaatcagctccttgggacacggtcttatgtgtattgaccattctccccatccattccctcttcggaatgtttcagctgttctgagaaaacactttgcattcctgccccgcccctgtgatttctctttgggcggcaggcagccgggagaggctggaggcctggggagatgggggcagggcacaaggctaagctcagcaccttcctccaccctcctcactgtactcaactcctaggcgggcactaagagcagctgccttcctggacccaccttaacctcttgtgactcaactcccctttccagggtgcagggaacattccctctgccctgccttccagctctggccacagtggcctggacagagtagctgggtcccaggcctgcccctgtggacgagggaccagggaccaagagcgcactccagccctgagcccagagcctgcaaagcccaaagcaaggcccataaacggaggctacggtaagaggagctgtgtgtgcagtttggtgggtccgagggatgggggcaagggctgaggggcttgcctgagccatggctacagctgggccctctctggccagtgctcgttcctgcaggatcctggaaaagcaggcccaggcccatggctctgccctccttctggccctgaagggtcacgatgctcttggccatcaggaggaagtacctgcagcgccggtgcctcgaggcactgcttcacgggctgcggggttcccagcaggccaggtgcctggcagtggcatggcagcactgggtggatgcccaaggggcagagcagctggtgcggaccctggtgagtgggtgcacccctctccacactgaccatctcccatttcacctcatacttaacccaaacccctctcaaaagtatggcccttggacctactgactccaaaaccttgggggacaggcccaggaatctgcattcttaatactcctcagatgacacccccttgccatagccctttcactctggtgcagcagtgtcgggggagaaaggcagaagggctggggactgcgggggagcgtgagcacaagaggccttctctgccaactgtccccaaagctcagggagtggcacctgagatgggcctggcagacgtggtggcagcggatcctgcgactgcgagtggctcagcagttacagcagcaggaagatgggtgggtcctttcccaggtactgccctcttccctgcattccactcagccagccttccagaagtctgtgccacagccgcgcaccgtggagctttccctgcttgccagccccggggccccttcgttttcaggggagggggtcagttccattacagaacacacaggctggatgctggagcccttgctttgatttgtggccccagctcaggccaggcccacccggtccatcagtttgcgaagaaggtgtggcatgaggcatggctgccactcacactagcccatggagggcctgggtcctgagcgccccctccctcatttgctctgctctgagtacagcttcccagctcaccatcagatctattctgagcttgtgcatttggcctaggcaagactggctggctgcttggggcagagggaggggccctggggacaaaaggagctgggtacaggggttgctctagcaggcacagcacagaccccggagaaagcccacaacaatagcatttcctctcctccctggttccaggcctttaagaagtggcaccaacgcctggcagccaggagcccaaggagaggagctgccagtagcccaagaccctggagcaagccaggccccaagggccccgagagtggacaggaagccgccggagcaccgcggggttgggggcttggggcagagcatggggcccagctgcagctgtgacttgttctcatagaataaaaaacagaactgaacttagccttcccagggaaggaaccatgccccacacatccagggagtgatgacagaggggacagcttgaagagctctgaaggacaataaaacccactcctcagtcctagctgctgctttcagtctctcctagcggctgcccctctgccccagccagtgaggccaggaagggagtaaagaggacatcccacaattgcgtccacccccttggccatcaggctgctcttccactacacgaaacagcccatctgcacctgccagtcactgcccccaggccctggggcttgcaggtgactcgtggggagccaggccaggcagataacctctgggacaggacgaggggatgaggaaggcagctggcaggacaagggcctacctgaaaaatacaccaggaagctgggctgctgcacaggcccaggcagatctggggcccctgtgctggcaaatctcatcttagcctctgacagggaacggggcagcatcaggcctccacagccaggcaaaaggggaaggccacgagccccaccaagcacaagggttcagactgccttcaacccttaaggggcactttttctctcaaggctcagaatagacaactgtgccaaaaagcagcatggtaggtgtcagcccaatgcccatccagggggctggtgccatggacggctaagtgggcaggcagggcagtggtgtgccccttcagtcacaagtaggtggggcccagctgcccacctctaggaggtggaagggtacagcactttgccacatctcttctacgatgccaccagtgcctgatgcccttgcgtgttttgcctgtactgcacgggctccaagggtaagttcactgggagtcccaggctggctctggaggctgccttggttcgagggcttagttggcaacaaccactctcctcgccttctcaggaggtgccacccactgtggtcctctgcaggacgcaagtgctccccaccaaaagagcacagactcctggctagagcagagagtactaggttcccatgtggggccgactcaggtccaggaagagcctggaagcctcactccagtctagctgccattgtcaggtgggggagtggaggccggggtgggagagacacgaaggagagtggagttcccaagagaagcagcactgtggaggaggaaggcgggacaggagtggctccaacgcagggcgtcaggacgcagggtcatggagcctccgtttctctcgcattctgggtgggcctgttgagaagctccaatgtgtcttccaccacctgccagaggcagttgtccagtgggaagtcattgtccaccaggttgaccaggaagtagttgtcgtggatgtactggatgatggtgcgggacggggactcctcctcatacagctttccccaccgctcaatccacagggcaaaggcctcgtcctacacacacatacccccgcacacacgcacacatgcacacacacacagaggcaagattaacagggctctccaagggctctgctcaacaggacatttcccggaatagaacaaggcccactgccagtatcacttcccacccctgcccagaaataaacaccctgcgtcagcagtgacatgggtgagtcagagctgggtgtgccctgaaggctgggtccagtgtggccttcagtacacgcttgggacttggtcccaatccctccccacggttttccaggtgggcggggcaagcttgcccccggctcctttaccttccagaacatgaagctgacgggatccactacggtgggctggatgatctctcgcccagggaagatgccccaagtgacagcattcggctgcagttcaggggcattggtgatgttttcaccctgaggggatgtggggtgggggtaagacctgggccaagaacaactggagtcccactgcctggacagccttgactcaatgagtctgtttgggctcaataccctctgcctgcgcctccactcccggcctccactctccctgcgcctccactcccctctccctgtgcctccgctcctggcctcctctgcctgcatctgtgaatgatatctctccccacacaagcctgaacctagaggcgtcctggccacttcccctctcctccttgagcaccccctgctcactctctgatccattccctcttgtctagcccacctccaggagtgtgtttggcttgggtcactccaggggtctcttcactggcctccccggctctagccgtccccaatctctctcatccgtatgactatccactgtgatttgcctaaaataaagcaggaaccaagccaccccactgctggagaaaggcttcccttgcattgagggaaaactcaaattccagcaggacaaccatgatctctgcgggcctggcccctgcttaacactcccgcctcctcctgctcatgttcccggtttccccagatggtgcagctcactgcctctgcctgtcctctgccctgtcccaggaatacccttctctcctgttggccaactcctctttgtcctcagtgattcccacagatgaccctctgagaagccttccctggcctcccaggtgagatatccctcctctggacccgacagcatcctctcctgaacttgattttcccacttacactggctggtggtcacacattgatctgcctccctcactctaggctgggagctccttaagagcagggccccagttctgcctgtatctctctgtcttgcacaatgcctagcccaggctaggtgctgggtgtttgctcaacgaagggcctggtactctgtgggaaccctggggcctggcctaccttcacattgacaaggtggtaattaacccggagctcgtacttcttcagcacttgcagaagtgcttccgctgtctcgcgggaagtgaaaaactctaagtaggcctgtgggagagacaggtgcctgtcaccaaccccagccctgccagacgccctttcgcagacacctaaggtatcaggactactggcagccatgtgggcggaataatgaactgtggcgttggcacgtccataagcaaagggtgaggggagtggggacgtgagtttctcagtctggacaggtatgagggctatcagccacccctctcccaatcagtcagggaagactccacgaagaagccatttctgaacagcagcaactggtttgacaggccgagtcatgggagagaggccccacacattccatcctccccagtgcaagctgacaatgacattgacatctcctctagaaccagtgcctatcagggattaagctgggtttactcaaactcatttgctagaatgctgataatacgggaggctgggcacagtgagccccacgtgaggaaagtgggttcagggaagttgagcacgttggctactctgacagtaaacagtagagctggtccttaaactcaggtctttctgctccagggcccgtgggccttagatcagaacataatgttaactccagcagccctgggagaaaggtgtcaactcaggatagtaacagcagctgcctttcagggagtgcttcctgctcttaccatgtgccaagcacgttacatgctttgttaggtttcatgcccagaacacaagctacatcccattttacagacgagaaaaccaggctcagagaggtcgagtgacctgcctccataggtctgatttctatctttttttttttttttttttgagatggagtcttgctctgttgcccaggctggagtgcagtggcatgatctcagctcactgcaacctccgtctcccgggttcaagcgattctcctgcctcagcctcccaagtagctgcaactacaggtgcccgccaccacacccggctaattgttgtatttttagtagagatggggtttcatcatgtttgtcaggctggtctcgaactcctgaccttgtgatctgcccaccttggcctcctaaagtgctgggattacaggcatgagccaccaagcccagccaatctttttttttttttttttttttttttttttgagacagggtctcactttgtgggccaggctggagtgcagaggcacaaatatggcttactggagcctcaacctctcggactcaagcgatcctctcaccccagccccctaagtacctgggactacaggtgtacaccaccatgcctcggtcatttttgtattttttgtagagaatgggtttcaccatgttgcccaggctggtctcgaactcctgggctcaagtgatccacccgccttggcctcccaaagtgctggccgggttccgtgcccagccaggtctatctgacttaaagcatgagctcccatccgctccaatccatgctcattcaaaatttaagagcccaggagaggcaggctgctctgccctaagctctggggaacccacgggtgccggtcaagagaggggggcaccccgtgcctccctaccacaccttctggaagacatagcccccgctggggccccagcccacgatggggtcggaggacggcttcccgttgatgttgggctgtgagttgatggtgaggatgccctggcggttcacccgcagcagctcctccttcagcaggctggtctcagccgccaggggctcatcgttccagggcaggcaagtcacctgggagagacggtgagctggctggggcgaccatcaggtttggcaccctgagtccctctcacggcccccaacaaagacccagcctgtctttgcctccctaagcccttccaggtggaggtctcccaacttacccttctccctttgccatgtccacagcatggaggggagggcacaggatggggaagtcacagccccgcagcctggcctgcagctggggtcaggccaggggcaggggatgaaccagggtccccactccagcatcactcactttgtgaccattccggtttggttctcccgagaggtaaagaacaaagacttcaaagacactttcttcactggtcagctcctccccccacatcttcagcagctcctccttgggggacttgctcttcaggtagaagaggtagtagtccttcagctccccaaaggcaggggaagaggaattgcccctggcagaggggtgcccagaggtcagggcacactcctgacagagggcagtgccaccacatgcccaggaggccattcctgtaaattctgcccctgactcctcccaggtcaaccacaagcatgcaaacttcttctgccctcccgctcccaagaacaaagatgtatttgcaaggaaggtctgcaggccctcaccagcggccgttagggaactcgtcccactcctgggtacggtagatgtaactctttggtctggaggcccagaagatgggacgtacatcttcctctcggcgcttggggtgggcgctgagagcccagggtaggggacgcctgggtgaggatggggacagagaattgagacaagggattggctagagggagccggaagcaggggagcacccctgaggctgagttcttccatctgatgccctctgagactggagccttcgatgtgcccagctagccatggcacagacatccatctgtaccaccgtggggagccagcactgcagccggggctgctcttggaccctcctctggggatctctgggccactgccctcacctggggtcctcagtccacatccccaggcgcttcagcacctctgtggtagccatctcgcggttgagggtgtagaagtggaggcctggcaccaagccactggccagaagctcctggcacaggctcacggccagctcgatgccatagttgcggatggcagcatcgttgtctttgattggctcaatcacgtccttgatctcctgtggcacctccagcttggacagcttcacaagctgccgaagggagtggtagccctgtccaagacatgaggggctgtggcggctgctggccagcccgtctcccaccctaaatacttctcccccttccatcatccatgccaaccacagtgtcaggcagagggacccacgaaagtccgatcatattctaggagcacacctgggcttggcctgccgttttctcctcttttttctgtttttagagactgagtctcactgctctcaaacgccagggctcaagccatcctcctgcctcagcttctcaagtagccgggactacaggcacgtgccactatgcccagctttcccactttttacagagtagagcagctgccctaagcattccagccttgggttgagccagccttttagccctagatgtgtctgttggtaacatggtgtcatctaacccagctgttcccatgctgcactgatcatccgaatcacctgccaagctcaagaagtaaaacacacattccgaggacctccctcagatttactgagtgagaccctccaggggtgggacctggagatccactttttgaaaaagcttatcaagtggttctgatgacagccacctttgggaaacactgatttaagcaggatttgtaatgagaattagaatcccttttggtgatgcttgttggccaaagtacaacaaacccctcaacagacactgttgctgggttttggggggaaaattagaggtaaccaaaatggggtggccaagcaacgctgtgcaagttctggacctgagaggagatctgggaagaactcagcgaactcagcactccacccagagcccccagcctgtgcgaggacggtgcggtgagagtggggtggagggagcttatgggctctcctgggcccctcacctggatgggaaagatcccggggacgatggggcaagtgatgcccatgtcggtgcatgccttcacaaagcggaagaatgtgtcagcctcaaagaaaagctgcgtgatgatgaaatcggctcccgcagacaccttctccttcaagtgcttcaggtcagcctcaaagctccttgcttcggggtggcctttggggtaacctgccaatagggatgacagtcaggagaggctggcctccacctgttcaaggcgagggatgaagagaccacagggactgggcagagagagtcctctgctttgggggctctgatcttgcaccttccaacagcacagcacagcttgaactaaaacagtgagtggctgggctcatgactgatatgcttctgaccccagagatgactctcaggggaggtggctcagagcccagttccaagagtgggggtggattgctccaaactcccacactgtcctgccttgagcagccaagcaaatcaggcctgcacttggtggccatagaaaagagaaaatgctacagttagcactggctgggcagcatctggggtactaagcttgacttttctctaggcaccagattaaacattgtttttaatgtaacactgaaattactcaggggtccaagatagtgaaaagctaaaaaccaagttacacaaggaagaactgaagaaagtgatgttttcttcaaagaaaataatggatggcagggtgcggtggctcatgtctgtaatcccancactttgggaggccaaggcaggaggatgacctgaggtcaggagttcgagaccagcctggccaacatggtaaaaccccgtctctaccaaaaatacaaaaattagccaggtgtggtggtgtatgcctgtaatagctactcaggaggctgagtcaggaaaattgcttgaacccacgagacagaggttgcagtgagccgagatcgtaccattgcactctagcctgggcaacgagagcgaaactccgtctcaaaaaaaaaaaaaaaaaaaagaatgaaaagaatacagaaactcctttcaaatgtccaaaggtctgtcctggggaaaaaggatccaccataggtgagtttgttttgttttgtttcagagacagggtctcgctctgtcacccaggctagagtgcagtgatacaatcatggctcactgtagccttgaactcccgggcacaagtgatctcccacttcagtctcctgagtagcttggactacagatgcaagccaccacatctggctaattaaaaaaattttttttaattaattatttattttttagagatggggtcttgctatcttgtccaggtttgtctggaacttttgggctcaagcaatcctcccaccttggcctcccaaagtgctgagattacaggcatgagccactgtacccagccccctagtgaagttctttattagtcatattctgtgttgtttccaatggcagaaccagcatccggttcagagagctggctagagtactataagccactcacaaaacaatgagctcctggagtctgaaaacacaggggcagtggatgctgaagacaagattccagaattgcttaggaggtgggatcagatgtcccataggctccttactggctctgtgaactctctgacccctttcctcaatgactaaacttactagccgccttgctcggtcaggcaagcaggatgaccataggccttcatgaaactacatggagtgctggtttcatcagcccaagcccagggcaggactctgagccaggcggaaggccaagctgctttgctctgataaggcagttccgttcttaagaaacccagagtcatcaaaaaatgaatataaaaactattgtttcaaggggtaagggagtgggggataaagcaatggggcttcacacttgcaataacaaagctattttcccagtaggaatttcagaaacaacaaggctttttaatagctgaaaagtatagctacaatacctaaatatcaccgaacaaatctagcatttgattacgtatagattttgctatttactctatttttctatcatgaacagctgagggctttcttttttaaaatgtttttattttttgtagagacacggtctcactgtgttgcccaggctggtcttgatctcctgcctcagtctcccaaagctctgggattacaggcatgagctaccatgcccaacaggttggtgttttctaatccactcatcttcattacccacttgataagcaaagtaagaaaccattcagcaactgtgagctcacagcttcactagtttccaatcattatcacctaacgcccatcacgggtgcatattcccccagtaactgactatataatggctgatacaagcgatgacaatttaacagttggaaatgtctgttctctgactcctaatcagcgcttcccagacttagcacctaaacacccctgttgacagaatggacatgtccatcgggggttagggacaaggccaaagttactcacaacatgtaattttcttgaagccacgtggtttgttttttgggttttttgttttgttttttttgagacggagtctggctctgttgcccaggctacagtgcattggtgcgatctcggctcactgcaagctccgcctcctgggttcaagcgattctcctgcctcagcctaccaagtagctgggactacaggcacgcgccaccatgcccggctaatttttgtatttttagtagagacggggtttcactatgttggacaggatggtctcaaactcctgatctcatgatccacccgccttggcctcccaaagtgctgggattataggcttcagccaccgcacctggccttttttttttagttcatatcactttagatgctactccataacatagccatgtttaatataaaaatggtaggatttctcccagaatattggcaaaaaaactgtcatcccagaaaatgtgccaatcccgggacttcctgtccctggtgcacactgtcttgccatacctgagcgctgtctgagacgctgagggctcaatgccagccttcagcttcaagggtgggagagaagtccaacccacccatttctgttgggggaacctggtcttgtggctgtggccaatggtgattctctttcctgggaatttggaacggaggcctgtccattagcctggggaactggctggaactgacactctgcacactcaggagcaggccaggtgtgtggaaaagcatgggtatcaggtctcccagatgaagcacagatgtgcagtgggaagcggagatgggggaccctgtggccccagagggaatgagggagggccttgctttttgacctcttccagtgccttgtgaggtctgaggccatctcctgatcttgggttccctgccctctggaatcctgttagtaaatatccctcttttgtggggtgttgttttttttttttttttgagatggagtcttgctctgccactgaggctggactgcagcggcaccatctcggctcactgcaacctccgcctcttgggtccaagagattctcctggctcagcctcctgagtagctgggactacagccgtgcaccaccacacctggctaatttttgtatttttagtagagacggggtttcgctatgttggccaggcaggtctcgaactcctgacctcaggtgatctgcctgcctcggcctcccaaagtgttggggttacaggtgtgagccaccgcgcccagacccctctttcgttttaaagaaaagaataaggccaagcaggctaagggcacagccaggcagaggaacaaaaagctaggggtcgatggtggcaggcccaggaggggagtgggtgatacaaaaggagcaaggacatggtgcagttcacctctgcatgtccttcatccagcatggacccatgagtgcccctgatcactgtgtcctgaaccgaacaccgacaggctctctgggcatctcagcctccctagctccatccccgccaccaggatgatccagccactcacctgccacacagatgtcaaagtagtcaccaaactcacttcggatgtgcttcaccaggtccactgcgtagttgaagcctccctcctcctcttcccactggtcacctattgggtctgcagggttggtggaggtcatagtcactgggtctcacccaacctccagagaccctttctgttccctctacctagccccgacacccaggactgcgagtccctggaaggcagaaacttcatattatttaggtttggttcgtctctttctagcacttggtaagacagcaggagggaaaaaagcagcccaccagttcaatattcactgcatgctgaccctgtgctggcggtggagaataggagaccaccgctgcttctcaccgtgcctggaggattggagagcccttccctacttctacctgggcatgcctgccaccctctcccatcccacggccttggggctcctgcctcctgggagaattttctactcatctcaagtgaaggggtcttgtggtagggagcacgaggccataggatcccacccatcaggctccctcttcccactcttaggtggcctgacaacagcgggcaccagaggcctgaccggctattctcactcctggatactctgttactctgtgattgggccaagtgctgggtgcagccagcaatcgatgcagtggtgtaggcaaggcagagggttatcaggccgcgactgcattcctgacggaactcctatgtcgaggtcaagaggtggaagaggtggctgcctgtgtgtggtgcccaggatgactcactacccacaatgcctactgacactactggcggggatgggatcctgcggatcctcagcgtggggcccaggaagaagtaaaggaccatttcaggaaccaagttcaggctaccaagtggcctccgggaaagccagaacccagagtgtaggggagtgctggctccacacctccccgcagcgccatgatgttcttcaggcccagctgcttagctttgtgcagatggcccgtgatctcctccaggcgctgacggcagcaggtcatgtgcaggatggtctccaggccacagtagttcacggcggtgctggcgatcatcatggaggaggtctccttgtctgagccagggtcacctgctgggtgccaggtcacgtctatgtagagggggccacctgctgccatccggtcaaacctgtagggggtttgtttctgaagagaggttccaggagaaataccatccgtcactgccttcccatggggcccgggagttagagaagcatcaatgaaggttggagacagaccaatcagcgttcatatcctggctttgctacttatagctgtgtgatcttgggtacattacttaatctctgtgagttctgtttccttatttataagacacggcagatagtagtacccacttcataataacactaggatgctgggcgtggtggctcacgcctgtaatcccagcacttcaggaggctgaagtgagtggatcacttgaggtcaggagttccagaccgcctggccaacatagtgaaacctcatctctactaaaaatacaaaaattagctgggtgtggtggtgggcacctgtaatcccagctacttgagaggctgaggcaggagaattgcttgagccaggaggcagaggttgcaatgagccaagatcacaccactgcactccagcctgggccacagaatgagactctgtctcaaaaaaaaaaaaaaaaaaaaaaaagcaacaacaacaacaaaaaaccataacactaggagaatatgacggcagctggttccacagaacttagaacagtgcctggtgtacaaaccgaatactcagtatatgtgaggtgccgttataatcactattacagaggtaagacacaacaacagcgctatcattttgtgtgagagcagcacttcagacttttcacagcgcttgcctgtttattatctcaggtgagttaagacatcatgattgagagttaggggaatcctaactgtggcaagcacagcctcgctgtaggaacagttagaaagagggtcagcagactcactttctttcatgccaccccccaagccctgtgcagcagcttacagttatgcagaccaaggccaagttccgaaacgagactcaaaaaaaagcctggatgtgcacgagtacttgtgttacaagctatcaacggtgtatttaaacatccttgtgcatttaaacttcaaaaacttgggagtgacacgtgagacgtgcatacagtaaaaggcataaacttaaaaaaaaaactgcaattcatgaagtgctaatgtaattcagttggcatttctagagttcaagaagcataatccaaatttctaacttgctgaaaacaatctcactgctttgtgacttcctaaactgcactcgtgatccagcccccaagttccctcaaagaatacagtgtgagaatcaacatttttaacccattgaagagtgtgtctaaaataccttgacactgtggagggacttttacaggcaacagagaagttgcagatcagatgacccactctgccttctccttcctgccccctccggctgcttttttctgccgggttaaagggcagcccagcctcagggctgacagtttgctccccaggcaccaccactcccgcctcccaccttaaccttgcatgagtttaccttgagatgagattgacagctccctcagcagttcgaggagggaagaattccagggagaaccacttgtcaccagattccaatcgccgcctcatcttctcccggagtctctcatgccgctcggggtccaggcccggggtggaacatctcgaactatctttggagctctcactgccactgctggcactgccctccaagcaggggttgaggctgctgtttcctctggcttcgttcaccatggctgggttcctactgcacagggtggggcagggagcatcagggggcaggcagccacacccccgacacatcaagacacctgagtggcaggttcaagccggaggcgctgtatttccacacaggaagaaggccaaaaaaggtgacactgccccctcccagtggctccatgctcctcagctatggctgtccgggccgcctcactcaaagccttgccctccgctgctgccaggctccttgcatgcaaggcagcccccacccggcactgcaacatgctcctcggtgacagctacctgatggaaggtggcacagaggacctcacgctgccgacctgcgaggcccatattcctagcgaggggcagtagtgcccagctgggaggaccctggcttttcgatggtccatctctgtcagctcaggcccagagtgcgtggggagggaacagaggcaccttccccagcgggtgtgttcaactgggcggagctgcgacaaaggaagaggcttgagctccagccagcacaagggggcgggggcaaggcttccaggcgaggagggagggctgaggctctagtaaggggaggcggatggaaggagggggactcaggggcagagactgcaggggttggtggagatgaggccaacaggcgttcagggataccagatcaccctccagagaaggaacagctcactctggctggctctgcctggaacatctgttacttgaaacagttcgtgcacaggatggaaggggtgagggcttgactatgcagccagatttctcctgaattcatgctactccaaaaagaccgtgttgtgggttagaacttgatgctggccatgttccaaaaatagccagacccaagttcagtaagggcacgaatttctcagaacaaaagctgccccatctgtgcttgccttgcaggctgctcttcttacacatcacagaattcaattcaaatcatcacagtgacccagctactgggaaggctgaggcagaaggattgcctgagcccaggagttcaaggccagcctgggcaacatagcgagactccatctcttaaaaaaacaaaaaacacacctgtaatcccagcactttgggaggccgaggtgggtggatcacctgaggccaggagtttgagaccagcctggccaacatggtgaaatcccgactctactaaaaatataaaaattagccaggtttggtggcgggcgcctgtaatcccagctactctggaggctgaggcaggagaatcgcttgaacccggaaggcagaggttgcagtgaaccaagattgtgccatagcactccagcctgggcgacaaaagcaaaactccatctcaaaaaaaaaaacaaaaacaaaaaacagaaacaagtaatcagagccaccagggcacagacaggccaacagagggcatagggtcatctggcagtctggttaagaaaataagacaaacacttaaaaacaaacaaaacacttgcacagcaatgggcaaacacacagtagtgaatgggtgtgtggtgacatggcacaacagaggaaagcccaggtgaggttcatttctttcagactgtccaccactaaccctgtgtacctaaccatttggggtcttagactcttttgacaatctgattaaatgcactgctcccttcccctgaaatacacacacaggtgcacagactacacggggatacatccaaagacaaggagttgattccagactaagaaccctgggccaaagctttctccctctagggctgctctctttcattctgacctcaaactccagattctcagtggggatggctgtggggagtgaggaacgggggcgggggggaggagtaacagcaagagcagccagttggctttcctccagcgtttaagggcgcacctcgttaattgcttgctggaacagaacctagagtaggaggaagctgaaccacctgtaaaccctctgattttcaaagacttattgcattcctagtatatgccacgcatgtgccatatttgtaagccaactcccacgatttatccgttatcagctggactcccatagcaccctgggttgtaactgtgggtgaaaaggcctgtctcctttctctttccccagttccctgagacaggaccggtgtcctgcctggggtatccccagagtttggcacacggtgatagccaacattcactgagcgccaaagggccaggtgctgccactctctcaaaataagcctctgccacttactgaacaactagtctgcgccaagcactgggatactaagcctacgactcccagaaaggtcccggcggacccccgtgcgcagcgggacgcagtgggcgccagggaccgcagtgccccgggcccagcgctcttctccaggtgatcgccggggaggcaggtttaaaaggcaggagccggaagccgtctcggcgcccaggtggccgagaatccagtcaccaggtcactgagtcaccgatgggggcgaggacacgggcctgggccggtcagaggggcgggatcgtcacccctggctcaggggcccctccgtccaggcagggagccaaagtcagtcttcgcttgagggttggcggtcgctggaagtggtagccattgggagttacactaatcccgcgaagggtgcgcaagggaggcggcagccccccccaagaagagaggcaggccggcctccagcgctccccgcccacaagcacgtccttgcccccgggaggttgtttgccggctccaggatctccctcccggcgaccccggcctcgccgtcactcaccctccagtcccgggtgactcagaacgctcggccgccggccgcaccactgtggccgctgcaggggcggggaacgcagtgaaggggcgcggc

SEQ ID NO: 7918 - DNA, 259 bp, Homo sapiens
ggggttggtagaggggtccagagtggcagtaaaggaggaagatggcggggtgcagggggtctctgtgctgctgctgcaggtggtgctgctgctgcggtgagcgtgagacccgcacccccgaggagctggtaagaagccggcggagtcggcctggggagggggcggttgctaagggactgagagaggcgttgccgggggtggggccgggccaatctgggcccgcaggtggcagcgggtggggcctggggaccgcagccag

SEQ ID NO: 7919 - DNA, 101 bp, Homo sapiens
gtagctgggattacaggcgcctgccaccacacctggctaatttttgtatttttagtggagatggggtttcaccatgttggccaggctggtctcgaactcct

SEQ ID NO: 7920 - DNA, 1491 bp, Homo sapiens
gccaacatctcccgcaggaccccctaatcttcagggcagctcccagagcatggatccctcctgattccactcagcccgatgttcctcacagtcaagctgctcctgggccagagatgcagtctgaaggtgtcagggcaagagagtgtagccacgctgaagagactggtgtccaggcggctgaaggtgcctgaggagcagcagcacctgcttttccgtggccagctcctggaggatgacaagcacctctctgactactgcattgggcccaatgcctctatcaatgtcatcatgcagcccttggagaagatggcgctaaaggaggcccaccagccgcagacccagcccctgtggcaccagctgggactggtcctagctaaacactttgaaccacaggatgccaaggccgtgctgcagctgctaaggcaggagcacgaggagcgcctgcagaagataagcctggagcacctggagcagctggcccagtacctcctggcagaggagcctcacgtggagccagctggagagagggagcttgaggcgaaggcacggcctcagagctcctgtgacatggaggagaaggaggaggcagcagctgatcagtaaacgggccatcctacccatttgcatgctaaaattctcccggcctcatccttacgtgttccctggtgacttttcctactacttcctgctgatgtggatgcgtccacacccctttttgaaccttccaagcagctggagggtttttggatccctgtcccctcttgggcctgaggtcctccctctgaaatgcagagtgaaccaaccctcatcaccatgcttcccctagaagggttctgatcaccggagggcagccccaaaggccacagtcccctcctgtgctggcagctttgcccacacatacccagcagctccccaggctgaaagcagccctggcccagggtctccatggttctaggcagaccctctttctccttcgggacagaaagacaatgtgagttcattttcctccatcctcagaccgtgacatctcccctaggctccccagcagccaagaggagaggaatgtcaggtagctgccccttgccttctgggtgaggctgcccctgctgttctcctgcttgtgcttccagcttaagggacaggcacagcaaaggtgagagtgggaggagggcacgtaccgggtgccagccctggagccctcagggagacagacacagaccaagaatagcaggaaactgagcctcaggcagaaaaaaagttcagcaaagtcatacactccctgtggccagcgtgaacagagccatgccccaccctcccagactgatcagtcagtaggtatcacagctcacattacctgcccagcgctgcccaaggctccctggaaggaaaaatggtatctgtcaatgaggatccttgccctcacagagcacgcagcctagatgcagagagctgctatacatgtgaaaagtaaagtggtgacatgaaactaga

SEQ ID NO: 7921 - DNA, 1491 bp, Homo sapiens
gccaacatctcccgcaggaccccctaatcttcagggcagctcccagagcatggatccctcctgattccactcagcccgatgttcctcacagtcaagctgctcctgggccagagatgcagtctgaaggtgtcagggcaagagagtgtagccacgctgaagagactggtgtccaggcggctgaaggtgcctgaggagcagcagcacctgcttttccgtggccagctcctggaggatgacaagcacctctctgactactgcattgggcccaatgcctctatcaatgtcatcatgcagcccttggagaagatggcgctaaaggaggcccaccagccgcagacccagcccctgtggcaccagctgggactggtcctagctaaacactttgaaccacaggatgccaaggccgtgctgcagctgctaaggcaggagcacgaggagcgcctgcagaagataagcctggagcacctggagcagctggcccagtacctcctggcagaggagcctcacgtggagccagctggagagagggagcttgaggcgaaggcacggcctcagagctcctgtgacatggaggagaaggaggaggcagcagctgatcagtaaacgggccatcctacccatttgcatgctaaaattctcccggcctcatccttacgtgttccctggtgacttttcctactacttcctgctgatgtggatgcgtccacacccctttttgaaccttccaagcagctggagggtttttggatccctgtcccctcttgggcctgaggtcctccctctgaaatgcagagtgaaccaaccctcatcaccatgcttcccctagaagggttctgatcaccggagggcagccccaaaggccacagtcccctcctgtgctggcagctttgcccacacatacccagcagctccccaggctgaaagcagccctggcccagggtctccatggttctaggcagaccctctttctccttcgggacagaaagacaatgtgagttcattttcctccatcctcagaccgtgacatctcccctaggctccccagcagccaagaggagaggaatgtcaggtagctgccccttgccttctgggtgaggctgcccctgctgttctcctgcttgtgcttccagcttaagggacaggcacagcagaggtgagagtgggaggagggcacgtaccgggtgccagccctggagccctcagggagacagacacagaccaagaatagcaggaaactgagcctcaggcagaaaaaaagttcagcaaagtcatacactccctgtggccagcgtgaacagagccatgccccaccctcccagactgatcagtcagtaggtatcacagctcacattacctgcccagcgctgcccaaggctccctggaaggaaaaatggtatctgtcaatgaggatccttgccctcacagagcacgcagcctagatgcagagagctgctatacatgtgaaaagtaaagtggtgacatgaaactaga

SEQ ID NO: 7922 - DNA, 1491 bp, Homo sapiens; identical to SEQ ID NO: 7921

SEQ ID NO: 7923 - DNA, 480 bp, Homo sapiens
ggatctcatctgtgttgagaacactagctcttgggctgcctgccatgggacccctcactttgcctagttttgccctatttcaaactgaagcctgtaccagtgcacctgttgaaggctccctatttcctctctcgtcgctagggagaaggcactttttctaaacttcagccttgggcagaaactctttcccctaactccccacggcatctctcccctacctacctacaggtaacaattttgctcatgttgggggcatttcaggacagccaccacatccagtagccagcttcgtgtttctatccacagagaaatctagcttctcatcccagcttcttcctgggtcacctgcaggccaacacccctcagtccactggtccatggcaaaatagtctttctgatagaaataggcagagcatcctggtccatgtgctatttagtcagtcctttgcttttcgatcaataaacatatatgggcctctg

SEQ ID NO: 7924 - DNA, 481 bp, Homo sapiens
ggatctcatctgtgttgagaacactagctcttgggctgcctgccatgggacccctcactttgcctagttttgccctatttcaaactgaagcctgtaccagtgcacctgttgaaggctccctatttcctctctgcttcgctagggagaaggcactttttctaaacttcagccttgggcagaaactctttcccctaactccccacggcatctctcccctacctacctacaggtaacaattttgctcatgttgggggcatttcaggacagccaccacatccagtagccagcttcgtgtttctatccacagagaaatctagcttctcatcccagcttcttcctgggtcacctgcaggccaacacccctcagtccactggtccatggcaaaatagtctttctgatagaaataggcagagcatcctggtccatgtgctatttagtcagtcctttgcttttcgatcaataaacatatatgggcctctg

SEQ ID NO: 7925 - DNA, 481 bp, Homo sapiens; identical to SEQ ID NO: 7924

SEQ ID NO: 7926 - DNA, 1128 bp, Homo sapiens
cagttctcaggccccggctaaatggggaaagccccttgaggatggggccgtgttagcaggttactctcagtcctcagcacttccgcatccattatttctcttaatgaattaatatctgtgaggcgtgtgttataaataatattccctaactggatttaaaaggggagcttcctgggaatttcaggctctttaaggagtgtggcccttgtcaccctggggaccagggccactgcggccagaggtgtcagccagggtgaggacctcttccttttctttgagagcaggactaaattaacaagctgaagccagcttaccttggatgtggatcattctggcagtgttcaactttgagacaaggaagtgtgcgacattattgtcagcggagagaggccccaggcagaaggtcacttcctgaggtgtctggggagcactgcggcaagagacccccatttcccagcaaatgcttccttactcaatctttcggctacctggactttactaccacatctacagagccatcattggcttctaatgatgagcctgaggcaccggggcgccttctgaatcatcagagccagatgaaattgtgtgttattgagacgtgctgttcccatctttgcaaagaggccatggatgcatgcaatgaaagcttttgctgagccgaatacgctgttagcacgaccgtctccccactgacgtattgcaccagacaaacaccagacgtcaaggacattgggaaagcaccaacatattcagccaggcagtgtggggatgcacccccagtcccgagatgaaaacctccagccagcccagcgcttcccagcagggagcacagaacaccatgaagcctcaagatgttgctttcctaaaacagaccagcgtggttcatggatttggggctctaagtgccccccatttcccttctcctagacctcgtccccagcatcgcgacgctattggggctggagcacccagctgggaggttaaactttcctaacctgggctcaaccttggtttcgtctctcagtcttaattttgcttcagcctggtctgtcttgctggtttatgctgtcatctaacacagggccagcaatgaagatgcttagtaaaagctgttgaaaggataaa

SEQ ID NO: 7927 - DNA, 1128 bp, Homo sapiens
  SITE (819): n equals a,t,g, or c
cagttctcaggccccggctaaatggggaaagccccttgaggatggggccgtgttagcaggttactctcagtcctcagcacttccgcatccattatttctcttaatgaattaatatctgtgaggcgtgtgttataaataatattccctaactggatttaaaaggggagcttcctgggaatttcaggctctttaaggagtgtggcccttgtcaccctggggaccagggccactgcggccagaggtgtcagccagggtgaggacctcttccttttctttgagagcaggactaaattaacaagctgaagccagcttaccttggatgtggatcattctggcagtgttcaactttgagacaaggaagtgtgtgacattattgtcagcggagagaggccccaggcagaaggtcacttcctgaggtgtctggggagcactgcggcaagagacccccatttcccagcaaatgcttccttactcaatctttcggctacctggactttactaccacatctacagagccatcattggcttctaatgatgagcctgaggcaccggggcgccttctgaatcatcagagccagatgaaattgtgtgttattgagacgtgctgttcccatctttgcaaagaggccatggatgcatgcaatgaaagcttttgctgagccgaatacgctgttagcacgaccgtctccccactgacgtattgcaccagacaaacaccagacgtcaaggtcattgggaaagcaccaacatattcagccaggcagtgtggggatgcacccccagtcccgagatgaaaacctccagccagcccagcgcttnccagcagggagcacagaacaccatgaagcctcaagatgttgctttcctaaaacagaccagcgtggttcatggatttggggctctaagtgccccccatttcccttctcttagacctcgtacccagcatcgcgacgctattggggctggagcacccagctgggaggttaaactttcctaacctgggctcaaccttggtttcgtctctcagtcttaattttgcttcagcctggtctgtcttgctggtttatgctgtcatctaacacagggccagcaatgaagatgcttagtaaaagctgttgaaaggataaa

SEQ ID NO: 7928 - DNA, 5440 bp, Homo sapiens
ttatttagacataggtttttattgatatcactcctttgtatacttaactaggaaaataaggcaaaaacaattggtctcgattcctctgtgcttcttcagggtacgtctgtcttcccagtcaccgctccaagcaggactgcacggttggcctccttgtgccacatcctttcctgtggcctcaggggcctgaattgggggcgttgtgagggtccccaccaacgtctgccagcggcttctgtcccacaagtttctatgcagacaaggagacaatgcagccaggcgtgtcctgaatccagaggtggtaaaatggggacaaacaggcctcttagagctgggaacacgtggtgtgtggcatctgtaaatacatgggtatgcaaatgtacactatgtatgcatatatttattagatattttatatataataaaatatatattaaagataaaagacattaaaatgctagcagtgttgtctggtgggggcagtcgaggtgatgtagtaactgcttcttttttcctttatttccccgtgtttcactgttttctacgcagagcttacatttctttttgagtaagattactttaaggaaacaacaataacaaagtaaaaacacctactgtagagtcaatacaatttcatctaaatcacagatttcttttcttatggaccttgaaaagctgattctgaaatttatatggaaataaatgaaggaccaggtacagccaggacccttgttcttcaggaaggacatggttggggctgtgccctctcaaagctcaagacaactccaaaagcgaagtctttagaacaagcagcttggcaagaccacgaacacacgggcagtgccgcagagcaggccaagcccactctcacccagaaaacagacctccgttaaaacaggtctgccgtgtttaataatggcatatgcataagtgtgtaaacagcaaataaacactactcaataagcagtactgaggcaatgcactaaacaaaggaaaatgagattcgatccctacttcacattatattttaaaaaatcaattccacatggattaaagacttcgatgtgaaaaaaaaaagccattatgaacctcttacacgatgaggtagaggttatctcctaaacctcagagcagggagggctcttaatacactcatacatacacacaatcatgaaaataaccaataagctaagctatgttaaaattgagaacttctactcatcaaaggacaccatcccaccaagagattaaaaagacgagccaggaagtagaaaagaatgcctgggcatgtacctgacaaaacattcatatccagcagatgtggagaattcatatcagtcaacaaggtaaaagacaaacaacctaatagaaaagtgctcaaaaatccccaccagacaattcacagaaaaggaaacaataagctaccattttatacttaaaaatcaggcgacagcgaatgctggcagaaatgtgaatgtagcaaaaaagggactcgttttcaattctggggaaggtggaaactcgggtgaccactttggaaagaactgggtgtcatctggtagatgtgagcatgtccgttccatggcccataatagcccttctttgttgtatgcctggaaaaattctggcccttatgtaatagggatgtttagaagaatgttcacaccagcattgtttgtaatagtaaaaatatgtaagcaacacaaacatctccatcagtagtaagctggataaatagattgtggtctgttctgtgttagaacactctatagcagtgacacagaatgaaacaaagccacttgaattcacatgatgtatcttgagcaaagagaagtcatagaagactacgtaatgtaagatgccatttgtgtaaggttcacaaacaacaaaaccgagcaggacgtttctccactgagacacacatagtggaaaacacacaggaaaagcacaggaattgttgcataccctgcaggtggtgcctcctgtgcaggggcaggtcagggtgcccacaggtaggggcatgtcacccgggggtgcatatgcaggtgtttgtccttattctttttccttaaacagatatgcaaattttatgtactcttttatatgtataatctatttccaacataaggggaacaataataaaacatttagtaagaattatgtattatttttctttagtgttgatccttgaggaaacatttgctgtacaagaagaggaagaagaggctgatgaagactacttttaaggggattaattggtatccttgagggcttttgggtctggtgtcactggttgctatttttatcttttccaagcctatggtcttattttccttgctacaccttagtaatgactgtggactttggggcatgtggttgtgggaagcagcaagagggggagctgccagccaggccactggcagggactctcatgggacctgccaagcctgtaagggcctcctcacagtgccacagaagcctcggttcttgtagagggaccactgccatcagtgttgtccagcctcagccccacctccacccaactcacacccagcaagcaaactccaatcccacggcaatgatcatttggccctgcgtatagctttgcctttaaagaaggagcaggggagccccggccgcttctgtcctgtccagttggttacagttcttgctgtaaattaatactcacttcagattcttgtgagttcttttagcagccattcttaggtgcttgatcaattattctatattatctactgacttcctgggcctacaaaattgaagccagaccctgaaatgtggcaataccaccctgtcaaggcaaacatcacagtgggaacatcacagtgggaacagttgtcgcaggtgacaactggccttcctccctgcctttccaaggggttgttggaaggagctgctgcaacatttccattctgcagatgagagaactgaggcggcagggaggttgggtaaattgatcaaggcctttcaagctggaagtggccacacagactggtttcaaagtcaacatcagagtgaatggcagatgatggggcccctgctgttcgtgtaccaggagtgtctgtgaatcagagctttgtggcttggggagtgagcctgccacacatttttggtgaatttgacggtggaaatgttccagcatagacccatcttgtttttgcatcattccccctcctgccttgattagaagatgcccagctggtccaaaggccccatgaccgctgcttctgggaagctatttagtcacttcccacagcaatatttgttccttaagcaaatagaaatgtatccatttacacgtttgtgaccacagggaaaggcacctggcgctcaggaataaagctccaccctctcttttcaccaacaaggacacagaagggttacgaggccatgaaatgcacttgccattccttccttcacactgttctgaaaagccttcttaaccgtaacctaccctacaggcctctcaaaaggaatcgatggaaagtcccttgcaggacgtgagatattgactaatgttgcaaaaacacacctacttctgaaagaattatctggttaccagaagactttcccttctggaaattctccaaggctgtccggccccagggcgggggtgaatcgtaaagtaccaaggagcccaaagccttagagcacctggctcagtggttaaagaaggaaagatgcagatgacaggtttgaggctgggaaaaagagggaaaaattaaaaaaaaaaaaaaaaaaaccgcagaggccggaaagatcaggtacctaggagcagctgacagaaaagaaagcttcagatgtgagcagcaggagggcagatgctacagcaaggaagccccttctcagacacaaagccctccacaaaacgatcctctaggtggactttcttctgcaaacattaccccatccccaattagaaggattcagagaattgaattaagggttttgagcatattaacacattgaatatttggaaggaaaactaataaaagctgtctcttactatattacccatcatggaatggaatgcatatacaccactgtaatagcaggttctctagaaggaaacacaaacaaaaaaccagaaccaacaggatatgtgtatatgtatatatagagagattacttttaaggaattggctcaggtgactatggaggctggtaaatttgaaatctgcagggtgggccagcaggctggagaccccaggaagaccgtgtctgcagcccctgcttgctcagggaggtcagtctctgttccattcaggtcttcagctgacccggggaggcccacctactagcaagggccatctgctttactcaaagtgcacgggtttaaatgttcatctcatccaaaaacatcctcacagggacatccagaatgaggtttgacttcacgtctgggcccagccacatggacacataaaattaagcatcgcaaccatgtacacgctacagctgtgaccgctgttggtggatttagtgtgcgccagcgtcatctaagcttcatgaggacggggatttttctttttcttcactgctatgtttccagtgcctagcacttaataaataaaataaaataaaataataaaataaaaacactgttgaccacatgactgtgttgctgttgtttgggattagtgtgtgcggctgtgcatgcattcatttgggaattggtccctctgctggacagacactaaggtggcaccagggtccccacctcctagtgtgttcatatcttgctggaatcctctctccttgatgtggggggatctgtgacttgcttctgacccacagaatatggtagagggatagcacgtctctcccatgatccaggtacattccctggcctccacccacagctcacttgctctagagcctccctgctggctgatgacgtaagtggccgcactggaaacttccgcgtggagagaaactgagggcagccacggacctggacctggggccctcagagagaaagtgaactcggccaacagcctgtgggaacttccgaagaggtggattcttttccaggccgtcctcggatcctccgcgtaagaatacagcgcggccaacacttgatcccgcctagtgagggcccgggcagcgcccccagcacgcgtgtcccggaaccctgagataacgcacgtgtgtggctccaagctgctcagctccgaacacagctgctgaaaagggacgcagcccccatgcagccgtgcgtgtcggagtgggaagacggccggctgggggaagagcctgaggaagaagatccgtgtctgaggcctgggtctgccagtccgcgtcgccttgggcagttccccggcggatttctctgagcctgtttcctcacctgcaaaacagcccatccctaaagcctttctctgttctgcgactcttttattccagaggcgggaaagtt

SEQ ID NO: 7929 - DNA, 493 bp, Homo sapiens
gggtggggagttgatcaaatttctcaatcttttcttttctggcttaaagattttgtgtcagaattaaaaaggtcctttctgaatcagagattatttaataattctcccagttttttctgttacttttaaggtttcatttttttcatgtgtaaattttccatccatacgaaatttactttgtaaatgtgagtggttggaatccagctttctctttcagatgataatacacttctcccactgatttcaaatgccactttattatgtaataatatggcatctattttctggacttcctaggtagttccatccctctattcatgaactaatgccacattataatatgttttaatacatgggaaactttattgttttatttttcagtattttcctgggttttcttgattgcttaatatctatactactattttaaataattttctattttcaaaaattatatactcacatagttcaaaataaaaataaatcaaaatga

SEQ ID NO: 7930 - DNA, 5440 bp, Homo sapiens
ttatttagacataggtttttattgatatcactcctttgtatacttaactaggaaaataaggcaaaaacaattggtctcgattcctctgtgcttcttcagggtacgtctgtcttcccagtcaccgctccaagcaggactgcatggttggcctccttgtgccacatcctttcctgtggcctcaggggcctgaattgggggcgttgtgagggtccccaccaacgtctgccagcggcttctgtcccacaagtttctatgcagacaaggagacaatgcagccaggcgtgtcctgaatccagaggtggtaaaatggggacaaacaggcctcttagagctgggaacacgtggtgtgtggcatctgtaaatacatgggtatgcaaatgtacactatgtatgcatatatttattagatattttatatataataaaatatatattaaagataaaagacattaaaatgctagcagtgttgtctggtgggggcagtcgaggtgatgtagtaactgcttcttttttcctttatttccccgtgtttcactgttttctacgcagagcttacatttctttttgagtaagattactttaaggaaacaacaataacaaagtaaaaacacctactgtagagtcaatacaatttcatctaaatcacagatttcttttcttatggaccttgaaaagctgattctgaaatttatatggaaataaatgaaggaccaggtacagccaggacccttgttcttcaggaaggacatggttggggctgtgccctctcaaagctcaagacaactccaaaagcgaagtctttagaacaagcagcttggcaagaccacgaacacacgggcagtgccgcagagcaggccaagcccactctcacccagaaaacagacctccgttaaaacaggtctgccgtgtttaataatggcatatgcataagtgtgtaaacagcaaataaacactactcaataagcagtactgaggcaatgcactaaacaaaggaaaatgagattcgatccctacttcacattatattttaaaaaatcaattccacatggattaaagacttcgatgtgaaaaaaaaaagccattatgaacctcttacacgatgaggtagaggttatctcctaaacctcagagcagggagggctcttaatacactcatacatacacacaatcatgaaaataaccaataagctaagctatgttaaaattgagaacttctactcatcaaaggacaccatcccaccaagagattaaaaagacgagccaggaagtagaaaagaatgcctgggcatgtacctgacaaaacattcatatccagcagatgtggagaattcatatcagtcaacaaggtaaaagacaaacaacctaatagaaaagtgctcaaaaatccccaccagacaattcacagaaaaggaaacaataagctaccattttatacttaaaaatcaggcgacagcgaatgctggcagaaatgtgaatgtagcaaaaaagggactcgttttcaattctggggaaggtggaaactcgggtgaccactttggaaagaactgggtgtcatctggtagatgtgagcatgtccgttccatggcccataatagcccttctttgttgtatgcctggaaaaattctggcccttatgtaatagggatgtttagaagaatgttcacaccagcattgtttgtaatagtaaaaatatgtaagcaacacaaacatctccatcagtagtaagctggataaatagattgtggtctgttctgtgttagaacactctatagcagtgacacagaatgaaacaaagccacttgaattcacatgatgtatcttgagcaaagagaagtcatagaagactacgtaatgtaagatgccatttgtgtaaggttcacaaacaacaaaaccgagcaggacgtttctccactgagacacacatagtggaaaacacacaggaaaagcacaggaattgttgcataccctgcaggtggtgcctcctgtgcaggggcaggtcagggtgcccacaggtaggggcatgtcacccgggggtgcatatgcaggtgtttgtccttattctttttccttaaacagatatgcaaattttatgtactcttttatatgtataatctatttccaacataaggggaacaataataaaacatttagtaagaattatgtattatttttctttagtgttgatccttgaggaaacatttgctgtacaagaagaggaagaagaggctgatgaagactacttttaaggggattaattggtatccttgagggcttttgggtctggtgtcactggttgctatttttatcttttccaagcctatggtcttattttccttgctacaccttagtaatgactgtggactttggggcatgtggttgtgggaagcagcaagagggggagctgccagccaggccactggcagggactctcatgggacctgccaagcctgtaagggcctcctcacagtgccacagaagcctcggttcttgtagagggaccactgccatcagtgttgtccagcctcagccccacctccacccaactcacacccagcaagcaaactccaatcccacggcaatgatcatttggccctgcgtatagctttgcctttaaagaaggagcaggggagccccggccgcttctgtcctgtccagttggttacagttcttgctgtaaattaatactcacttcagattcttgtgagttcttttagcagccattcttaggtgcttgatcaattattctatattatctactgacttcctgggcctacaaaattgaagccagaccctgaaatgtggcaataccaccctgtcaaggcaaacatcacagtgggaacatcacagtgggaacagttgtcgcaggtgacaactggccttcctccctgcctttccaaggggttgttggaaggagctgctgcaacatttccattctgcagatgagagaactgaggcggcagggaggttgggtaaattgatcaaggcctttcaagctggaagtggccacacagactggtttcaaagtcaacatcagagtgaatggcagatgatggggcccctgctgttcgtgtaccaggagtgtctgtgaatcagagctttgtggcttggggagtgagcctgccacacatttttggtgaatttgacggtggaaatgttccagcatagacccatcttgtttttgcatcattccccctcctgccttgattagaagatgcccagctggtccaaaggccccatgaccgctgcttctgggaagctatttagtcacttcccacagcaatatttgttccttaagcaaatagaaatgtatccatttacacgtttgtgaccacagggaaaggcacctggcgctcaggaataaagctccaccctctcttttcaccaacaaggacacagaagggttacgaggccatgaaatgcacttgccattccttccttcacactgttctgaaaagccttcttaaccgtaacctaccctacaggcctctcaaaaggaatcgatggaaagtcccttgcaggacgtgagatattgactaatgtttgcaaaacacacctacttctgaaagaattatctggttaccagaagactttcccttctggaaattctccaaggctgtccggccccagggcgggggtgaatcgtaaagtaccaaggagcccaaagccttagagcacctggctcagtggttaaagaaggaaagatgcagatgacaggtttgaggctgggaaaaagagggaaaaattaaaaaaaaaaaaaaaaaaaccgcagaggccggaaagatcagatacctaggagcagctgacagaaaagaaagcttcagatgtgagcagcaggagggcagatgctacggcaaggaagccccttctcagacacaaagccctccacaaaacgatcctctaggtggactttcttctgcaaacattaccccatccccaattagaaggattcagagaattgaattaagggttttgagcatattaacacattgaatatttggaaggaaaactaataaaagctgtctcttactatattacccatcatggaatggaatgcatatacaccactgtaatagcaggttctctagaaggaaacacaaacaaaaaaccagaaccaacaggatatgtgtatatgtatatatagagagattacttttaaggaattggctcaggtgactatggaggctggtaaatttgaaatctgcagggtgggccagcaggctggagaccccaggaagaccgtgtctgcagcccctgcttgctcagggaggtcagtctctgttccattcaggtcttcagctgacccggggaggcccacctactagcaagggccatctgctttactcaaagtgcacgggtttaaatgttcatctcatccaaaaacatcctcacagggacatccagaatgaggtttgacttcacgtctgggcccagccacatggacacataaaattaagcatcgcaaccatgtagacgctacagctgtgaccgctgttggtggatttagtgtgcgccagcgtcatctaagcttcatgaggacggggatttttctttttcttcactgctatgtttccagtgcctagcacttaataaataaaataaaataaaataataaaataaaaacactgttgaccacatgactgtgttgctgttgtttgggattagtgtgtgcggctgtgcatgcattcatttgggaattggtccctctgctggacagacactaaggtggcaccagggtccccacctcctagtgtgttcatatcttgctgaaatcctctctccttgatgtggggggatctgtgacttgcttctgatccacagaatatggtagagggatagcacgtctctcccatgatccaggtacattccctggcctccacccacagctcacttgctctagagcctccctgctggctgatgacgtaagtggccgcactggaaacttccgcgtggagagaaactgagggcagccacggacctggacctggggccctcagagagaaagtgaactcggccaacagcctgtgggaacttccgaagaggtggattcttttccaggccgtcctcggatcctccgcgtaagaatacagcgcggccaacacttgatcccgcctagtgagggcccgggcagcgcccccagcacgcgtgtcccggaaccctgagataacgcacgtgtgtggctccaagctgctcagctccgaacacagctgctgaaaagggacgcagcccccatgcagccgtgcgtgtcggagtgggaagacggccggctgggggaagagcctgaggaagaagatccgtgtctgaggcctgggtctgccagtccgcgtcgccttgggcagttccccggcggatttctctgagcctgtttcctcacctgcaaaacagcccatccctgaagcctttctctgttctgcgactcttttattccagaggcgggaaagtt

SEQ ID NO: 7931 - DNA, 6980 bp, Homo sapiens
gcacccctggcaatccggcgacggcggtctcgggaacccccgcccccccggcccggagtcaggcggacaagccggtgctgggtgaggggcaggcgcgcacagggcggctctgaggggtcggcgggctgggggaggggcagtgtggagcccggcaggatccggaaaaccaaaggcggcctggcccgcaggcccagagcgctaactgggctgggagctgcgcaccaaagtggattcccctggtgggaaatcctgccgtaccttcctgggagagagggcggggccggcaggttcagctaaggtcttggggtggagaataaagccccagggtccggccacgcccccgggcgggacacagtgcctagttgactgggttagaactaggcaaacctctgagcctggcaagcaggtgcactggggacccttgcattgggagggctagaaaaaccctcagttatgacctgggggcggcactttgcagaccaggtgagtacccagttctaggtgaaggggctggatttgtaggatgtggggaacgtgacttagagttggaaggctttttgaaagcctgagtccctgtgtgggtgatttcatttggtggactagggtaggaataccttgaagctactagtgaaacctggttggcttgaaggtaacctgaataggtaataaggcagtaggctagatttttttttgttttggagtgtctcaaaactgagttcaactccatctcttccccccatctcactgtccccactgcatctctgcctggcagcaatccaagtcctgggcactgtcaaatggttcaacgtccggaatggttacggattcatcaacaggtatccaaggaacccagggcgggggtggaatgggtgtcttcccagctggcctgtgggactggacacccgcccaacctcatcgacccctgcggaggcacatggttgcaatgtccagctgatgctggttgaaagcctttaaccgcagcacaaatgtgtgcttcgtgacaagaggaagcctcctccgcatcttcaagggtagcggaggattaatgattcaggaacttggcaaacctggctctgaccctgccagcttctcatctcaccttctggaattgcttcattacttttactctgacatgcctttggggcagaatgtattatagggttctctgtgcctcagggcccccggctggaatcctcaactgatttcctgttatggcagcactcacaactcaactcccttaaagagctgtggctcattcgagccctccacctgttgggactgaggctgacagtgggggtcaggaggaaggagccagaggctgctgctttccttcagtaggcagccccacccctcagcaccgggagaggctgtggcagtggattctgagcagagccaggtctcccccagtgggcccttccccagcccaggcatcctgcccggcctggctctcctgggaggccctagttccctcttagcaggctgacctttgtgcagatccaagtgctttaaagctaaaacgtttgttctggggaagggtccctgtctaattctggaaatggcagactgggtcgggggcagagtgcctccaggaaaacttttcctttctcccctccccccacccactggggttcttatgatagagaatgggtgaatgttttcttctctctcacccttggtcccacgcgtgttgagagtggtcctgactctgggattcacctccaggctgaggatgagaataaagtttggcagctgtttagagcaagttcctgacacattgttcccttctcaaacttgttctgcccctctggccccatctgcactttctgcctccttgactatagaaggaagaagactggaattttccaaccctgatgggggttgggggagggggtgttggccagggacagttgcacccagcgctggcaggttgtaaggctagcctggggtggaaggtggagtcccggcaggggcagagctgtctgaggttcctcaaggtgcctttgcctccccagcctgccctttccttgtgaagtccaggtttggcactgaggttttaggtgtatctctctttacaccagcttctgggggccctgctggctctccctcccattccccaggccatgtccacccctaactggaatgctggagaggatgggcccactgagcttagactgggcatctagggggacctcagtgaggagctgagggctttgttgaagtcccttccttaacgacccatcctgttctgcaggaatgacaccaaggaagatgtctttgttcaccaggtaagagctaggttagctttctgaggggaagaaccggccgtctttgaaggcctttgctgtaatccttagcagtgcgctccgccatgtttctctggctcttcttcacaacggcccatccgccttgggtgcctgtgtcaaccaccattagccgcacttgtgctgggttactaaacgtccgtcagaattgagcatgttacccctgggcatggcacgcttactacccaccgggacctgttaacactccaggaagcactgaggcagttttcagagggagaaggtccttgggtgcagtggttctcaaagcgtggcccctgcaccagcggcagcagcatcacctgacatccgaattctcaggtcccaccccagacctggtgaatcaatcagagctggggctggggctccacaatcggtttaacgagctctccaggtgattctgatgcacgctacagcttgagaaccactgcttggtggaaagagctctcactgggactgaggtaagaagcacagtgcattctacccactttgcgactgaaggctgtccctgccttttgctttggagttcatatttcttgcctccctttctgaaatccctgaggggtaaagcggggcgggaggggaggtgcggggagtgcatcctggggatggtggtaactgcacaatctgctgaggccctgagttcaggacttttcccctgctaaactttgaccacctccttgctccaccctccagctctagaccccaagtcaaatgttgaaagaatgaaattgggtggtggccccagcaggggtgacagagactcctgtcttgctgtctcacttttcacatggccttttccccaatcagacagctattaaaagaaacaaccccaggaagtttctgcgcagcgttggagatggggagactgtggaatttgatgtcgtggaaggagagaaggtttggggactgctatggggtatagagttgactaggcttacgggagggtggcctggaggtcatcacaggctaagaccctcctggggccagctctgacccgttctgcgggaatgggactgtgttctctcaccctgatgtcctcttccttaatgctagggctaagggatgtcctaagtatgtccctgtcatcggtcggcagtgtctgggtttcttctctagttcaccaagcacttcgacatccgttctccacgtggggccctgtcctagacttcccgagtccgcctctggagtaaaaaggtggatgctggctgccaggcctttctccacccagtcgtatactcaggagggtgcagtagcaattatttcaaaaggacatgttgctccttcccaaatgggtgcaagcacattccactgcctctccagggagggtagaaagaagttagaggagctaaaggaaagctggagaggggtcttcccctgaaagaaggggaagcaagttgggaaatgcacattggctgttggagcaggttctcactattcccttaccaccttcccagggcgcagaagccactaatgtaactgggcctgggggagtacccgtgaagggcagccgttatgcccccaaccgacgtaagtcccgccgattcatcccccggcctccctcagttgccccaccacccatggtggcagagatcccctcggcggggacaggacctggcagtaaaggggagcgggctgaagactctgggcaacggccccgacgatggtgccccccacccttcttctaccgacggcggtttgtgcgaggcccccggcctcccaaccagcagcagcctatagaggtgaggggatgctggaatatgggagccagttccccaagttcaggagaggagtgggagttaggatagagaccatgggtccccaaagaaggaggaactgagggttgggcagagctgtggataatctggctccagagcagctgctgtccccacagctcaccggggcctttgcatgttcccagggcactgacagggtagaacccaaagagacagccccattggaggggcaccaacagcagggagatgagcgagtccccccgcccagattccggcccaggtaccgaaggtaagacccccctgctggggcttggtcttccccttccagtgttggatccttggggcaagggacaggaggatggaagggtgaagctctaggcagagcctgggctcctggcgagacaggtgccttgcggggaggcagtgctcatgggctggaagcctggctcctggaggtggggtggggcagctgggtgagccctggggagggagtattccctggtcccctcagagccttgttccttgccttaggcctttccgccccaggccacgccagcagcctaccacagaaggtggggatggtgagaccaagcccagccaaggtcccgctgatggttcccggcctgagccccagcgcccacgaaaccgcccctacttccagcggagacggcagcaggcccctggcccccagcaggcccctggcccccggcagcccgcagcccctgaggtgaggacctcagatgtgggatgaaagaaaaggctgagaccagctccctcccccacctgctcctttttctttcctactctatcctttggctcctcccctcccctgccctggccctgccaccaccctcttccatgcagcctgctgggtccccccctggcaggtgccgcctcccaccaggaagcccccacagaggcaatcaagcccatgattgcccatgatggccatgccccccccaacccatcccccacttgctgcctggagccatcctaccagcttgtagatgtgaactgaggggtgtgattgaggttttaatgggaagggaaaaagtgaaagaaggttgaagttcagggccctgaagaacaagtctcagccctgcgcgatgtctcatgcctgtaatcccagcactttgggaggcagaagcaggcagatcagttggggtcaggagttcaagaccagcctgaccaacatggagaaaccccgtctctactaaagatacaaaaattagccaggcgtggtagcacatgcctgtaatcccagctacttgggaggctaaggcaggagaatcacttgaactgggagggggagtttgcagtgagccaagatcacgccactgtactccatccaacctggagtgagactctgtctcaaaaacaaaaagaacaagtctcaattggccaccgctgttctttagacctcagcccctgtcaacagtggggaccccaccaccaccatcctggagtgattccaactcaactcagaggacacccagagctgccatctggtgagtggctggtgcagttgggtgggtggccaggaaggtgaggtactgggtggcgatgacaagtcgctgttgttcacaatccgtccatttccttttctctctcaggtatctgccagtttttccaaatgacctgtaccctacccagtaccctgctccccctttcccataattcatgacatcaaaacaccagcttttcaccttttccttgagactcaggaggaccaaagcagcagccttttgctttttcttttttcttccctccccttatcaagggttgaaggaagggagccatccttactgttcagagacagcaactccctcccgtaactcaggctgagaaggaaccagccagctcttacctcctcctggttgcttttcttgcccccaccccaagtttatttttgttttcccccggccccctacctctgaagccattttatgatctgtcatgtgccacctgagcctccagtaaaaacaaaaacaggctttcctgtggtcttggtctccatctcttctgttttggagaatcgctagtaactcactgttgaaggtggggaggaggggatgtggggccgtgggcagggcctggcatccttgctgccatgtctccagctgtgtccctggtgaagagtgcccctatcatgggtttcactgcccatctgtgacatgggctgacacctccctcacagagtgagtattctgcaaatgccaagagcaatgcccggcactggcagctacaatttattgagcatttactattaataaagcaacgagtagaaatgtgagtaggggcatgagcaatggcatccagaagattctgaggccttgagctgaggcaggacagagggaggaagaggggtgaagagttatggtccctgtctcagcccatcctcaagtacctccacaataggatgcttgtcttcagcagtgactttatagaagtatctatatatatacatttagtacaaccgacctttggtttcttctctcaatccccttttcaaacgtatataaaaatatccaaaggctcctcccagcccagtgtttccaggcagcctttcaaatcccctctttgccttagttggtcaaaagcctgtggatgcagcacccttccaggaagggagaggaagaaagttagggctccttcttggcagccttgggaaaccatcggggtagagccccaagcctagaggcgggagcctgccgtccttccatcttgccacacatgggcacatactttcctgttccctcttgccctggaaggctgagcctgcagtgagggaggtgagtccttttccctgcaggggtcaagagagaactcccttcgccaggcgcggtggctcacgcctgtaatcccagcactttgggaggctgaggcaggcagatcacgaggtcaggagatcgagaccattctggct

SEQ ID NO: 7932 - DNA, 1640 bp, Homo sapiens
gtttcaggtactcttaagaaggtgaagatgaagaagcccagcaggaggaccgcaaatagaaggaagacgtagggccccatagcctcctgggacaggtggagaaagaggtgttgacggagtgaggtggggagggaaggggtagtttcaggcaaccaggagctaaaggccttcatagggagctggggggacggcagacagcagctgcctcctccagggacaagggaaatgagcaggaatgagaatttacactgaaaagaggattctctgaaccccaaacactcttagttttcgccctcttcaccatcctcagttactgcactcagaggagagtcccagctgtttgtagtattaatgcaaagtgtatcattttattcttggagtaaggtaagttatgccactggtgcgtttcagacacctcagttactatccaatctaggtcagctcccttccttgctttgattctgtggagcaggtggtccaccaaactgacccaaagacccatggtctgtggctggaggagtccctgacggggaagcaggtgggctagctgtgtgatgcccacctctggcctacggtgtgggaggctggggcggggggacctaccgcaacatactggaaacccatgccaatgatgaagttgctcgtccagttggagaaaccagccacagccatggctgccgggcggggtccctggctgaagagctcggccacgatgaaccaaggaatggggccagggccaatctcaaaaaatgccacgaagccaaagatggccacaatggagacgtagctcatggctggaactcgctcctaggggccagacagggagggtggagaatccagttgaggcctttctgatcttcccttgccctcaactcagagaagtgaaacctaaccccctccgcagcagcttgtagggggcctgctgtcccgggttagagcaggcccttgactggcattctgctggctatcccaagtgggttcaaggcagaggaaatgttatggcctctcagttcttatgacggtcagctctccctggactctaaagctgggtccttaggaatgattgttcctgaggcttgacaggggctctccctcctggctgccagagttgtgccacagctgcctcccagtgcagcccaaatccctcaggagcagaccacaatcccagcagattctggagccagtcagccccagtcctggtccggagctggcgccaggattgaaagcatgtgtgttaagaagggaccctggctggtcacagagactcacaggaccattcccatggggtgggctgctagcccctcctagcctccaggccttaccagcaggagcagagccacagtcatcaggatggcacagccacacatgcccgccaggcccaggagatggagcgtccggcgccccgcccgctccaccaacaacacctgcggggagagtcggagcttgaccccagccttttgggcacgggaagtaggaggggccgcgtgggtgagggcaaccaagagcaggacctccgggacacccagggaggtgaagccagtggctcgggccattccagaggtgagcagttaccgagaccaaggtgaagactgtgttgaccacaccagctcctatggtggcataggcaggctggcctaccc

SEQ ID NO: 7933 - DNA, 265 bp, Homo sapiens
cgctgccggcgtgtgggcgaggctcggggcgcgaggaccgagcagggcggtgggttcgcgagccggggggaggggccggggcggtggcggctgtggccggtactggacccggcgggatgagcgaggtggaggcggcagcgggggctacagcggtccccgcggcgacggtgcccgcgacggcggcaggggtggtagcggtggtggtaccggtgcccgcaggggagccgcagaaaggcggcggggcgggcggcgggggcggagccgc

SEQ ID NO: 7934 - DNA, 510 bp, Homo sapiens
ccagcactcactgaagaagacactatggaattctccgttttccagactagaaataagtaactcggagaaattaagaaactcgcccgacgaccctcaggcagtagcacctggccaggtttgctttctgaaccactaactccactcgcgcacgccacctttcctgcctgggcctcttgcgggtcgcaggggtggaagcctgacctgggccagggcccggatttcttcctcctggcctctgtcccaccgcccccggtgccaggaagcgcttttctctccccgagacccagacgcgccgaaagactcgcgcggtcagttccctaccccacgccctgggctgtgcgttttcttgcaagcctctgccgagtgcggggaacggcgccgccagactcccccagacgcgctccggctcacgcctgactagagcactctgcttcacagaggggcgttctgcgcgttcttcctccctggtgtgattttcgttctttttcctctcatggtccccaagaaccc

SEQ ID NO: 7935 - DNA, 628 bp, Homo sapiens
taaatatattctccatttatttttcatcacccctcaacaagctggaaaaccatttgagataaatttggaatgtagtggccaacatgtactcagagaaaataaaaggctataaattatatatatatatatatatatatattttaagcactagaattttcaaaacttatttcttaaaaaaaaaaacaactctgaaaagactttgcaactagaaaggtttaagtgttactcggcgtcaggggacggagtggggggaaaccagacaagaacgcccatcatgaattgctccccacaaagaaaacaaatttctaggaacttggccgttttcccctgtcctgagtggggttcccgattccgtgccgctttgagggaagctgctccgtgaatgtgagaaagtttttcccccagcccccatctactccccacccccagctatgaatttcttatttcaggagggaggacaaacatggagacacacatttttacaggagtctaattggccgatttttctccggcttctcttctccatcccgtctcttggaatttcttggcacgccctacctgagatcccctacgggagatttcctcttggctcctgcggttctgaggacgttctgaaaagttcccaagc

SEQ ID NO: 7936 - DNA, 907 bp, Homo sapiens
caaatggtggcttctgagagtttgcaccagtccttcaccacattttattggaagtgtggagagtcatgattctcattcctccccagccttccggaaaaatgctcagaaatttctttccacattgacacctgattacagtctaaatagtaaccttattctgactgttaatgtaaccttctcgtaatttctacaaaaatactttagtttttctagctgtgttttcatgtaatcactgaaattatttttaattggttttaagcattcattgattccatatacaccacctgcaaaaaagttacataggtgatcgctaacaatactagaattcgccccatccaaaggaaacattagagtagaaaaagaaaaaggatttgagaatccagtatgaaattcagttaatcattacttccctgttactcaactaccttaacattgtcaggtttacctgaacataaacttcattttcttagttgttcttagaacgaagggatatgtttattgaaatcagtaattaagaatattttgggacagttatgatttacttagccagtgaagcagtttctattcccaaatccaggcaaagagaacaataagattaaacgtagcctaagagatttcctttttgtcaaataatgtgattttgctatgtatagaggagatgtctatatgtaagggcatatttatgaccagtagttcctaaaattaaggggactattattgtgttactcaaggtatcagttgtataggatacattatgtcatatttcaaacaatgtttataaagagattagtataattaacctgtatgtacttctcctctgggccaaccttgtgtcttctttatctgctgacagtcccctccccactgaattattttgaatcaaatcccagatagtctatcattgtat

SEQ ID NO: 7937 - DNA, 4249 bp, Homo sapiens
caaagattgaagaggaactctttcaaacctttcaagtgccccctcctttccttaaagtcttttataggggtccccttcttggccatctccatcctgtgagtcaggactgaaagggcacagacaggtcactgccagcattgttggggcaagcctgcaagcacgcatcactggggatctgacatgacaatggccgcctgccccctctgagggctacaggacttaccccagtgggaagcagctaagcagtaagtaactgttggctttagactgtatagtatttgttctaagcataaggtaatatataatattttccttaaaaagaagctcctagtcttacagtataactgaaaactgggcatgtatctttagtgcatgtttttacagctatacagatacacatctacagttttatattgtactttatattttaatacacatctacctatttgatatgggtcttattttctttctttcttaaagaaagtttagtgttcacttgagaaaaacttggaggtgaatgttttccaacatcctaacccagtagacgcccattcatccagctactatttcctgaacacctatcctgtggcagaacatttcgctggatgccagacatagagatggaagatgaggtgtttctagtgggacaggaagggcacatgctcagtctgagcttaggagagatggcctggaggaggtatctgagtgctgaaggattcgctaggtgaactgaagtgaggttgggcaaggatatccagggagagggggccagcatgacatggaagtgagggaggacttcacatattggagggattctaggcaaagagccatacaacatagaaaatcaaatttccaaaatgcagttcaattcagttcaattcaaccaacattttcaccaattccctcctatataggcggcgttatattatgatagctgctgggttacagagatgtcaggaagacatgtccacacctaatttcaatcaagtgtgacaagtaatagtggagtaacagacagacagtatcgcagaggtggcgaggaactttgtctggagggtccgagtagctttcagaggggaaaggatgtacaggaattcaagcccaccacaggaacaaaaggggctctcagtagaggatgcgacatgtgcttcaccacacaggcaggaaactgcaggcagagtgccaagagctgaatagagcccgttaatactgggccttagatttggagttgggtgcaggctgggtaggaaggagagggagaagcaagctggagttgggctgcacaaggccttcctagggcgttcagctttgatctttgggctacagggtctttgaaggtgtgtgaactgatgtgataggacgagagagtgttctagaaaacacctgtagggctacagtgcaggggcagatgagagggtaagatcaatacagagagcagcgagactgttacaggcatcctggcctgacctggctgtcatgggggagatggaacaggggcatggtttcaggaaatgttaaggatctggatctcggctaggagggcttgatggttgaggagagaagtctggtgagggagagggaaaggtcaaggatgtgcccctggttctggtttgtgtgactggatggatggtgatgccaccagctgtccacagcctagccactgtgtcttcatatgcacgcgcacacagacacacacacacacacacacacacacacacacacacaccagctatgtgtcttttctcctcctccactccctgttcctaaaccagaaatggaaaaatacagagaaagccctgaaaatttccccaataggtctcacggatgatgggttggtgagatccactgagtgagggccggaccctggcagcttcctccagaaagcacaaaatggaaaacaatgctgtcagcatgtgcctgcactccttatctgacaacactgagctctttactgcactctaaccaccttcctatgtccagcactttttctcatcccttgattcatgtttgtagttacagggattgctatggataattctgctatctgattcctcagatatatgtcaatgtttgaagatctttctccttccctccctcccttccttccctcccttccttccttccctccctctctttttcttttctttttttcttttccttctttcttcctcccagcttttattttattgtgaaaaatactgtattgactggggtacataaaatatccatgtaccacttaacacatttttataacaacacacatgaaaccgccaccaagcaaagaaagagtcctgctagcactgcagaagcctctctcaagtactcacctaatcacaccccttagtctcacctcctcatcccacactccaaatcctcccacaccagcaactattactctgactttgggactcacttccttgcttttctctttctgtgttgaagtatgttcccctagacaatggcatttagtcttgcttgtttggaacttcattctttgaaattccctgatcctgcttctctctttcagcattgggtttataagatttacccatgctgttgtaggcagccatgctgtctgccatgtggatatactgccattttttattccactctattgggatggtcattggattgtttccagagttgagctcttatgaacaaagctccttgaacacacttgtacatgtatcctagtcacagttcctaagtttcctcagggtttatacctgggactggagctgcgggtcatctggtgtctttcttattgttccatattactaaatattgtgtgagggccttcttggtccatgtccctggaaacattcaccatcgtctctcacctttttgttttaaaccacttttcccaaaataaactcctctcctaaaatacactctcctcctcccctctgaggtcagtgggcctgtcttctgtgtcccaggctcgtaacagaggacattcacacgtgagcatgcccataggcagataggaacaattctcaagtgagtacaccaaaacctaaattcattcggattgatttaacaaacgtaaattcttcttggcctcatcatgtcacacctatgtgttctgataccctagttgacagccactgtccttcttggctgagtgtctacgtttttagcagccttgagcttgaatgtactgactgcctctccagctcaaagccatgaccaccccacatgtttttctaccaaagcttgtccctcacaaacaccaccatgtggacaaagagcagtgattacattttctcaaattcagtagtacagaaccaagggccgtcccctggcatgtgatactcatagatctgtcttttctgctgcccccacagggtctgaccagccgacctggacctggccaagggtcctgtcatccctcatggccaccccgccattccggctgataaggaagatgttttccttcaaggtgagcagatggatggggcttgcctgcttccggtccctggcggcatcctctcccagtattcgccagaagaaactaatgcacaagctgcaggaggaaaaggcttttcgcgaagagatgaaaatttttcgtgaaaaaatagaggacttcagggaagagatgtggactttccgaggcaagatccatgctttccggggccagatcctgggtttttgggaagaggagagacctttctgggaagaggagaaaaccttctggaaagaggaaaaatccttctgggaaatggaaaagtctttcagggaggaagagaaaactttctggaaaaagtactgcactttctggaaggaggataaggccttctggaaagaggacaatgccttatgggaaagagaccggaaccttcttcaggaggacaaggccctgtgggaggaagaaaaggccctgtgggtagaggaaagagccctccttgagggggagaaagccctgtgggaagataaaacgtccctctgggaagagaatgccctctgggaggaagagagggccttctggatggagaacaatggccacattgccggagagcagatgctcgaagatgggccccacaacgccaacagagggcagcgcttgctggccttctcccgaggcagggcgtagccagcatgcaggtgcagggccctgtggtccagactcccctgggttgggattcaagtccagggtgagcccatgtgctggagaaaatacacactcattggtctccttgctttgaaagatccaataaagtcctgaggcaaggtttggaaaaccaactta

SEQ ID NO: 7938 - DNA, 1321 bp, Homo sapiens; identical to SEQ ID NO: 7206

SEQ ID NO: 7939 - DNA, 784 bp, Homo sapiens
tcccagtgctttgggaggccaaggcaggcagatcacctgaggtcaggagttcgagaccagcctgggaaatgtggtgaaaccccgtctctactaaaaatacaaaaaattagctgggcgtggtggtgggtgcctgtaatcccagctactcgggaggctgaggcaggagacttccctgagcctgggaggcagaggttgaaatgagccgagatcatgctactgcactccagcctgggcgacaggacgagattctgtctcaaggaaaaaaaaaaaattgttatgcttttagaggatctgtgcatgttagcaatgttcttacattttgatggttttcatatattttttgctgctatattatggaggctaatgatcagaaagcatttttccgactccggttttactgtcttcaggtagttctctacacactgccttgtctttctaaaatacagatgtcctatgtgtccccagtcttcagggggtgactctcactgccatggggttcaagacgagtctctcactggctttctgactctcactgcactacttgttttgccctcatctcagttactcagctcatctctttctgccatgtttttcctctgggcctttgtgtggtcaatttttgttcctttcttctgcccatgtgcccccttaccccatgtgtttgggggataggcatgctttccctcttccttccttctgccaggtctcagcttgggccccacactgaatgctgtgcctgactcctgcctgttttgggaggctcttgtcttttccatcgtcaccc

SEQ ID NO: 7940 - DNA, 135 bp, Homo sapiens
cgcctgtagtcccagctactcgggaggctgaggcaggagaatggcgttaacccaggaggcggagcttgcagtgagccaagactgcgccactgcactccagcctgggagacagcgagactccatctcaaaaaaaaa

SEQ ID NO: 7941 - DNA, 10115 bp, Homo sapiens
cagcaccagctgaaggtcaccccagccatctctgtcccccatctggccccattttctctattccactcctgtgacaggcctgctgtatgtttctcccactagcatggaagtgccctgagaacagggaccttgtctgactcagtcaccagggcatcctcaatgcctggaaaagcctggcacagatgaggtacccaataggtgtgtgagctaaggctgagggggcagcaacgccagggagctgggggtggcttccagttggagagaggccactgccgtctgcaagagaaatgaggtgagcacgggaggcgagaggcagcggcggcattgcgcggtggcggcgaggagggcctgcctggccctgctcggtaccttctgcgctcctgaaaaggcatggtagaagctggacacataggtcattatggccttctcgtcgggccgggccgtgttcacgatgtctgcaagtgaacaacaagggttaaactgcccgagtagggcggggggtggaggcgtcactcactgggatccacgggctcccaaggccacggccttgggggagagggacctgcagagtgacgcgtgacttgggtgggctcagccacaccctcagcccctccctctcccatgggtctggaaaggacaaggctgtgggaagcggattaaaatgaggccacttcctctctctgagaatggcctcaaggagcagcaggacagtcaactccaagggccaccagaggccagagacacaggtcccagctggggcagtgcatggctaggaaatggggcagtgcatggctgggaaatggagcaaagccggaaaaggaaaaaacaaaacactccactttgtcgggctccatactccatgcctgctgcaggtagggagggagaggccagggttgctcgcaggaagcctgaagcacccctcctcagccaccttgcccttcctgggccctgaggagatgcaccctcaggagagttgatccttcagctccccctccccatacgcttcttcatccctgaaggcatctggccagcccaggctacccttgctctgtctcccagggcgacatggctgtccccagttcacccagaatcattcagcccttcttgctggctctgccagctccccaaggtgacccaaagctctgatgtgcccacagccccttgcccgaggccagccctggacagaaaaggccatcaggaagcacagtggtggctgaacagaagagatgacttaccctctgcatccagcatcttggggatgtcgaggtatttctcagccacttcgaaggcattgttcaggttggtgacagggtcgtcctagaaggaggcaagtggggacaacaagaactccgtcagggcagggtgcaggagcaggagggaggcagggctggcccagagggagagacccgggagggcgagggttgggggtttcttcaggcagttctcagccacgtgtgatgtgtgagcgggagggcaccgcctggataaattcaattcccactcacaggagtgcctcgtgaaatctttgtggggcaaaccagggctttttctccagaaaaatgcaggtgtactcttttcatacaatttccagccacccacagaccctagcttaagccccttgccctaaaacctggttttcacattgactggaagatgtgggccaggcctgagagagcactggggactgggtaaggggagcaaaccgagaggtcccaggtcccaaccaccctaaagtgtcccccagccccctcacaggctccccactgcttacaggactaaagcccactgcactccaactctccctggccggggcccagctctcttgctcactgtggctggaacgggctgggtgccatctggtgcctcccccaggaagccctcctctggctctaagctgcctcttcttccgggacctttcctggctcctgctcgctcggggtacactagcctcctccgcagcactgatctgaccccatgccctgccaccccattcagcctgagcacatgtacacggcctggtgtggtgctttgctttggacacaatttttgtcctgccttcccccacgaggctggcagcttctggtggccagggcctggatccatacaggctttgtacaggcaaatgacagcaggaccctgcatgggcaacatgggcttgtggtgatggtttggaattccttgccctctgcccctttgggcagaggaggttctagaatccagaagattgaggaaggggagttataaagcatggctggccaggcccttaaataaccccgggttggttgcagtgccatggagggagactggacagtccacgaggggaataagggaggtgagagtcagccaccgagccaggggttgcggagagcctgcacaaggctctcccaggctgcccatctgcgtgcagaacccagatctggaggctggcgatggaagggcatggggatggtgacccggagttagggggtcagacagggcacgtctgtgggccatcaaggggagctggagacactcaccttcctcagcttgtcatactcaatcagctctggtctgtgccggtggatcagggcattgaaggcaagaccatccttccagctggggaaggaaaggcaaaggttataggagggcccgctcactgtcatgagagtgccgtatggccctgtgcacccacagcagtgactaattcccattcactgcagtctggcctgtgccaggcactgcatggagacagtgtggcagagaggctgcaagcatgacctctggggccaggcagtctgtgatcaaatcctgactcttctgcctactgacagtgtgacctcgggtaagccaggctatctcggtttccacatctgtatgatggggatagtgacatacctgctacatagggctgttgtgcggattaaatgagtaaatgcttggatcagtgcctgactcctgacaactgctttataactgctagcaccttccatgggaggccgccctgaaccagacaggccgcttcgggggaggtggccactgcaggatgctggtgtttgtgctgtgtggcctccacaccctggcggacctgacttacaggaaggccagtccgtgggctggctaaatgccaggatttcacttggcatgctggtctctggaggaaagagaccttccccaaggccacaagttggtcagttacaagctatatgggtcacattctcctccctgagaccctctaagggttggttccctctgaggtcaagctcgatgtcacctcctcagaaaggccacccagggaactttcttcatctgacttccctgtctttgtgcagcacttctcactgaagttatgctgcaggattactggccgctgtgctaacagctggtccccgcgctgtggtgtaaacttcccacaaatgggaactttgtttgggtgccactgtatctccactaacggcatgcagcgggcatgctagatacttactagttgaagaaaatgaatggaaactatagaaagattcagtcagttagtggcaggaaaaaaaagaagacacacagagaagagtgaccaagggagggaccacatgctatcagggtgagcacgatgggaaaagccctctgtacccagcaagggtcccagagagcctgaggccgctgcaaaccccatgaggccctgctcttcattcctgtgcgggccatccaggagactcagagggtggagccacaaggcaaaccggatctgacctcaggaccgcccccagagccagtgctcccaaccaccaggcaggcctgcctcttgccgccccctggacctcatgcggcagtgcccatgctcgcctcagctacggggatggtggacatgtctcatctcccgctcaccctgagggaagcaggttcatggtggagctgaggcttgttcatcttagcagccacagagtacatttttccccaacactaaatttactagcaattctaaaaacaattcactcctgagctgtcaaaataaaggaagaggccagaggcaggcagtggctcacatctgtagtcccagcactttgggaggccggggtaggaggactgcttgagctcaggagttcaagtccagcctgggcaacatagggagaccctgttcctactaaaaataaaaattaaaaattagccaggtgtggctgcatgcacctgcagtcccagctacttgggaggctgagacaggaggatcacttgagcctaggccaaggcagcagggatgagtgatcacaccactgccctccagtctgggtgacagcacaagaccctgtctcaaaaatgaaaagctttattgttgcttctgagagtcaccttgcctggggacgaagaacgttctattaggccggcgagagggctgaccttactgccttcagccaggatggctgggaaactgcctcctcttcctcagagaggaccaggtgaccttcccatgggcttgtagggcccgtggccagggaggggctgactgagggctggcatctcacagaccacgacaaaaacacagcaaacagggcaggtgggaggaaggatctcaggttcctagaggaaaggagaggatgaccaggactggcgcttacctgatgtggaagttctgcacattgacgttcttatacggggctgtctttctctggcaccagagaaggagcccttccttggccgaggtctctgcaaaacacacaaagacagtgagcactggctcaaaaataaaccctcagaactcagcccaagttggatgggactttcggctcaggcctggggtcaaacgaaacccaaggggagaggatatctgtcctaacaacagcagcagtgatagcagcgggacagccactcccattccggatgcagacggatgctgccaggcccaactgccaggacacacggccctgcttaatcctcacggccccgaggagagtcgcttgaccagggctgccccaggaggtggtggtgtcagggcctgaatctgtgccatgtgcctggccaccaagcctgtgcctttcaccaccagaacacactgcagacaggcccttgataccggccttggcctcttttgaacaaggtgaaataccagctgtagagaggcctagggggcccttctgttccccgtggatagctcggctgtcctcacagaccgggagcccttcgagggcaggaagcacatctctcccagtcatcactgcgacctggcacctgggagcccctgcacgctagcccaggtggctctgcccatcctgtgtgcacacaggtgcttgcagggaagcgaaattgtccattcctggacggcctgagctcataacgggtccatgggggccaagtttcaaggatggggatgtcaagcagacagagaaccaggcccaggcccaactctctcactagtctgttctgggacttgggttcctggactgtaaaacgggcccagccatcctagcccatctcatgagggtggcgtgagggtccactgagatgaggctgtgagagcaaaggcactcggaaggcactggagccaagaggcaggcagctgggaggagcctcccttcacctgccacccactgactacccctgcaagggccaggccctgtgagtgaccccaaggaaacaggaagaggcttgaagcatgaagatcacacttcagctctcctctaacccgccctgactcaggtgggaagcgggggcagtacaggtggctgtcaccttccacggagatgtcctggatggcgaacctaaggatgatggtccagatcattcccagggtcatctttgcgttgccgtccacaatctctgcacacagggaagggggcagagggcagaaggtcgttaaaaccagagtgaggctcctccgcccaacctgaaggtggccttccagccccatctagagaaaggctccaaaccaccccctggttgcatctcccaggcctgtcctcctccacctccctcaggagaaaatgcagggaacagtctctaggcagcactgtcccagagcctcctgctgctgagcgcctgcaggcttctggccacaagggtccctggccccgcagccagctccttctcctgacccaactcaaaaaaccgctcctccaagaggctggtcccaggcgtgtggcctctgttcacacctctctcaactctcagtgctctgtacatttctgccgtaatctgcgtacctcctgactacaggggggcaccccgggcccccactctcagggcaaaggtggtctttttcatctcgcagtcagcaaatgtgcactacattattgtttattgtgaatctgtccacttccttccaatcctactgccgacactctccaccaagccactgtcatctccagagctcaatgcggctgcctcctatgtacccttcccgcccataatccacatcgacacagcagcgagcatggttggtttccttcttttgagacagggtctggctggctggagtgcaatggtgtagtcatagctcactgcagccttgactgcctgggctcaagcaatccttctgcctcagtctcccgagtagctgggaccacagacgcatgccacaacatcttgctagtttttaaactttttgtagaggctgggtcttattatgttacccaagctggtctcaaactcctgctcaagtgatcttcctgccttggcctcccaaagtgctgggattgcaggtgtgagccaccatgcctggcccacagggaaagggcttgccctgaaggcccaggccctgccatcctgctggaattctctagctgcatcctctgggcaagccaggctctttcttgctttgatacgctctgtccactcacaaagcacgcccctagcctgcgaccctcaactggctggtccttctcatcgtgtaagcttctgcttgtgtcacctctcgtggtggcttccctgactgcccgtcccaaggagctccccaacccgccacccagttcctctccctggcccctgtgctgccccaaggcatcactagtgaaatcacatgttggtcgggctgtttacttgttcactgtctgcctgccctcgtgagggcggggctgctctgaccaccactggatccagtgcctggaaggccagtgaggaacaagcatggctgctgtgttgtcaggaaggggagagcacgggcctgaggccagactgcacgctttctgaactaacctaaaaacaaacatttgcggccggctgtggtggctcacgcctgtttagtcccagcaatttgggaggctgaggcaggtgtggatcgcctgaggtcaggagttcgagaccagcccggccaagatggtgaagccccgtctctactaaaaacacaaaattagcctggcgtggtggcgggtgcttgtaatcccagctactctggaggctgaggcaggagaattgcttgagcccgggaggcagaggttgcagtgagctgagattgcaccattgcactccagcctaggtgacaagagtgagattccatctcaaaaaaaaaaaaaaaaaaattgctgaaacttctcaaaagaagggcttggaccacaccttcttcagcctcagtaacttaagagaaaaatcatctctgcaaggcccaggacagctgtgtgtctgcggctgggtgagagaaggcagtgcctcatcccagagtccatcagccagccgtgcctagggcagtcctcccaacttgtcaacacgccatatgcaaggggcatgatggagtggcttccaaagaagacagaggggcgccactgctgcaagcactctcggggaagggctgggcacaggggtgagttccaaagctaactgcagagctggaggcccaggacaccacaggagaccctgctcactgacctctgagcagaatactccagggcaggcttgcttggaagcaggtggagaggtcacagagaagatggggctcaccttcccccggggacacacccagaggaagggggtgtccatgagccacagctttcgggttttgagaggaggaaatatgctcattctgctgcccagagacaggggagggacccagtgtccaccctgtcctagggttcagagccccagacccagaaactgagcagcaccacctgccccttagtgcagcgaggcagctcgagcctcaggaaatctattctgtgcacctcctgagggccgggcctgcagagctgggcaaggccgcagctccccggctcagcaagtacaggtgcagctggtaacggagggcttatggagttccggtgaggagaggaggatggcgtttctcatgacacatccaccagctgcttctctgacctgcagctgtgcctccggcccctctcatcacccccacgggaagccaatgctcccgcgaatgcccaatcatgtggaaggacagggggacagggtggggcggggttctcaggtgccttgagccccaggaacgcctccattaggctttgttccaaggccccacagtcacagggattgggagtgaaccaatttgggcatgaacagagaacatttttagaccaagtttttctccaaatgaaaactgatgactgacatgggtctctcctctaaccccttctgtatttacagactagcatttgagcaaaataaatgcagctgtgagaagcagaaggctggaacagagcctggaggaaagacccatgcaaggacagaaaatctcagggcctgactgaatttttgggttgtgatttttttaaacaaacaccaaccacctcgactgtggcatgcaaggcttggcacccctcatcgcagaggtcctgggccggggcagagccttggaactcagcacacacattctggcccggagtcttggccaaactctcagagccctgtcattaacggcaattagtttactttgtttttctagaagctgggacaacatggatgtcagggtgaagaaatcttactctgactaatgagtggactgcgagctcatgctgctggggctccatcaggcctcgcctgtctctaaaagcgcctgggagctcaacccaggggcccctgctgagagcctgctgctctagtgagggcctgcaggtagtggactgtggtcctggttatctacgtggggcccaggaggatcctggggtggtcagaggcaaaattctccaagcccatgcacacagggcaaagtctaggcactgacctttggccgtgcactccctgtcccaatgcctgacatggggcctccagtccttctctgataccgggcagggcataatgagaaaggtgttcctggtacagagagaggccatggcacatgtttgtcactgtctgctgagcctggcacaaggagaaccagtgagggcgacctgagtccgagtcaaaaccattcctccccctgcagaagccgtcgcccccgtggttgggtgggttgcacttcctagatttggactgcgcccaccggatttttccaagggtttgggggagcttgtgggcccagcatcatatcaagagcagttgttgtgatcactgctgagtatgtactggggctctgagtgccccaagcgccctgccaccaacaaaacttctcttcaggatgcagatgttgtgcttcagagcctaaaggtcagaaaccgagcaggaccctcgctgccccacctccagctcaccttctgccccgatggagaccagcttgacgcctttgctggcaataaagtccagcgctttgttcacattgttgattttgtgcactctcatcttcccccgctccggcttaggtaaccgctcccctgagaagtgcacaaagagaaaagagggggcgagacagagagagagaaagggagagagggcgagagggagagaggctttagagtctcctctgttctccaaaagcaggttcctctgctggcccaccaggccactctggccccacccatcagaccaccgtgcagctattaaggggtgccctctcctccccaggagcaatgggacagctgggtgggcagggtctctggggaccgctgtggcagagcacctgtgccagggctcggccgcactgcgtggctgggagtctcacctgatatgacctccaggagcagcatgagcttgagcccgtctcggaagtcctcatcaatgttctcgatctgtgtgcctgccttccgcaggtgggagttgcaccatgccgtgaaggtctg

SEQ ID NO: 7942 - DNA, 776 bp, Homo sapiens
tccttcctattcttttttttcctttttttttttttgagaaggagtctcgctctgtcacccaggctggagtgctgtggcgcaatctcagctcactgcaatctctacctcctgggttcaagcgattctcatgcctcagcctcctgagtagctgggactacgggtgtatgccaacatgcccatctaatttttgtctttttagtagagatggggttttaccatgttggccaggctggtcttgaactcctggcctcaagtgatctacccgcctcggtctcccaaactgctgggattacaggcgtgagccaccacacccagccctatccttcctatttttaagactcagtgcagcttagaggaggctggaaggcaagtgggaggcaggccccctcaccggggtcaggcagccgcatctaaggagaatgtttctgatgatcaactggaagggatggagggtactaaacaagaagccgaagtccctgaccctaacagaccaacgatgctgacagggcatgggtacacccaagcacagggcacgcagcctcctggtggtgcccggctactcagccccctgcaagctggggcatgctcatagacatcagggccacagaagatctcagatcagttaacaccaacacgcccaggcgccttcagggaaaccagcccacgcaccctcctgcaacaggacctgggaaaaaccccaagtgtctgcttcttataggaacccctgtaccccaccccctccatctgcaggggccagtgtagaagcaagcagacag

SEQ ID NO: 7943 - DNA, 6903 bp, Homo sapiens
agctcatgaaggaaccaatcctttggaagcatgggaatctgcgaaatgtgctgatcttgatggatcaaagtgcctgggactccaacgccactctgaggcagatggccatccgagggctcggcaacacagcatccggggctcctcacaaggtaaaaggcgttttaaggggaaatggttcatttaagtagagttttgaaataatgatttaataacccacgcctagttgttgcatacaaattaattggaaatccagatacattgctgaagtggtagtccttcggttgaactacatgtgaccctgacaaaatttcagtcctcttgtctgaggactcctaccctcttccagatacgcatagaacaattttcaagattaagaggtcttatttcaaaataggtgaagaaacataagcagttaatgctagaatctatcatcagaggcctgtatcacctagctcgcactgaagtcgtctgtgaaagcttgaaggctctaaaaaaaatcctggagctgctgacagaccgagacgtgagcttctacttcaaggaaatagtgctgcaaacaaggaccttctttgaagatgtaagtgagcctgtttaggaacttccctccccagaagtgagtgaacagaaacaggtttaggtagtgctcacagaagacattgtcagtgtcccacccatattccttggcctgccccagacaggtcacctgcagacaatctctatacaagctgttggcttcctgtatctctctgcctgagggtgctctatggcctggcagtcatgattgatctaagctagttgagccagaattgttgggggaagaaatgccctaggaaggaccctcaaacaataagaaacaagagtttgtagataaatttcccggtttcctcacccctcagaaagggttgattggctgttacagagatcttaggatccacagagtttaaactatttactgtctggccttttagagaaaacgtttgccagcttttgatgtactccataatcgcaatttcaaaaaagatcagtcagcagtcctaggcagagaagggtcattttcctctatgccttccaggaagcacattttagtatttattttttggttattcattgccatcaatgtaaaaatctatttttaacctaaacctattattttgtaatctaaacctgcttcctcatgtagtattgtcagaggagatggaaaactgctagttgccttctctagtgcattcttcataaacattaaggctttatttgattacctatttaccttacagtctgcagacttgagaagtcttcatttctttcattattcatcataaacctaatttttctgctcattaaatattttgcaagcctgtgactgagttggaactctaaatgaggctcaagaagtattgaatagaatctaaggatatattacctctcaaatccaaccttttcccatttctttgctccattattttttttaattttgcccttcctgattttggcatgctaactatatgaacctctagattttagtctgtaatatatgcccacagcattcttcagtttcgtatttttgcagtttttcttgtctatgtgctagcctagacctggcctttgaaaacatctttctgcttgtttccaactatttcctccaattaaccaatatcacttttaggccaggcatggtggctcacgcctgtaatcccagcactttgggaggctgaggcaggtggatcacctgaggtcagaagtttgagaccagcctggccaacatggtgaaaccccatctgtagtaaaagtacaaaaattagctgggtgtggcggtgcgcgcctgtagtcccagctactagggagactgagacaggataatcgcttgaacacgggaggcagaggttgcagtgagccgagatcatgccactgcactccagcctgggcaacaagagtgaaactccatctcaaaaaaaaaaaaaaaagcaatttttaattatcttgtcctcaaaaatgcttactggggtaaaaataacaaagatattctttttcttcgttgttcagggctgaagtcaccccttcagaaccccagctgttaagtttcctggattgttgttgatccaataataattctcttagatctgagcctccagtaaatcacaagtccacttaacaatttagtggtcaagataatgttgcccagtgtcatcagagaaggataaaatgtgctaaagccttgctgattgttagctcagaccttgctcatctctaataggtgtcaactccatcacgtttgcataaaagtaaagttggacaaaactttgactcttatttgttctccagtaatgccatttttacataagtatatttaactctatgatctattgccccaatatttttatgtagattaagcatagctttctataatctccaagttttcttcctttgtttctttcaatatttaaatactttcttagacttttcaaaacatggtgacacttgaatgaaatggtagaacagaaaatgtggctgctgccccatgctccattcccttcttgctactattccccacactgtcaccctgagcaatcgctttaccctctgtgactccatgttctcaagtgaacatgaggacattggactagacgttctctaatatttctcccagcacccaaaatccttttgccactttttctttctgatttttcatcatctcgattggttgattgttcctggacctatcattagctcattgattttgcaaaattcaagcttttttaactaaatgtctctctacctttttggtaccttgtttttggttagcttcctctttctaaagaggtatcttttaaaaaatgtatcctgaccttattcctaataaatctaaaaaatgtgtttctactttcattttcattatacaaagtcacatctgagcttttctggcctcttcccaacaagccatcattttttagaagatctatattaactttattgtttatctaaataatattctgctattcaggactgctttttctttaatccctttttgttcatatgggtattttaaactagttttctgggtctaaaaataaaaaaacctccatgaaattcatctcacttcgtttcttccctgtcggaactctgaaacgtaactccaatgaggtaataggaggccatcttcctccaccaccacctttctcttgttttcttttttttttctttctttttttgagacagagtcctgctctgtcacccgggctggaatgcagtggcacgatcttggctcactgcagcctcctcctctcagattcaagcaattctcacgcctcaccctcccaagtagctgtagctgtgactacaggcacgtgccaccaggcctggctaatttttatatttttagtagagacagggtttcaccattttggccaggctggtctcaaactcttgacctcaggtgatctgcctgcctctgctcccaaagtgctgggattacaggcatgagccactgcacccggcctctcttggcttcctaaaatcatcgcctgccatcctggaccaaaaacaaggaagttccataatttcacatactcaagagtagagctaggcacctctgtgtttaacctctctgagaaccaaggcccaaattcccaagctgcctgtaatccctttagaaaatatttggtgtcatggagaatagtaccaagccttggacaattaagattagaggtcccataattctaggctagtaacgcaaccaagtaaaatacataacaagcagaaaccctccctggctttctctatgagtacccctgtgtatcattcctgtggtcctggtcacacttccccactggctactcaaagacagaaatcaattctctggcatcacataaaccccagacccagggttttttaaactcatgtagtatggagagaaagcttcagggaaagaaagcaagttcttggaacatttagaggccgtgactatgatggacaagtgcctgggttccagccttcttttgctgaagcgggaagggtgggatgagagccaagagtgtgctagcagggaatggcctctgagaggatattcaccacgacatgcattcgtcaccacaggagcaggatgatgtgagattgactgccatcttcttatttgaggacctggcacccctaacaggaagaaggtggaagattttttttgctgaagaaataaaaaagagcctgatttcattccttctgcacctttgggatcccaaccccaagattggagttgtaagtgctctccacagacacctgcacctcctgctctccccatggctgagaagtaccaataagcctggtctagctgcaccaggagccagatctaaagtcaccccttagcgctgaacctgaaaacctcttctccaattctaggttcttcttactatctcttcccaagcttactcttccttgaaactgggaaggtgccagcaatgactataaagccattcacaccactgacttttagtgcttctttcccagtactattcagcattttttcccttctggaaggagatcctaacgttctggactgtgatgcagaaaactctgttttccaggcttgccgtgatgtcttgatggtctgcattccctttttgggcctccaggagctctatggggtattagaccgtctccttgatcaggatctaccaagggccagggatttctacaggcaattctgtgtgaaactggtgagtgtccaatagatgccgcctccaaaaaaggcaggacaagggtctagacaaatcgcagaagggcaaacaatgtagcaaggaatttctggccagagccagaactgccttggaaggatggcagtgatatcctgatttcacaggatatagtgacatagaggtatcctgccacaggaccctctgctccattcccaagtcctgactgggatatattctccttggttcctaaaattcatatctgttgattaatcccttaaactctgatggcttcctgattaaatgtagatcaaaatacccataagacaattttcagccaattaatttatggctgtgtgagtgctcactggcctttacaaatccgttctgaggacctataggatgccaaatgtcacaaaggttcactttccagttgccctctttgaaattcacatctcttctaggccaagaaaaaccaggaaattctgtggatcctccacacacactccttcaccttcttcaccagcacctgggaggtgatcaggagtgcagctgtcaaactcacaggtgagtacacatccccatttcctacccagatatgtctgctttttccacctagttttgctttgaccagaagctgtccagtatgaacactagtaggactggtataacttttttattaaagcccagaaagggcttttatcttacgtcatgtaacatcctccctcaaagaaacctgcttccttttgcagtgaaaactcataacctctcctgactcacctacactcattctcctcccatctgagcccttcatgctccttctggctccaagtccttgctccttcttttccccagatctttgctcccagctgctgcccttacataaacacttcttcacctcatcccataagataacccatactcaacatccaaagctcagttcaagctgagagctttggcaacatgatacaagtgggaagtatgttcatgtgggggccagcagcccctggctctgctatgtgattctggaaattgacttaactttatgttacctctctgtctgatgtataaaataaaacataagtaaatctctagagatccttctatcatgaaattctaagtcttactttgaagcctgttccaactaattcagcccacagacaacaggcccactcccttcaccacctttaaggccaaattaaaaatctgaagattccttcttgaatcatacatatgatccccccaccaacacattatgaaatttttgaagacagagaccctatcttacacacatttgaaatcccaacaacaactagcctccttagaagatcattgtgtgaactctgccaaatactctggataagtgactacttgcagacatggcactcgggacccaatagaagtcaccctgacatcattctagggggtgcaaaggaagtcatatagtttgctcattcaccagcctaccatttaccttctcaccaggtgcagagtctaacctgctatacttttcatggcttcttcctctataatgaaatcagtaacatggtctcctattaactttagatgccgttgttctcaatttgaccagccaatatgtggagttactagacagagaacaactgaccacacgtgagtaccaacctagtttcttcccagcatattgttacattcttaggaaaagagaaaatattgctgttctaagttccacgtcagcccagaacttgaaaatcttagtaccaattattgtctctgatgctctctagacactagaatttctccagggtacaaagcaatctccagctccagccctttgcaggcatcagaaacaccaatagactacgattttccaattgcctaaacctactgatcacaaggtcagggccttctcttcccttatttcaatgttaaaatcatttcttgtagttccacatcctaccttttaggataaaatgtgagcatgaggacctgagccccacttgggtctgaccctcagtgctaaaaagttgggccttggcttggtttgcccttcttgctgggctctgactctcctcctccacttatttgctattcttgccatttcaggactccaagcacttcgtcaagatccgtgtattagtgtccagagagcagctgaggctgctttgcaaaccctcctgagaaggtgtaaagagacaagcattcctctgtaagccatcaagaaataaactgctggcttttccta

SEQ ID NO: 7944 - DNA, 140 bp, Homo sapiens
tctcctgcctcagcctcctgaatagctgggactacaggagcacaccaccatgcctggctaattttttgtattttagtagatacggggtttcaccatgttgcccaggctggtctcgaactcctgagctcaggcaatccacc

SEQ ID NO: 7945 - DNA, 32192 bp, Homo sapiens
ccaggtctgcagagcatttattccgtcccagtggggaggggcagggatccaggtggccggagggcacagggcctacgtgtaccacatgaagccgtggctggcatggagagcctcctctgtggtgcgcagcccgtacagctccccgatcaaggggggcacccagcgggttgtgtggaacacagactcccccacctgtggggacagtggggtatgggtagaggcacagccacccatatacagcctgctaggacccatcccccaggatcagtggcccctgtgcgtggcaggcgctacagccttcccttgtgggacctggcacccaccacccccttggtcctggggtttctatagaaagctgtgggagctccccaaccccaggccctgtctctgccgtggctggcacctctgccctcccagccgggacccaccttccagtcgggcacgtccttcatgatgatggcctcctcctccaggttctcccgaagcatctgcaaggtcctgtggggatggggccgatggtgggggtggggcctcagtgccctgaggggcccctgcctagggcccctagtagcaccccttcaagcctccctccgaccctgtctccttttcccccagccaactcctagcttttctcttgccccaaccccagtgctgcctcctcctccaggaagccttccggttcgcccccttgggtctccactaagtctccacgcctgaggatgcagctgacggcacagggcgatggcccccacgtgcattctggccaccttcggggatgcaggtcaggccctgcagcctggggccttccggccagtgacctcccaaccttggcccctgcggtgctacctccggtcggtttctgcctgtaacagtggcaacagcgcgatgcgagcctcgaagtcctcgatttgtaggcgcctgtgaaagcccgaaacccacactcaggtcagaccaggctaggtcgggggagcacaggcagcacagacctcaggggccagggtgctgctgggggaagaggcggaggggggcggggaggcaggcagggggcagggcgagggtcgcgggaagggcaagggctgtgggcagagcccaccaggagcctgagaggagggcgggtgcaggcagctgcacgggtgactgcccacaagactgttggctttctactttcttttcaattaaaaactttttttatcctaaaaataactctgcctgatgatcgcgacgaagagggggtgacttcatcacggggctctgggcctcacaaaaccacgtccccttcatctcaaaataatcagtgtgtgaggctggggcaggcggggccacaatctttcctttcttctccctgctttctggcagtttccaagttccctgcaatgacccccatctcccagtcctgcctggcctgcgttggggttgggggaggggtggggaaggagtgcccagcctgtgacacagggagaggggggcgcctggccctagttcatctggccctgtgtgtccactgcctggtgtggtctggtttgagcctggtcacctctgacaaaatcctgcttagagggcccgaggcaggccccccactcatatcctgtcctaatctggatccacgggtcccaaccctcctcactagacacattttttggggtggcgaggacagggtttccctctgttgcccaggctggtcttgaactcctgggctcaagcaatgctcccaccttggcctcccaaagtgctgggattgcagacatggagacatctcgaggacagagcctagaagtggaagtgctgggtctggatctgcactttctggggcctgggattgcacagccaagtccaaggggcccgttcacccctcgccagcacagacaacagcggaatgctacaggaccccgacaactcgccgggggggcactttcagacaacgcccaccaggggccctacctgcgctcacggttccacttcattatgctccagtgcccgtagatcagggttccaatccctatggccagcatgctgtagcctgtgaagagaggcgctgctcagcgggccagcccgcccccagacaccctcctccacagctccaggcgctgcccactctgcaatcaggggacactggcggcttctcaggagtgaggctgcttggactgtgacacctctgcccccatgccaggggttttctgaaaggtacaagccaggcagcaacctcaggaggcctgagggtctagatggtggttgctaggggggccccaggtccatcgtgttctagaaggctgtttggaccctgggcggcaggctggccctgaagtggaagggcagttctgacagtgtccatggtggctcccggccacctgggccacagttccgcgtgctgccctgcgggggctgcacacagctgccagggacaggcagtgccctgtgggggctgcccagccaccccccggactctaggggtggccgtgctacctcttggctctgcagggtgaagccccctgccctgcaccccaggaaggacctaggccatcatgaatatttactgagcaccagtggggccttgctctaatcctgactgacaggctgggggcccactgggatcttcagagaggcctgggctgtctgggatctggctcccaggctcaccctgcaccctccagatccttccagccccagtctcttctctggacaggctttgcacttggtgggatgaatgaaaagctcaggtaggccaggctccagtcaacacccaggaaatgaccagcaggtggaaggcaaggccatctccaggcctccagggcactggccctgctctatgcctgctggggctactctgtgcctgccgggccctgctctgcacctgtcatgctcttctgccttcagctctgctccagcatggagctcacgggggcacctctgctagacccggagataaatgagaaactggctcaaatttgtacctggttatttaacctgttagaagcccaagtcagggctaagacatttccatactacaggtaatgagggtgtgctgggtccgggctcagaggcacatctctggagaggcccagggtgctcagggccagctcccagctctcagcctcctgtctagcacatgggaggtttcatcagctgccttgttcatttttttttccttttttggtttttggttttgagacaaggtctcactctgctacccaggctggagtgcaggggcgcaatcatggctcaatgcagcctccaactcctgggttcaagtgatccttccactttagcctcccgagtaactgggaccccaggtgtgtgccatgtccagttaactaatttttgtacagatggggtcttgctatattgcccaggctggtcatatctcgttcttttcttttttttaattaatttatttttgagacggaatctcactctgttgccctggctggggtgcagtggcaagatcttggctcactgcaacctctgcctcctgggttcaagcgattcttccacctcagcctccggagtagttgggactacaggcgcccaccaccacgccaggctaatttttgtatttttagtagagacagggtttcaccatattggccaggctggttacgacctcctgacctcatgatccacctgcaagtgctggcattacaggcgtgagccaccgtgcccggccatatctcattattttccacggctacagagaacccaggggacagacctgggctgccctcagccttctggtgcagaaaatgggcccttggggagaacctgcaccctcacacctgcgcactcatacgcaggcccatctgtaagataaattccaaagaagaaataaattccaaaacttatcccacagctgtgtgtacaagacagcgtggcactggcatagaacagagatgtatgagatgacagaaacaatgcagggcctcttgtatttgcatgcagcctgcacagggctcttcctcctcgccaaccacaggggggccaaggccccaggcctcagagtctgtgccttaggaactgctagtctggtggggaacatggtgaggggcacgcacaaaagggtgtgtggaccattctttttgtttttggttttggagaccgggcctctctctgttgtccaggctggagtgcagtggtgggatcaaattttttcggctcacgcttgtaatcccagcattttgggaggctgaggtgagaggatcacttgactaggagtttgcaactagcctgtgcaacacagtgaaacatttacaaaatacgtattttattttattttttgagacaaagtctcgctctgtagcccaggctaaagtgcagtggtgcgatctcagcccactgcaacctccgcctcccaggttcaagtgattttcctgcctcagcttcctgaatagctggaattacaggtgcacgccactgtgcccagctaaatttttgtattttttagtagagacgaggtttcaccatgttggccaggctggtctggaactcccaacctcaggtaaatccatcttcctcggcctcccaaagtgctaggattacaggcatgagccaccatgcccggcccaaaatacatatttttaaattagctagatgtggtggcacgtatctgtggtcccacctacttgggtggctgaagtgggagtatcacttaagcccaagaagtcaaggttgcagtgggctgagatggcaccactgtactccagcctaggtgacagagaaaactttgtttcagaaaacaaaaccaaaaacaaaaacaaaaaaaaaagaaaaatatatttttcatagaaacagggtcttgctatgttgcccaggctggtcttgaactcctggcctcaagcaatcctcccacctcagcctcccagagtgttgggactaccagtatgagccactgagcccggccttggccattcttaagagaagaccaaaataaataaaaacccatcctgtgttcaagaattggagcacttagcattgtgcagatggcaacgctgtgcaaactgatacagatttgaaacgcaatccccatcagaatcccaaccatttcttttcctgttgcagaaactgacaagcaggttgggaaattcatatggaaatgcaagggaccagaacagccaaaacaattttgaaaaagaacaaagttgaaagactcacacttcagtatttcaaaacttatcccacagctgtgtgtacaagacagtgtggcactggcataggacagagatgttcatcaatggaacagaactgagagtccagaaataaaccctcacatttatggtcaattgattttggacaaaggtgccaagataattcaatgggagagaaaacagtcttttcaacaaatgggataaccagacagccacatgctaaagaatgaggatgcgttccttctttataccatccacaaaaattaactcaaaaggatcaaagacctgccgggcgcagtggctcacgcctgtaattctagcactttgggaggccaaggcaggcggatcacgaggtcaggagatcgagaccatcctggctaacacggtgaaaccctgtctctactaaaaatacaaaaaattagccgggcgtggtggctggcacttgtagtccccgctactcaggaggctgaggcaggagaatggcgtgaacccgggaggcggagcttgcagtgagcctagatcgcgccactgcactccagcctgtgtgacagagcaaggctccatctcaaaaaaaaaaaaaaaaaaaggatcaaagacctaagcgtaagagctgaaactataatactcttagaagaaaatgtaagtcactctctgtgacctcaaactaggtttcttagatatgacaccagaagcacaagtgacaaaaggaaaaatacagaaattggacttcattgaaattattattatacatgtatttttgagatggagtctcactctgtggcccaggctgaagtgcagtggcacaatctcggctcactgcaagctccgcctcccgggttcacgccattctcctgcctcagcctcctgagtagctgggactacaggtgcccgccaccgcgcccagctaatttttgtatttttagtagagatggggttttgccatattggccaggctggtctcaaactcctgacctcaagtgatccacctgcctctgccccccaaagtgctggaattacaggcatgagccaccgtgcccagcccggactttattgaaattaaaaacttttgtgctgtaaatgaaactatcaattagctgagaagacaacatatgtatacacaatcttacaactcaataattcaataatttaaaaaaccctactaagccgggcgcagtggctcacacctgtaatcccagcactttgggaggccgaggcgggcggatcacgaggtcaggagatcgagacgatcctggctaacacagtgaaaccccgtctctactaaaaatgcaaaaaattagccgggcgcagtggcaggtgcctgaagtcccagctactcgggaagctgaggcaggagaatggcgtgaacccgggaggcggagcttgcagtgagcagagatcgtgccactacactccagcccgggcgacagagcaagactccatctcaaaacaaacaaacgaacaaacaaacaaaaaaccctactaaaaatatataaaggatttgaatagacgtttctcacagacagacatacaaatggccaataaacacatgcaaaggtggtggttcactcctagaatctcagcactttgagaggctgaggcgggaggacagcttgagcccaggagttcgacaccagcctgggaaacactgaggccccatctcttgaaaaaaataataaaaaataaaaataataaaacacatgaaaaaatgttcgacatcatcagccagcagtgatatgcaaatcaacgatcaatgaccagaaaactgagcaaaaaaagacccaaaaagaattttaaaaaactccaccataatgaaataccgcttcacatgcgctaggatggtggctatgatcaaaaaaatggaaaataatcagtgttgttgagacgtggagaaattgggactctcatacattgcaggtggaagcacaaaatggtgcagccaatttggaaaacaatttggcagttcctcaaaatgttaaacacgaagttaccatatgatccagtggtttctctcttaggggaaagttcacaagggaaaaatgaaaatctacatccatacaaacacctgtacagcatgaatcttcatggcagccatactcacattattcacagcagccaaagagtaggtggatgacccaagtgcccatcaaaaaatgaaaacacaacacttggtgctggatattaatttgccagaaacaaaaggccacacggtctatgacttcactgataggaaatggccagaacaggcaaatccacagagaaggaagcagattagtgtttgccaggggtgggatgattgctaatagggaagacggggtttcttttgggtaatgaaagtggtctaaattctgatcatggcaatggccatacaactttgtgaatatactaaaaaatcaataaattggacacacttcactatattattattattttttttgagatggagtcttactctgttgcccaggctggagtgcagaggcaagatcttggctcactgcaacctccgccttccaggttcaagcgattctcctgcttgagcctcccaagtagctgggattacaggtgtgcaccaccatacccgactaacttttgtatttttagtagagacagggttttgccatgttggccaggttggtctccaactcctgagctcaggtgatccatccgctttgtcctcaaagggctgagattacaggcatgagccaccgctcacagccattaaattggacagactttaaatgggtgagttgtgtggtatggtattggaacctcaataaatatattaaagacacaagatgaaaaggaaagggctgcctgctaggctcaggagggagtggggacaggagaactgggtgtgggagatagtggaggaggtggggtgaagtcacttcagaagcggcatggattaaaaggggcctgagccagccgggcgcagtggctcatgcctgtaatcccagcactttgggaggttgaggtaggtggatcatgaggtcaggagatcgagaccatccttgcagtgagctgagatcgcgccactgcactccagcctgagtgacagaacaagactctgtctcaaaaaaaaaaaaaaaaaaaaagagaacaaaaagcagcctgagccagcccatcatgtcctgggacgctggcagtgagtgaatggctgacccaggcagacagaagggagtgggtgccaggcttggggccaccaggccttggacaggagcacagaaggtaggtctggtgggaaggccactgtggaccatggctcaggagaggcaggagaggaggacagagggagaggaggcagggcctgtgtgtttgctctttttctgcagagcaggcttcttctcagaggtcctcctggcacatcctggcttaagtgggcccaggttatcccaggcctcaccaacaactagaaatcctggcatgatgtgttgtatctcttcagctcagctgtgagcgcttggggacagggcccggaaccatgtgctcactcaacaatgaaagcagggccataaacaaagagcacaccagcataggggtatcctcctcactcctccaccgggaaaggctggggtgggtgtgtatgtgctgtaacaaaagtccacaccattaggagacacaaccccaggcagtggtatttagggcactgtctggcacagggggggccactgctctgtggtgaactgggagaggaccagggtatttatacaaaaatgagatgctggaagcagggagctcagggagcctccaggcctgaggtccttctgtggcctggtctggctgcaggtcacacaggtgcatatttggaaacagaccttgtgctgcacacctgaaggggtggggtagcccaggttacaccggagaagaatgagactcggccaggcgtggtggctcatgcctgtaataccagcactttgggcggctgaggcagggggaccacctgaggtcaggagttcgagaccagcctggcctacatggtgaaaccctgtcactactaaaaatacaaaaaaaaaaaaaaaaataggccgggcccagtggctcacacctgtaatcccaccactttgggagaccaaggcgggcagatcatctgaggtcaggagtttgagaccagcctgaccaacatggagaaaccccatctctactaaaaatacaaaaaattagctgtgcatggtggcacatgcctgtaatcctagctattcgggaggctgagacaggagaatcgcttaaacctgggaggcagaggttgcggtgagccaagattgcaccattgcactctagcctgggcaataaaagtgaaaactccatctcaaaaaaaaaaaaaaaaaaaaaaaaaaaaatcgcagggcatggtggcgcccacctgtaatcccagatactagggaggccgagggaggagaatcgcttgaacctgggaggcacaggttgcagtgagccgagatcacgccactgcactccagcctgggtgacagagcaagacctggtctaaaaaaaaaaaacacacacacaaaaaacaacaaccaaaaaacaaacaacgccaggcgtggtgggtcgtgcctgcaatattagcactttgggaggccgaggtgggtggataacctgaggtcaggagttcgagaccagtctgaccaatatggtgaaaccccatctctactaaaaatacaaaaattagccggatgtggtggcatccaactgtactcccagctactcgggaggctgagacaggagaattgcttgaacccaggaggtggaggttgcagtgagccaagatcgggccactgcactctagcctgggtgacagaatgagactctgtctcaaaaaataaaaaagaaagaaagaaaagaaaaaagaaaaatgaggaaatagaatgcattatattcctccaatgtgttctgggacagcactcatgggccagatctagcctgaagcctcttttttttttttttaatttttggtagaggtgggggtctcactatgttgcccaggctggtcacaaactcctgggctcaagccatcctcccgcttcagcctcccaaagtgtggggattacaggcatgagccacctggctcacaggcaatctgtttttgtagagcccccaggctaagaacactttccatttgtaaatggttgtctcagtaactgaaactttctggccagccaaacccaaaatacttgtcatctgtcccttttatagaaaaagtctgccaatctcagttctgggatacaagaaaaacaagaggaggttggccgcggtggctcatgcctgtaattccagcactttgggaggctgaggctggaggatcacttgagcccaggagtttgagaccagcctggtcaacatagctgcaccctgtctctacaaaaagtagaaataaaaaataaaaaaaccaagaaggggctggggaggacttttcacctcacactgatttttctactgtctgaattattacgtttttaattaccatgctcatttttgtgtgtgtgttaaaattgaggaataatgtgcataacatgtaatttaaatgtaaagtttgatttgttaagagacatgcattctgccgagcacggtagctcatgccgatagtcccatcactttgggaagccgaggtgggtggatcacttgagcccaggacttcgagaccagcctgggcaagatggcgagatcccatctctatagaaaatacagaaagctgggcgcatgcttgtaatcccagcttctcaggaggctggggtgggaggatggcttgagcccaggaggcggaggttgccaagaaatcactccagcccaggcaacagaaccataccgtcttaaaaaaaaaaaaagaaatgtatgtattcactcttagattacgtttaaaagtttctatttgtctgttaacctggggactgagtatgggcgccttttaagttctctttttcaattttctgtgctgagcccgataacaaaatttaacgtgttacttaaacatttgaaaactttacgccgggcatggtggctcacgcctgtaatcccagcactttgggaggccgaggtgggcggatcatccgaggttgggagttcgagaccaccctgaccaacatggagaaaccccgtctctactaaaaacacaaagttagccaggcgttgtggcacatgcctgtaatcccagctactcaggaggctgaggcaagagaatcgcttgaacccaggaggcggaggttgcggtgagccgagatggcgccattgcactccagcctgggcaacaagagcaaaactccgtctcaaaaaaaaaaaattgaaaatttaaagaatatggattcctgtgacaccatgcaggcgggggctgccagcagggaaccactgcatagaacatcttgtaaattccctccaggttccgggttgcggcctcagctttgccttggggagccgcggccttctttgggcctcagtttccccatcttagaaatccaagggtggctgagggccagagcacaggctatgactcagtttaacccactgtaaaacgtaaataactagagggaccgatttcctgggctgttacgagaaggaagaggagctgggaaagacctcaacaaactgcagcacttagcgttattacagaagctatgatggatccccgggctccgcctccggtcacaccgccgggaaaactgaggcccgcctgtgtccccggaaccccgcccccgagccccgagtgcccagactctgagaccccggcgcagagtgatactgacccgacagtcctcgacgcggcaagttccgtttgtagtcgatgggcccatagccccccggcggaggcatgtcctgcttcacctttgacgccgccatactcgcagtatcccacacttccggtcccgggcggaagtgacttactgccaccgccatgatgagtgtggcggaagcacttgagatggtccgcggcacggctaggaagtcccggacagtagtgtaactatccgaccgcgcgggaaagctctggcggcggaccctgggtaggaatgcgctgccgggctgcagctgaggggtctttactcctcttttgcccagacagggcgtgactcgccttggttcttgcattataggccctcgcgttcaccttgcctctggggtgttgcgcaggccagtcagaaactccgagctctcaaaggagccaggtgccccagttaaggccccttttcccgttttcgccccgtctagggactctacgcgaagcccagggctccacgtagtcacgggctgggtacatgatgttggggggcagctgctgctcgaagtcggactcaccccaatccctggaacggattctgctccctggtggtgatgggtatcccttgctagtggcctctcatcggaaactgaccattcaggatgattatgagtcacaaagcagggaggctagggtggccccggggcggggtcccggacccccaccctaaggcggagtgacgcccgcagtcacttcacaaggcaaaaattgttacggggcaataaaaggcacaacagcggccaatgtctggcagtgggcacatgggggtgcgggggtgtaggtgccaagcgccatggcttagacccgagattggagtccggccgccccccgacagcagccgcctcctgccccccgtgcgccctaggcgccaccatgtcgggagacaaacttctgagcgaactcggttataagctgggccgcacaattggagagggcagctactccaaggtgaaggtggccacatccaagaagtacaagggtaccgtggccatcaaggtggtggaccggcggcgagcgcccccggacttcgtcaacaagttcctgccgcgagagctgtccatcctgcggggcgtgcgacacccgcacatcgtgcacgtcttcgagttcatcgaggtgtgcaacgggaaactgtacatcgtgatggaagcggccgccaccgacctgctgcaagccgtgcagcgcaacgggcgcatccccggagttcaggcgcgcgacctctttgcgcagatcgccggcgccgtgcgctacctgcacgatcatcacctggtgcaccgcgacctcaagtgcgaaaacgtgctgctgagcccggacgagcgccgcgtcaagctcaccgacttcggcttcggccgccaggcccatggctacccagacctgagcaccacctactgcggctcagccgcctacgcgtcacccgaggtgctcctgggcatcccctacgaccccaagaagtacgatgtgtggagcatgggcgtcgtgctctacgtcatggtcaccgggtgcatgcccttcgacgactcggacatcgccggcctgccccggcgccagaaacgcggcgtgctctatcccgaaggcctcgagctgtccgagcgctgcaaggccctgatcgccgagctgctgcagttcagcccgtccgccaggccctccgcgggccaggtagcgcgcaactgctggctgcgcgccggggactccggctagaagccgggtggttccagccattcctgcagccaagggcactgggccagggcggcgcacgcgcaagaggcgcgcttcgagggaatatgcgaagctgccgcgtgctgctgcacatgcgctttttcccttccgcttccctccctttcttcccacgggggagtccgcagttgcccttgttcggaatccacgttccccgcgatcccgggagctggaggcgcatgcgcatccgcgattccctgcgaccaggccccgagagggcgagaccagaggggacggaagcattgcgcctgcgcggaactctcagcctctgcgcggagggcgtcccttcccaaccagccgtgggtgccaggttcccggttggaacctgcaataaactcgctgttcctcgcacctggctctaacggtggcccccatttgcggactagtggagaagcgatcgctccatccggggaaggcaggcgcgggtaccctattttagagtcacgcatgttgaggttattgctccaagactcaaaagggagtcgggaggattcgagcctggaccttttgagctccccagtatgggcaaactcaaaggagctttgttgtccccgggtcgtgatgtcgctgtgatgatgggctgggaagcaagtggaccccagcgcctcgccgtccacatcttttaagaatggaacagccaggggtggggcgagggtggcctgtctccacgtaaagtaggagtttatagataaggaaactgaggcccacatggatgtcacttgccaaaaggcagagccaagggccaggcgcggtggctcacgcctgtaaccccaacactgcgagtccgaagcgggcagatatcttgaggtcaggagttcgaaaacagcctgggcatcacagccgagacctcatctcttgtttgtttgtttgtttgtttgtttgttttttgagacagagtctcgctctgtcgcccaagctggagtgcagtggcacgatctcggctcactgcaacctccgcctcccgggttcaagcgattctcccgccttagcctcccaagtagctgggactacaggcgcgtgtccccccacccggctaatttttgtatttttagtagagacggggtttcaccatgttggccaggctggtctcgaactcctgacctcaggcgatccacctgcctcgacctccccaaagtgctggagttacaggcatgagccacttcacccggctcacagctgtaatttgaacccagatctagcaacagtgacgttgcgggggtgggggaagccctccctgctgtgggtccctttcctctcgggaagagggggtgggggagtcagggcggggctgggcgagattcagctggactcactagctcgttccttcctctgttccttcatgtagtcatgcatttcttgagcacctactgtctgccaggccccagagctcatggcgaagagacttgggcccatccctgccgaaaacgagacaattgaaaagtcaagtaaaataaaagaatgacatggaaataaaataattgtaagttgtgctaaatgccaggtagagttgggaggtgttcaaggagggactctgggcagggcgtggcagctcacgcctataattccagaactttgggaagctgaggtgggcggatcgcttgagcccaggagttaaagaccaatctgggcaacacagcgagacggccatctgtacaaaaaatttaaaaattagccaggcatggtggtgtgtctcagttacttgggagggtgaggtgggagaatcgcttgggcctgggagttcaaggctgcagtgagctatgatcgtgccactgcactccagcctggaccacagagtgagaccctgtctcagaaaaaaaaaaaaaaaaaaaaagtcaagggactctgaaggtaagagaaacagtccaggttgttccccaggaagaggggagctggcgtgtttgagtaaggccagtaagcttatttgcctggaataaggagggagagagggaaaggagatggcaaggtaaggaggaaattgagagaggaccccacagagcctgggagtggttcccatttggggtatatggggaaatgtattaggtatattaggaaatcctaatcgtgcctacctgcatatgagccctacatagctgctcctctggtgggtctccccatgcccagcccctgctcactcagtctcaatggctttctggtgccctggtgatgcagtgccagctctatcttcatccctccaaatagatacatggccctgtccccttcagttttgcagatgaggaaaccgaggctaaaagaggggcagtgcctagcctccagtcttggctggaccacatcagagtggaggtagaaaacccagctcctggggccgggcatggtggctcacacctgtaatcccagcactttgggaggcggatcacttgaggtcaggcgtttgagaccagcctggctaacatggtaaaaccccatctctactaaaaatacaaaatttagtcgggcatgggtggcttgcacctgtagtcctagctactggggagcctgagtcaggagaatcacttgaacccggaaaatggaggatgcagtgagccaagatcccaccaatgcactccagcctgggcagcagagcaagactctgcctcaaaagaaaaaataaataaataaaataaaacctagcccctagcccctctggtttattcgaagggtgctgctcctgactggggccatgcctcagactccccacttggaaaatgggcaaaaccccatccttggggtagtgggcatggcttcagagtgggcgtagcttgagtactgggcccaggaccttccctagactcccactgcacttagctaaaacccacgcccttgccccgtcttcccacccagtcccaccacattgccctttttgttcttgacctgccatgctggctcctatctccaagcctttgcacactcctggcacttttcccctcttcaagccttgcctaaaatgtcaccccatgccctcctctcaaggtgctatatgtttctgtctggatagctcctgccacatctccggggcccagggcatagtgcatgccatctgtccaccgacgaatctgtgggagcagatggggtcagggtctctgcctgccatgtggccacagacccaaggctcaattcagagaggatgagatgtcggggacaagatgtcagggacgaggggagtgtcccattttctcagctggagaggctatttgagaccatgacccaggacccgccccttgaatctgccccaactgcactgacaagcctgtgcccaatccagggaagcagagcctcacgaggaaccaagagccaagcccaggagacagcaccccataggaatgtttctcaggccaagcaagaaatgcctgtagcaagcctctggccccagctacacggtaggctgaggtgggaggatcgcctgagcctgggcaacagagagcctctaggcactctagcttgggcaacagagagcctatctcaaaaaaaaaaaaaaaaaaaagtggctgggtgcagtggctcacgcctgtcatcccagtactttgggaggctgagaccggtggatcacatcaggagtttgagaccagcctggccaacacgtgaaaccccatctctactgaaaattaactgggcgtgctggtggcggcacctgtaatcccagctactcgggaggctgaggcagaagaatcgctagaacctgggaggcggaggttgcaatgagccaagatcgcgctactggacaggctgaggttcagtttctaccatgttctctaccagctctgtgcccataagaccaggcacttgggagttgtggggaaggtatgagctcccaggccggaggcaaggatgcttcaaagacaagaaacggccaagcgtggtgactcacacctgtaatcccagcactttgggaggccaaggtgagaggactgcttgagtccaggagttcaagaccagccatgggcaacatggcaaaaatgtgtctttgcaaaaaatacgaaaattagctgggcatggtggtgcatgcccatagtcccagctactgaggagtctgagatgtgaggatcacctgagcctagggaggttgaggctgcagtgagctgagatcaagccactgcattccagcctgggcaacagagtgagaccctgcctcaaataaatagcacctaggaaaacagggtcatgttttatgcacattaaaattcagcaaaatgatcccaggtctcaccttaagaataaaacttgaaactatcaacacttgaaaacatttttgccaggacgtcgttcattttggatccaggttggtgactctgtgcttagattgcacatctgtaatatcacatcctgcagcaaagacaccatcgaggcccccagcctgaaaattgctccaggaaaacccaccactctagcgtgaaggctgatgcagcaaacacaagcaaattccactgagaatttttttttttttttgagaaagtcacggtctcttacccaggctatagtgcagtggcgcaatcttggctcactgcaacctctgcctcccgggttcatgcgattctcctgcctcagcctcccaagtagctggggtacaggcacccaccaccacatccggccaatttttgtatttttagtagagatggggtttcaccatgttggccaggctggtatcgaactcctgacctcaggtgatccacccacctcagcctctcaaagtgctgggattacaaatgtgagccaccaaacccagcccccactgagattctcattcctctctcccagcccatggggtaagtttgccacaaagctccagaggagaggggccgtggggactccatccccacagtaagtgaggccccagcagcagatgcaccccgccctttgcttctctcattaactaagggtcatcctccatctccctccaacctgcctgggaagctaggacgaaacaatacagagaagccagggcagaagggacaaaagaaaagtccagttgacacatcatccatttattatccttcagagtctaaaacttcctcgtgatacaacgtatagccacccattccagcctgcttattggaacttctattcccatctggtggcaaacatttctttttacatttgttttactatcaaagatttagagtcacaataaatacaagtgacagcctccacacccaaagagcctccccaataccctgcactagtgtaaccgtctattacactttaaggattataaaattgtttgctgtccttttttaaaagctcagtccaagttctttaggttaacgtcatgtgcagcatagctcagcatcaaaaaccctacggcagagcagcaaggatcatcccttctgtgatgagaatatttgtatagagaagtctctcccctgcctctacgtccaataggagagcaggagccacggggcccagcggggctgccactgggttgcctcattccctctgccctgaagcttttgcttcaccgaggtccgtggagtacaggtaagaccaggcacaactagcactgtgggctgttccactctgagaagggccgctacagacctcgtcagaggggtggttcctggtcaccgtagagttcctgggatgaggtcaggacggccatagctgtgggaggttccaagggcacttggccattccaaaccctacccccaacctcccctacaacaggcgaggtgtgaactctgagatctccccagccctgtctacagagcagctgacagagggaaccgtttccaggtgctgttggaggttcatgtcacaggtaacaggggacagttacaatcagttgggctgggggctcccacattctgacggcttgcaggaacctgatcctggtagggctctcgggaccaggacccaggcagtgcctggtttaagagggtgtgctttgctgtgggtagaacacccttaacattaatcaatagctatcctggtgcgtccaaaccccacacccagagaggtacttaataatgccttcacctggaacatcataaacgtcataatacaacaacccgcttggggcttatcgtagaggttatgctgcaaggaactgaaaggaaataatgggctagagtgttcgagacagcagaaatgaaggaaagattaaggcatctcacacttttgccccctggggggaaaaaaaaaaagtttacatcacagtatgtacgttgtccctgatggaatgctccctggggacatggggccgaccctctccctttcgaggggcagcagtccatatgaactcacaaggatgggttgacagccatcagccctggaggaacagccaggccaggctgggagaggtcaggagctggagctggggctgggggccggcaggtgcggctcggatctggccccctggtcagacccagctgacccaagctggagcaggcagaggtgacttcggtctggatgcctgatccccagccactgcatagaactgaggttggttcgctggggagggctttcagtgggaagaagccagcctgggtgctccttctgggaggagctggaagatctggcccctgtcatggaacagagagggctaacagctcagggtcgtaggagacaggtatttatttgccaggcacacagaaaaatgcgaggaatagaaatgcttgcatactcttgatttttttttttttttttggtgtaaaaaacacaccctcccctcccaccccaaaaaacatcaaattccttccttttccccaaatccctggatcttggaatgaaagccacccttccccaatctgtcctcacctccttcagcccatccaagttatgcacaaaaaaacaaaaattagtgagaaatttggggatttgcacaacaaaaaattagataatgttttccaaaactaggtcttctatgctgtgtcaaaaaaagtttcctacagactgaggatattcacacgacaggagcctgggggttaaatgagcctttattagaatgttgtagcagttgtgtttgaaggcggtggccctacaaaaaaaaaattaaattaaagtccctaactgcatgggtaggaaaaccagggctggagctcaattggaaccagtggagcccagaactcatggagacatacgtatgtacgtgggcacgggacgccctcgcactggcatgaagccggcccagcctgcaagagacacggaacggcttctgcctttcctcacggaaccagtttttaaagagtgggacgggaaagaaacaaaaatgaaactaaaagcagacctgatccttttaaaaacatttttgtagactctaaagggaattacaaaaaaaaaaaaagtctgaaagcaaatcctgacagcaacccctaggtttaaggacaggttctaaactagacccaaacggaaatcctgacatctgtgcgcagcggctcgccgcacacctggacggcacctcctgacctgcacacacctgtgcacgctcacctcccaggagcaaggccagggtggcttaagattgcgtccatcgaaatgaatagaaaaaaggaaaaaatttaataaaataaaccacaacagaaaaaccccgcgacagtcccccctccagctttctgctcagggctgctgccgaccggatcctctccttctcccttaatgggcagcttctggaatccctgcttctctggctgggtctgttcttcagtttgttcttctgctaagtctggaaggtgcgggggcgggggtctccagaacaagcagcaatggaggcgttcagctggagcgagggctgcctcggccatccctgcatctgtcagtcagtcacgggggcgggccggccgtccctgccaggggctgtggcaccatgagccgcccaccctccagggcacagggccagcgggatgatgcagcgtacaacagggaccccagggtctgcacggtttacttttaactccatcatcatgaggtgattaaaaaaaaaaaaaatctttcaacttatagatcgccatgggaaggcagtcaaagactgggagcctaagacagggaaaagcaaaaaaatgaaacaccccgctcggttcagaagccccgggcgctggccttgcccatgcgcatcacagtgtccagggtgagccgcccgtgtgccggcaggggctgaacaagggggccaggagcagaaccagcccccaaggtccacttttctgctggtgtcgggcaaactaaaggcaaagagagaaaggaagaaagcccacgggaaaggtcccccagcgatgatcctcgtctgcctatgaggcggcaccagccccctagccctgatgaaactttgcagccaagaattgaggtcttgcctctgcagcatggccggtgcttgctcttggggcgggcacggtgtcttcccgagccagcggagggtggtgcagtgggtccttctagaccaggggccaggtgggggaggagggagcccgtcttccacggggcctggctcgcactatttccacgtggctgactgggggatggagcggggtgggatcatgtccaggaggtactctcgctggcggtccacggccgaggagctcttgtgcaccgccaggcttgggctgacaaacgcaagggtcccgcctgcaacagaacagagcgaccagctgagaaggccctcgtcaggagggctcctgggaggagcccagccatagctgcctagaccccagccccaatacagactaaggacccaggagcccttgcaaacccacccacactactcctcaatcaacgtttcaaatcccaggcccccccagagctgaagagtatttaggcagcaactcaatggccttgacattgccaggctctgccaaggtaatcccaagtgtggggcaatcatcagagggtgagcagctacctacgttctacagaaatgaaggtgctgaccacggtgctgcttagaacagtggaaaaccataaacaaatgtgtgcaacaggacaataatgcaggatggaatactatgcagcaatgaaaaactatcttagctgggcacggaggctcagcctagaatcccagcactttgagaggctggggggtgggaagactgcttgaggccaggagatagagaccagcctgggcaacatagtgaggccccatctctaaaaaaaatatcagctggacatggtggcacatccctgtagtcccagttactccagaggctgaggtgggaggattgcttgggcctaggagatccaggctgcaagagagctatgatcgcgctactgcattccagcctgggcaacatagcaagaagcttctccaaaagaagaaaaaaaaaaaaaaaaaggaaaaaaaaactatctcctaccctcaagtgttgttgttgttgtttactggtctcaaactccaggcctcaagcaatcctcctacctcggcctgtcaaagcactgggattataggcacgagccactgtgcccagctcaaattttaatgcgtccagtaagggtctctcattaacacacaaagtagccaacgcaagacacacatttccacaaaggaccctcaagtgaaggggagacactggggaaaacccttaaatgtaatatttgttcacctgggggaggaaaatacaagccattgccacagtcttttctctctgtattttccaaatttccatgatggacaaatatcatttttataattggaaaataaataaatgcccccacccagcacacgcagaatttttggccagagttggaggtaagggctgccccagaccccttgagatggggtctcactcttgccaaggctggagtgcagtggcacaatcagtgctcactgcagcctcaacctcccatgctcaagcgatcctcctccctcagcctcctggctgagtagctgggaccacagacacatgccatgtgcttggctaattatttttttgtagacacaaggtctcaccatgttgcccaggctggtctcaaactcctaggctcaagcaatcctcccatctcggcctcacaaagtgctgggattacaggtgagagccagcatgtctggccctaagagtatttttagtggtggctaatacattttgtggaaaaagcgttcccaggtcaaatgttcttaggaaccaaccctgtgtgcaagggcagcactccagaaacctggcaactgggtcctgccaggcgctctctcaaaacccccgtggtaactcttttaggaaatggtgctttcaactatttattttccctctaatcctaccatcagacacacaactagtgatgccttcatgctccctttcaaactttaaacacacacacacacacacacacacacacagcttccagatgacttccaccaccgtgcccacatgcacacacttatcgacttctacttctttcttatcctttcaaacttcccacaagagtaatttctgaccagcccgtgagtcctcagctgtcttaaacctgctgagcagaacgtctggctggctggtttgatgacaaacacactcaactgtccaggctgcctggattcctctgcagccgaacgtctgctgtttcctgaagtgcccctgcagagcctggcacctgggcacgcccctcacttaggacagcggcaggctcagcaggctctcaggctccccccaccactctgcctggggcctgtctcatgattgtcctctcctacctgcagggccacaggcttcagggtgcatgtgggacactttgcttcctctcccagagggtgcccatctccttaacttggcccttcctgaccaccttttctttccctatttttgacacaagaaatataacacttttgttctaatgttaacacatacatgaaaaaataaacaggccatcgggaccatgccagggacggtggggccgcacctgactccggagagcccactggaggaccttcacccccactggttgttcttcaaacaccgtctccggcaaggcctccactacctgccccgggtgagccagccgctgccctgggcacaccccctgccccgcattactgttctactttgcaccactcagtgtgaccgcagcatggatggcacaatgacagaaaaaagatgtttgctgcggcacaaagagaaaagggggaccctgagtgggcaagataggggtgtgtgctgacaagagtccacatggatggctgtgggggcaccctctgagccaggcctggcccatgttttgtcggtcaaagactgagcctgggtgcagagagtgagggtggttactatttcctatctgctcggggctgtcacttcttcagggtatcctggttaggggcaagagggaaagccagagtccgaggaggctgagcttgggaagcgggcctgggggttcacccgctgcacatgtgcctctgtttcggttaaggaagggtgaaccccacaatgggcaggtcccctggggagccctgtggaggtcacccacctgtgctgaggggcgtcttcttccagttggaggtggcgctgcccttgccggcgctcacggttctctcagaatgtctgccggtcctgctgaccagggctgtggccgaggctgagttctgcagtttgggtgacggactgaacgtgtgcaggacacctcggggcgtcgtggccgaaccccgggacagctggctggaggcctgcagtggagaaaggggggtgacggctcatgcagggaaaagacagcagcaggcgagacactcagcgcagcctctccttgctctggctgacctcttcccacccacatggggtccctaaagtccaaaatcaggagaccaggtaagttacacagaggggtgggggaggggagagagtgaaacagaaacagggagagacagacagaagaggcagcgtgacagtcggcgactgacgtggtcacgggctgcggtgggggcgcgaggctcccggcgcccagtgcggttctgacctgtagcacagccccgttactccagtcgcgggcctctcctgagcggaacgccaacttacgccggggttttatgacctacacaaacgggggttgaaagcaaagtcagtgcggtccgctggccggcccagggtgaccgagggtgagccccacaggacaggcccgtcccctggggactttaggcgccaagtggggatcttgagaaaatgcgtttagtgaattgcaaagaacttccaagaaaacaaaaattgccaaaagggagcttcgagtctacaagagggtgggaaggagaagcattaaaataaaacaacacgagaacaaaaaacttgatttcaaacttgttcctctccaaatttagcaagaacatttttccaaacgcccctttggtatctcaacgtggctttcagaaaagaccttgaagacaagcagtacttgtcagccggcagcctgcaagtgagagctacaaagtctaaagaaactgcaaattagtgtttttgccgcccaacaccaccattaactgcaatttagacgtgcagttaacaatcaggcggtgcagcgcaggcgtggggtggatcgcggaacggcctctgcctcctagggacggcactgccggcagcaggccaggctcacctgcttcagcacggggtgtggggcagcggtgggctcggccttggcctgtgcaggggccgtgccctgctgcaggagccgctgctcaatctcctgttcctgctgcagcgccttcacaaaggcggccttcagccggctggtgtgctccaccttgagcgccttcttctggttggttgtcatgcagttctcacacatgatggcgccgctcttctcctcccgccagcggcacgtgaagtccgtcttgcactgtgcacacatgtagggctcccgggacagcacagtggcggccgacatcctgcctgctgcaagcagacagcacatggctcacgtcagagggccaggacgacagtcagggccctggccgcccccagcccaggatgctggagtctcagtcgccacagtctgtccgttctgcaaatgcctactgggcaccaatgacatgtggacatggggccggccaacgccgaacagcttcagaaaacgtcggcctcctgtcccacccatcgctggacatgacaccactgaggaccagcagggaccatgccaagccctgcctcagtgtggtgggcacccttgcttgtgtacgagttaataagggtgacaggcaagtcacccagcaagtgctttgtgggtgctgaggtactcagttcattcttaggacggggaacccccaaatgcgccatgtcctgatgaggaaactgaggccaagagagaccaagtgacctgtagatcacattgtcactcagtggcagggcaggactcacacccgggataggccccaggccttgggctgcacccactgcacaaggtgggcagcaggctacaggggcagcaagggcttggtccccttgtctgggggacagaatgcatagtctccttgggggctgcaagaggtagctggggaagtgtacatgaagcatgtgctcgggcgtgaggtctgggcgtatttgtgccgaccttttttgtgttcagcacttaggggccttaattgctcttggtcatcacagacaatgtcagaggactgcaggggctggggggtggggagatggatgtggcgagactctcggccttccctctcctgcctggactggcctggccccttctaagcccctgacccatgagaccgccacctgcagcttacatgctctggtgacaacggcacatctccttgcacacgtccaacccatggccagcgtgagcggcgccagaaccagacatggtgcgaggctgggggctctgggaggtgtcaggagatgcctccagcagggctcaaagtctctcccacagtgaggtcctatccttggcaacaggagagggagactgagccctgatgagggaacggcagagacagactggtctgggagagcggatgcccgcacaggcaggggcaaggagaggcactggtcccaactcggcccccaatcctcatttcctacagcagccccaggtggctcttttgccgacatcaccttgtcgaaaaggaggcaccaaaggcaccagccgggctgtgtcagagcctcacctccccatagctcccccaggtccctcctgcagctgggagctggaggccatgcccttggggcacgctgcagttagtctcggtaccatcctgtggccgggagttacgagagcgactgaggggcaagggagtgggttacaagcaactctacatttgagggccactctgaggctgcgccaggcccagccccacgcaagtgtggagagctctgcctcttggggaccctgggtgcaaccacatgggggcaccagttgatgcaccaaagtaccctaagagagtggggagagcatcttcccaaccccaggtgctgggggcacagctcgacctggcccccatgccctcctccctctgtatcctgggcagtgcgcgggaggtgcttctctgcacacacccaccccgctgctcccaagtctgtgctgggaaggctctgaggctgccaggccctgcccctgccctgggcccctcacagtcctgccgactcctctgctctgagagtctgatgcagtcaccaggagaggactcagcctcctggcctactcgtgtcaccccaacctcaacctgtgggcagaaacgtccttggtctccatgtctggggagcaggggctccctgggggccaactcggccactcagatccacccgcccagccgtctccaatgctgtgatcaccccgtagatgtctttttattcctaaatcccccaggacacagtgcactcccacgctgcctgaagagggtgatcatgcgagcctgcccctgggcagtggggtgggctgtccctctccctcctcagaagctgggagcacttgaggctctggaaggttctgcctgtgtgtcacaactccacattggcctgagagcccttcgtggaggccaaccctgtcagcctcccacagatgtgcaccctcacgtctaccccaccacacgccaacgtcacggaggccactactgcccgtccccctggaccctgagcctctcggggcctggctctcagaggccccaaccggaggacagtgtccagactccacagtggcactgacggtgtccctgccaagcccacccaggaccatcctggctaggcagccctgccccagcctctgctgtgtgttggaaagaacccacggggcagcacccttggaggccagaggcggaagcagcccggctgggtccaggccactcaccttgtgtctccagtaggttctgcaccacctcctccaggccgaccaggtagatgaactcgttgttggcggcgctgggcaggaagttcatctctggggctgggggcttgggtggggggatctcgagtagcgtcttctccagctgtttgcgcagcgccagcttggcggccgcctgtcggcttgctggagactcggcagaggtgaccacagaggccacactagtgggggtggagttggcctgagcggaggtggctgttgtccccttcagtgatgctggggtgggctttgggagacaaaaactcagtcagggcgctccgtgcgcctgcccagaggaaggctccccagcgccccgaagcccgaggtcctgtcaactgcactaaccagtacccttgacgatggcgtccttaacaaaagtgaacccagccatgataacaggctctcagaagccagggcagcagggagaggcgcgagaaacacaccaccctaggtagtggctgctcatctgcacatgtgcaccgaggtttaccagataaaccgcacacacttaaaatctatagtttgctgtgctccgccatgtgaatgtgagggcacccatgtggctgtcaccaggttctggtggtcaccacactgcccagcagggccactgtcctctggctgtggcctggcctactgccttctcacagggtaagagggtgctcaccgcagcacccccatgagcctctctgcatgtgctcccctgggatgctaatgtttgaggtagtccccgagtccttatggggcgatgggggaagcagctcctaggccaacctcttccccttgccctccacccagtcctcaccgctccagtgccacctcacagtcctgcctggatcccaggagcagacccttgactgtctccaccagccccacaactgctggatagggctctccctgaaacccagaactgcccacatgccaatgttattgcttttaggggctgaggacccctctggaaatatgatgaaagctgtgcaccccacccccagaaaatggacacacccaatgacttgcaaatgccacactgtggggcacagggtgtgcaggatgccttcccagggtcccaccccccaagaaaggttcccagagaccggcctgctggtttgttgtcccctcagcaaccaagaccaaacccaggcctccctcacctctgaccagccagttcccctcctccttcccctcagagcctcccccagccacgctaggagcagaccaccttctctgccactgactgcctgtgcccaccctcaggaaacaaagacaagagaaaggactggataaaagttcacgggtgggcaggatgtggtggctcacgcctgtaatcccagcactttgggaggccaagtcgggcggatcacttaaggtcaggagttcagggccagcctggccaacatggtgtaacactgtcttgactaaaaatacaataactagctgggcatggtggcaggcgcctgtagtcccagctacttgggaggctgacgcaggagtatctcctgggagatggaggttgcagtgagccaagatcatgccactgcactccagcctgggtaacagagggagactcttgtctcataataaaataaagatatttgatcacaccactgtactccatccagcctgggcaacagagcaagactgtctccaaaaaagaaaaaaagtcaacaggtgtatgaaactacctgcctgggtcagtccaggactagccatcttctctgcactcgaacctgaccttcgaaagcaggcagggacactgcccagagccttgctcttgtctgaggagggtgggcaagaacaaactgtgccaaagagggaagaaagagcgaacacgcccaccaacaaaagcccctgcagacctggtaattttatctgtcagccaaggcgcctgtttccagcccacccgccccttggttctgctcttcccatcctacttccagtgggtggggacagaccctccccatctgagaggctctgtacagaggtgaagggacgtgcggctaagaataggcgcacctggtgacatgagaacatttgctgaggaggcaatcggaagaagccactgccgggagggcggcatgggctccggtgccccccaaggcatctccgggcccatcaccggcctctcctgggcctcgactatccccctaaacctgctgtgtgccacatgctgtttcctcagccatggggctggtaagcagaccccaccttcagctcaggtccgtgcatcgcccctctcgtcagctgcccacctgtgctggatagcaagtctgcccacaaaacttctgcccacgacccagacagccctgtggcccccaggagctcaagtccaagcccctgcctggctctgaaagagcaaggcaggtcatgccacacagcccagggaaacactactgtgccccagaacctgggtccaaggggagcagtcacaggtgggacacacactctccctggcacagtgtggcgcagccctcacctgtgggatgttgacgagcaggctggtgttgggaacattggcgacgcggatgaggccctgctggatgatcctctgtccctgaatctgcacactgggcaccgacgcccggggggccaggaggaggggcggtggccctgtgctggaatgttgcctaatgctgtggatttgctgttggggtagggtggggagaacaagaaatctgactgagatcaacaatggagcgggaccggaaggcacagggcaccttgcccccaaggactgggaagggccctactttcaaggtagacgactgctgaggctgccaggtctcccccatgtgcacagccctgcttacctgagcccccctgacgagtgggggcatgacgacctgtgagctcgcctgtggccccagcttcgaggacgcctgctgcccacctcggaccaggggcgggggtatgacactgccgggcatccgagctgaagaggtctgccaacgataccaagacccagatttacatggaccggacccccccacactttttttaaagcaagcagttttgctgcttttatgaaagtacatactagtttttttttttttttttttttaagtagcagagaagttaaagaaaattatggatgggcacagtggcacatgcctgtaatcccagcactttgtgaggccgaggtaggcagatcatgaggtcagaagtttgagaccagcctggccaacgtggtgaaaccccatctctactaaaaatacaaaaattagccaggcgtggtggcacgtgcctgtagtcccagctactcagaaggctgaggcaggagaattgcttgaacctgggaggcggaggttgcagtgacccaagatcgcgccactgcactccagcctgggcgacagagcaagactccatctcaa

SEQ ID NO: 7946 - DNA, 544 bp, Homo sapiens
caaacaggccctgcgttccaaatctgctctagccatgactgccttccccaggcctgtttcctcctctggacaagggaggtggtagcatttgagctaagctccgctcttcccatgtcggcaagtgggggctgcagctccaaggccctgggagagatggagagtgggggtgggccacggttggggttcggtgggggagcgaccagcgctgctgatgaatcattcatgaggggcgggctgccccggaggcagtttccccagcaacgcagcttagtgtctccagcaagatgccaggagggtctcggattcccgggattcccaggcccgtcttggccatatccctgcctccggttccccaccgtggtcatgcctctgccgttgaacctccatcccggctgtgcccgtctccagtccccggaccccattctgtcccagctatgaccctgcctccggtcctacgggctgctcctggccccatgggaaccatgcccgtctccagcttccctctccccagctgacctgaggaaatgccgctcttcgggcgcct

SEQ ID NO: 7947 - DNA, 293 bp, Homo sapiens
atctttttttttttttttgagacacagtctcagtctgttgcccaggctggagtgcagtggcatgatctcggctcactgcaagctccgcctcccgggttcacaccattctcctgcctcagcctccccagcagctgggactacaggcgcccatcaccacgcccggctaattttttgtattttttagtagagacagggtttcaccgtgttagccaggatggtctcgatctcctgacctcgtgatccgcccgcctcggcctcccaaagtgctaggattacaggcgtgagccaccgag

SEQ ID NO: 7948 - DNA, 4203 bp, Homo sapiens
ggttctgggcaccctctcacatcccagtctctgatcagggaaagcagggcacagccttgggaagaatggataagcatggtgagtggggctggaggcagggtggggctggaggacaggacctcttgaccctagcttggacaatccagcccatcaccatgaagtccaaccttttctcagttacccatccatgtagctgcaagccctctcctttcgccttcctgaattttttttttttttttttttttgagatagagtcttgctctatcacccagactggagtgcagtggcgagatctcagctcactgcagcctctgcctcccgggttcaagtgattctcgttcctcagcctcccgagtagctgggaccacaggagcatgccacaacacccagctaatttttgtattttgtatttttagtagagatggggtttcactatgttggccaggctggtcgcgaactcctgacctcaagtgatccacccaccttggcctcccaaagtcctgggattacaggcatgagccactgtgcctggcctgttttttgtttttttttttttagaaacagtcttgctctgtcacccaggctggagtacagtggcgttgtcacagctcactgcagtctcaacctcccaggcacaagtgattctcctgacttggcctcccaaagtgctgggattacaggtgtgagccaccacatctggctccagaatagtcttaacatctgcttcatcatctccacctgctcctgttcagacctttgtcttctccggcctggaccactgtaatgactcctaagtggggtctccctctgtcttgtcagagggaacatcctaaaacacagcttggaacacgtccctctacaagaatgttcagcggctcctcactgctgagaggcaaagtccagattccatagcgcagcactcaatgtccaaccctttgttttcaactccttttcctcctccccttcctcttgaaacatctctggaacccttttctagctgtgaactaggcctggccttttacaaccagaaggctagaacaccaatcatgagcagtacctttgctctttaaataggatggactgggatcaaaagaaacgtttctttttctttctttctttttttctttttttgagacggagttttgctcttgttgctcaggctggaatgcagtggcgtgatctcggtaaaccacaacctccgacccctgggttcaagcgattctcctgcctcagcctcctgaatagctgggattacaggcatgcactgccacgcccagctaatttggtatttttagtagagacggggtttctccttgttggtcaggctggtctcgaactcccgacctcaggtgatccgcctgcttcggcctcccaaagtgctgggattacaggcatgagccaccgtgccccgcctagaaatgtttcttgacttttccatagcaaactccacgagttgtgtcttccctgccttcctcccctctttcctttacaaacctagctatccagatgtgacagacacaggatgcatgaagcctggtgaatgtttgctgaatgggcggcggacaccttctaggggaggccagcttagtttccatgtcagcccaggaactttctgctggggctactgcttgtagttgtagtaactgtgccctgaacaaaggcaccagcaagaggggacagtggtggctgaagtcaagcctggaagaaggaggaagcgtcttttcctaattggctcaccctaaggacagccttttcccaattggtctgcccatagagggtcctttttccatttccctaactataaggcaccttttctaatcatacagaggtgctgtaagcccacccgcctgcccaccccaccagcggagatgctgggcttccttaaggcaaggcccacttggaggaaggaaatcccgttcagaaaataaaatattctgtaaataaccacctattaaaatgggatcagtggccaggcgcggtggctcacgtctgtaatcctagcactttgggaggccgaggcgggcagatcacgaggtcagatcgagaccatcctggcaaacatggtgaaacctggtctctactaaaaatacaaaaaattagctgggcgtggtggcgggcgcctatagtcccagttactcgggaggctgaggcaggagaatggcgtgaacccggcaggtggagcttgcagtgagccgagatggcaccactgcactccagcctgggcgacagagcgagactccgtctccaaaaaaaaaaaaaaaaatgggatcagtaagccaggggaggcggctcgtggctgtgatcccagcactttagggagacctaggcaggagggctgcttgaagccaggagttcagagaccagcctggacaacatagtgagaccctgtctcaaaaaaaaaaatcttttttaattgtggagacggggtctcactctgtcacctaggctggagtgtggtggtgcaatcatggctcaccatagcctcgacttccctagctcagcttcctctcacctcagcctcccaagtagctgggaccacaggtgtacaccaccatgcccagcttttttttttttttttttttttggagcgaaataaaaagagtctgaccttgttgcccacactggtctcgaactcttgagctcaagccatccaccgacctcgacctcccaaagtgctgagattacaggcgtgagccaccatgcctggacttaaaaaatttttttgaaaaagtatccagggccgggtgcagtgactcacgcctgtaatctcagcactttgggaggccgaaaagggcaaatcacctgaggtcaggagtttgagaccagcccggccaacatggtgaaaccccgtttctattaaaaatacaaaaattagcagggcgcagcggggcgtgcctgtagtcccagctacttgggaggctgaggcaaaagaatcgcttgagcccgtgaggcggaggttgcagtgagcagagatcacgccactgcactctagcctgagctacagagagagaccctgtctcaaaataaataaataaataaataaataaataaataaataaatacatgaaaaattattctggaccctttctcggggacagcaggactgccctgacctcctcccggcccgcaggtgtgaagacccccttgtggaagaaggaaacggaagagctccgggccgaggacgcggagcaagaggaagggaaggaggggtcggaggacgaggacgaggacaaccagaggccgctggaggacagcgcgacggagggcgaggagccgccgcgggtagcggaggagggcgaaggccgcgagcggcgctcagtgtcctactgcccgctgcgccaggagtccagcacccagcaggtggcgctgctgcggcgcgcggacagcggcttctggggctggctcggccccttagcgctgctgggcggcctaacagctcccaccgacaggtgcctgcgcgctcctcgaccggggcacgagggaggcggtgcccgggccccagggaggaggggctgccccaggcactgagcgcctggtccccgccggcaggaagcggagcctcccggaggagccgtgcgtgctggagatccggcgacgaccgccgcgccgcgggggctgtgcttgctgcgagctcctcttctgcaagaaatgcaggagtctgcacagccacccagcctatgtggcgcactgcgttctggatcacccggatctgggtaaggcgggggccgctgggaactcctgagcgcccccgctcccagcctttgtgccctccatcatttcctggccccagaccccctaccgaccttctctcttggagcgcggagccctcttcgacgcattccgcaggaccgccccttctcagctgctgcccagagcgcccccatccgtcaagaaggcccactgttggtgcttggttcccatctgtcacctagcgcccccagtgcagagcccagcataacctagagcccgctgtcaacagcgcccaccgagggctccccgcccccacgcagcaccagcgccaccgcacacctgactctgtccgctcacacagcctcaccttcacctcttgggtatttcagatccgctctggcccagtgggcagaggcatcgcctagagaaaataacctcagggttccctcatccctctgacaaacctgcctctttccctgaaaccattcaataaaacctctgatcaaagtgtca

SEQ ID NO: 7949 - DNA, 7346 bp, Homo sapiens
aaggctgcttcctgcctctcggcccaccagctgaaggcacctctttattccagccccagacaaaaagccagggactggtaggcctgcatcagtctccctcccactctgtgtcctgaccccacaaagggcctctgaggttggagacgcctgtgccttcatccccatccatgcttcctgggggtggggcctctgactaaatatgacaccgtttttcaagaactgagccagggggtcctgaggagaagggcacagtcttgcaaaatggtctcgaatttctctgctgagtttttcatccccctgcttggatcccagtgctgttacctcttgaaaggaactgtacctttagccgaagaaacaaaggcctggggaggatagaagtcctcggaggaaagggccaagggatctgggacccttttttgcttttcctaagattgatcccacccccacctccatgtggtggggacagacaaagacaatgctgcattcttcaaggaacaaaggcagacagacttccagatggaggctttgctgcccggtcttctgcagagggactcagaggcttctaagaggggttctgccccgggggtggggaacatgattttgccctgagagcaccaccagtttctgaggtgaggaggtgccttcagaacagggcgctccccgagttggcatgccagcagcccatccagggcagctcggtggcccagcggcccgaggtggttgcctgcagtttggcctggtcgaggcgccagtagcggtcatctcggaagaagatgatggagccatcgggcctcggcagggcgccgctgacctcctcagggatgcctccccagtcctgcagacttcgggggtagtagggctccacttgcagtccccctcgggccagcacgtagtagcgggcacccttgaagaggatgaggcggcgcagaggagggaagaagagggcggcgtcaggatggcggggcaggccccctgcccggcacagctgtgggagaccccacactggcttggggccccggaacctccagcatcgaccccctgtggggaattgggagagccagggtgagctggaggctgtcacccattggccctctaccccacttctgtcccccatacctctgctctcctttaagctggagcccacgatggttggtattcatatcaatcaaacggattgcactacaaattagttataaatagcagggtggtagtagcaactcctattatttattgtctagactcccagcaggtgtcagcagagggcagatagccccgaaaggaaggcccagagctttctccactgccatcattactaataattctatgagggcaaggatttttgtttcattcactgctgtatccctaacatatccaaccacgtctagtgcatacaaggcactcaatattggttgaatgaatgaacaaatgaatgaatactatttacctaagtattaacatgtatctagtaagatattgcacactcttcaggcaatattctcttttcacactccttccccagcaagtgtgaggtattgttttccccattcgagaaatgcacactccaaaagttaagcgacacgtccaaccccacacagctaggattccaaggaagatccagctttctgctcagttgcagaactccagagcagtcctctgcttccctctagactcctctctgaaactctccctgggactttgacacttgctgctccctaatccatccctgaaaggtatcttctgatagagtcttccctggggtcacaggttcagattggaatggagactccaccatggactcgtgtgagagtcttcccctcttttgtcctcttttgaccttgggcaggacaccttccctctctagggctcagttttccccgctgccccagagccagtacctttgaagaagtagaaatctccatcattcaatgacactgccgcagcctcaatgttggggggcagcccgacccatctttcctgcagtggacggggctctgagacgttgccatcagctgccacctcccagaaatggctccctttaaaaatgtacagttgctgttgcctgtctgcccagagacaagagagagttgaggagtgaccatcagcttcctgctgtctttccaggaaagatgctgtcctggaagccagtttcccaaatggacaagcatagggtatggtgtgtacagttggcgcagaggggaaagtgggcaggaagaagcggtgttttgctgggtgtggggttgctacctgcagcgtgcttgtggcttgggatttctggcttttacagtccatccccccaacttgtactgcagctctggagacactaagagatatggaaggagagaaagaagcaaagcaccagtgggaccttcttacctacagtgatggcatcgaaggaagagtggcagtatttagggccctgcgtttcagggcgccttccttgggggctgtaggagtcccaggtctcaaagtcagtgaacagctttcctgggagctggacggccactgagccccctaggggcttccctttgtgagtaaggaaataagagagagagagaacacacatagggtagagggtatgctgtgcactcaagaccttcccttggttactttcatgattatctaatatgaggggcaaggaaggagagtgggagtgggggttaagagttgttcctgggccaggaatggtggttcacacctgtaatcccagtactttgggagaccgaggcaggcagttcacttgaggttaggagtttgagaccagccttgccaatggtgaaaccctgtctgtactaaaaatacaaaaattaaccaggcatggtggtgcacacgtgtagtcccagctacttgggaggctgaggcaggagaaccgcttgaatccgagaggtggaggttgcagtgagctgagatcatgccactgcacgctagcctgggtgacagagcgagactccgtctcaaaaagaaaaaaaaaagagttgttcctggttgttggtgctaaccatcaaactaaactcaggaatcttcttctacccaacatcctgggacagaggaacctcctgagataaaattggagtggggtatcaagcaagggaactaagcgggtcagggagtcctcttctctgattcctgggcaacacaggtgtcatgagggcagagtccagagacccaggctgtgataactacagcaattataataattacatcactatccttcacttatgagaggagggaagcagagtccaacaagcttattatttggtaccatcacctgaatcccagtctgcaatttcctagctgcatgaccctgagcaagttacctaacctctctgagccccattatcttgatctgtggacaaaaagatgcatacttcatgggtgtgttgcatgtcaagtgcctggcccacagtaggtactcatgaaatagtagctgttagtattacagggtataagtttctcaggctacaaagcatgctcatacccagtagcacaacagccctgtcaggtaagcaggacctcagttgttatctcttttcacagaaggtaaaactgagggttcacagagggaaaatgcccaagagcatctgctaatcagggatggaaggtgacttgaacccaggcctcctggctctgcccatggcactctgagggagacagccctgggctgagatagatcccagggcagtagcactggcccaccctggggaagaagacctggtctgagcccaccaccaggcagaggtgggcaggctttggggatagggggcatcagcatcgtggtgagagaaaggctcggggagagctagtggctggggcaggaatgaaggctttggggtccgggatgggggaagaggtgggcccaaggattgggtatgggtgatggggcgggcacatggtgtgagcgggagctgcgggggctgggggttgggcagaaatccagtaagtggaacgcaaggggcggggttgggggtactgtgcacaggaattagttgggactgatggagagatgagggccatggactcgggggagcaagaatccgaggtttttcagatttgaggaggggcatagggctttagaattgggacgaatcggcgacagggaggccagatctatgagcttaggatgggaaatcctatttgcagagccggcgttcaaggacaggaggccttgggggcaggagtgggaccaagagcggggcatgtcccggggcctcaccatacaggctctgcacggccagcacgtcgtcccagctgagcagcgcgtcgcggcccagcctcttgtagtagggcgccatgagcgcgcgcggcgcgggcgagtgggtgaggccaagcgtgtgaccgatctcgtgcgccagcaccacgaacaggttgcgcccgcggcggcggctcagggaccagcgctcatcttggtcgaagtgcgcttcgccgcggcggggcaggaaggcgtgcgccagggcgccccctgcaggtggggcagaaggtcagggggtgccacggcccacgacgcccccaggtactcgcggcccagcgcaaatgccactggggtgtgtgtggctgttctctgctgtatagtttccctcctaaaatctggcagaacctgaagtgtgcagaggtgaacagtaggctctgcactacttcaggtgagtagtgcagtggacgatgagtaggctgtggacgcctaagaggcactgtggtgtagatatggcatgggcccaccaatttgggtgccattcctacttttacaatctactagctgtatgaccttcagcatttagcttaacctctctatgtcttaacttcctgatctgcaaatgggaatgatgatggtgagcttcttcctcacagagttgttctgaataataaatgtgtgtgtgtgtgtgtgtgtgtgtgtgtgtacatgtgtattacaaatgatgcagcagggtgtggtagctcacgcctataatctcagcactttgggaggctgatgtgggaggaacatttgagcccaggagttcgagaccagcctggggaaacaaagcaagacctcatctccactaaaaaacaaaaacattagctaggcgtgatggtgtgcacctgtagccccagctacttgggaagctgaggtgggaggctctcttgagtcccaggaggtcaaggctgcggtgagctgtgattgcgccactacactccagcctgggtgacagagtaagaccctgtctcaaacaacaacaacaacaaccacgaaacaacaacaacaaaaaagtgatccttggaacagtgcctagcacgtaataagggccacttaagaattactttcaggctgggtgcggtggctcacgcctgtaatcccagcactttgggaggccgaggcgggtggatcacgaggtcaagagattgagaccatcctggctaacacggtgaaaccctgtctctactaaaaatgcaaaaagtagccaggcgtggtggcgggtgtctgtagtcccagctactcgggaggctgaggcaggagaatggtgtgaacccgggaagcagagcttgcagtgagctgagatcacgccattgcactccagcctgggtgacaaagcgagactctgtctcaaaaaaaaaaaaaaaaaaaaagaattactttcaaaaagatctaggagtaggtagagtatagttacccctaaaaggaggcatgatgggaccttctgtttcttgatttgggtgctgggagcattcagtgtatgaaagttcatcaggctaaacttgagatggttcacttctatatgtatgtgtattttatttaataaaaagtataatttttatttttattattttatatatacttttgttaaagaaaatatacatacatatagaagtgaatatatatatatatatatatatatatatatatatatatatatataaaattgtgttcttgccctcctctgccagggcacctctggggggcctctctctacttctaataggaatgagcagaggtagttgggctggatcagtgattttcaagcttttagtgtgccccagatggagcttattagatgtgcaggtgccagggtaccacccctaacaattccccttccacagcggcaggtgaccctgacacaggagtcagaaaactgcactatgataaagtttgcctagaagcttgtcgagggtccctccagctttgccttcttggaccccaggccaactgtgactggcaaagatgggggtgctagactaaaaggagatcctcctgggggcatggaaagtcagccgcatgtaggaggaatacatgcctattttgaatatgtctccagctgtttcaagcattgttcactctattcaactctcactgggagacggatgggcaggtttgggagagaagaccactattcaaaaagacaaagtatctgtcccaaatcagagggctgcttggggatcctgatgtccttactcccagtgcagtgctgtcttaactaggtatggatagaaccatgtcaggtagatcacatggatgaagtcagttacaaataagtgcatgtgtgcactacatgtggattcttgcaaagcctagattcctcctggtcctaacccaggtctcagcagtagggcctggatgtgggctttgctgtaggtgggcttgactgaaagcaggagggtgcgagggaggtgggggctcaagttcccaggccatacaagggcttaagtccccagcttgaaggggtctgattaggtttcctttcttcattaggaggggaaatgtgcaaacagcctatattcaggttctgaaggctagcgttaggcagaaggggaaaagagcggtttaaactgcagccagagtcttcaggttggggacaaacagaactatctgtggcgtaggtatatgaagcacttccctgtcagggctgtcgggagtagggtgcctcttgccctgtggcagcggctctggtagttgggggtgggggagcagtggtgggcagtggatgttttttagggctctggagtgaacatccactctggagaacaagagaagcacaggcctgtctagaggcagaggatggatgatggaacctcgggagattctcccagaatgcataatactcttgagaatttgcaaagcacttcccttgcagagcttcatctgactgtcccttcagacatgtgacacataatagggcagggaccactgttcccattttaggatgaggagactgagggttctctgcagggagatgtgcctcagccaaggccacagggagggtgaatgcttcattgccacccccaaactgcttctccaagttgggttcccctcctgctgtgcgggagggaggctttgtgccagcacctgggccatcaaaggcattgcccagcccatcgttgtg

SEQ ID NO: 7950 - DNA, 101 bp, Homo sapiens
cctgtagtcccagccacttgggaggctgaggcaggagaattgcttgaacccgggaggcagaggttgcagtgagccgagattgcgccactgcactccagcct

SEQ ID NO: 7951 - DNA, 2009 bp, Homo sapiens
gtcaccgatggccagagactccaccctttagctacacttgtggcgacccatccacctacagagtcaccttccccgtctgcccccagaagctgtcactggctcctccgagtgccaaggccagcccccacaaccctggaagctgcggggagccccaggccaagttcctagaagcattctttgaagaacccccaaggaggcaatccccagtgtccaacctgggctcagaaggagaatgtccgagttcaggggctggcagccaagcccaggagcttgcagaggcctgggagggctgtagaaaggacctgctctttcagaagagtccccagaaccacaggccaccttcagtcagtgaccagactggggagaaggaaaattgctaccagcacatgggcaccagcaaaagccctgctccaggattcatccatctacgcaccgagtgtgggcccaggaaagaaccgtgtcaggaaaaggctgcccttgagagggtacttcggcaaaagcaagatgcccaagggttcacacctccccagctgggtgccagccaacagtatgcatctgacttccataacgttttgaaggaggagcaggaggcactgtgcttggatctgtggggcacagagaggcgagaggagaggagggagcctgagccccacagcaggcaaggacaagctctgggggtcaagagagggtgccagctccatgagcccagctcggcactgtgtccagctccatccgccaaagtcatcaagatgcccaggggtggcccccaacagctggggacgggggccaacactccagccagggtctttgtggccctctctgattacaaccccctggtgatgtctgccaacctcaaggctgcagaggaggagctggtcttccagaaaaggcagttgctaagagtgtggggctctcaggacacccatgatttctacctcagcgagtgcaacaggcaagtgggcaatatccccgggcgcctagtggctgagatggaggtggggacagagcagactgataggaggtggcgttctccggcccaagggcacctgccttctgtggcccacctcgaggactttcaggggctcaccatcccccagggttcctccctggtgctccaggggaactccaagagactcccactgtggactccaaagatcatgatagcagctctggactatgatcctggggatgggcaaatggggggccaggggaagggcaggctggcgctgagggcaggagacgtggtcatggtttacgggcccatggatgaccaaggattctattatggagagttgggcggccacaggggcctggttcctgcccacctgctggatcacatgtccctccatggacactgagcaagcatccttgcccaggtagtggcctctggctgctcacaccctgccagaggagaagcaagcgttcagaccctcacaccagcacccctcctcaccaccataagtagcatgtgctccaagtgccactgtgttaaactgatggtagtccttaagcgtcccctaggctctgaaagtagcaggacttaagcctgagttatttgcaaaagcaaacacaacaagccaacccctgagagtctgagaagccatttcaaagttgctgataactatggcaggtatacggagaagcgcctttttctgtggccaatgtgtgttttctctgggaggttaaggttatctgtccattgccttgtacgaaagtctcaagaaaagtctacatcttaaaaaagaaaaagcaatctgagtgttatttttgggatgtgagggtgatctggctgcgacatgtgtcaccccattgatcatcagggttgattcggctgatctggctgactaggcgggtatccccttcctcccgcaccactccatgtgcgtccctccagaagctgtgtgctcaatggaagaggatgaccatccccgatagaggacgatcggtcttcagtcaagagtataagagtagctgcgctcccctgctagaacctccaaacgagctttcag

SEQ ID NO: 7952 - DNA, 1747 bp, Homo sapiens
gtcaccgatggccagagactccaccctttagctacacttgtggcgacccatccacctacagagtcaccttccccgtctgcccccagaagctgtcactggctcctccgagtgccaaggccagcccccacaaccctggaagctgcggggagccccaggccaagttcctagaagcattctttgaagaacccccaaggaggcaatccccagtgtccaacctgggctcagaaggagaatgtccgagttcaggggctggcagccaagcccaggagcttgcagaggcctgggagggctgtagaaaggacctgctctttcagaagagtccccagaaccacaggccaccttcagtcagtgaccagactggggagaaggaaaattgctaccagcacatgggcaccagcaaaagccctgctccaggattcatccatctacgcaccgagtgtgggcccaggaaagaaccgtgtcaggaaaaggctgcccttgagagggtacttcggcaaaagcaagatgcccaagggttcacacctccccagctgggtgccagccaacagtatgcatctgacttccataacgttttgaaggaggagcaggaggcactgtgcttggatctgtggggcacagagaggcgagaggagaggagggagcctgagccccacagcaggcaaggacaagctctgggggtcaagagagggtgccagctccatgagcccagctcggcactgtgtccagctccatccgccaaagtcatcaagatgcccaggggtggcccccaacagctggggacgggggccaacactccagccagggtctttgtggccctctctgattacaaccccctggtgatgtctgccaacctcaaggctgcagaggaggagctggtcttccagaaaaggcagttgctaagagtgtggggctctcaggacacccatgatttctacctcagcgagtgcaacaggcaagtgggcaatatccccgggcgcctagtggctgagatggaggtggggacagagcagactgataggaggtggcgttctccggcccaagggcacctgccttctgtggcccacctcgaggactttcaggggctcaccatcccccagggttcctccctggtgctccaggggaactccaagagactcccactgtggactccaaagatcatgatagcagctctggactatgatcctggggatgggcaaatggggggccaggggaagggcaggctggcgctgagggcaggagacgtggtcatggtttacgggcccatggatgaccaaggattctattatggagagttgggcggccacaggggcctggttcctgcccacctgctggatcacatgtccctccatggacactgagcaagcatccttgcccaggtagtggcctctggctgctcacaccctgccagaggagaagcaagcgttcagaccctcacaccagcacccctcctcaccaccataagtagcatgtgctccaagtgccactgtgttaaactgatggtagtccttaagtgtcccctaggctctgaaagtagcaggacttaagcctgagttatttgcaaaagcaaacacaacaagccaacccctgagagtctgagaagccatttcaaagttgctgataactatggcaggtatacggagaagcgcctttttctgtggccaatgtgtgttttctctgggaggttaaggttatctgtccattgccttgtacgaaagtctcaagaaaagtctacatcttaaaaaagaaa

SEQ ID NO: 7953 - DNA, 2009 bp, Homo sapiens
gtcaccgatggccagagactccaccctttagctacacttgtggcgacccatccacctacagagtcaccttccccgtctgcccccagaagctgtcactggctcctccgagtgccaaggccagcccccacaaccctggaagctgcggggagccccaggccaagttcctagaagcattctttgaagaacccccaaggaggcaatccccagtgtccaacctgggctcagaaggagaatgtccgagttcaggggctggcagccaagcccaggagcttgcagaggcctgggagggctgtagaaaggacctgctctttcagaagagtccccagaaccacaggccaccttcagtcagtgaccagcctggggagaaggaaaattgctcccagcacatgggcaccagcaaaagccctgctccaggattcatccatctacgcaccgagtgtgggcccaggaaagaaccgtgtcaggaaaaggctgcccttgagagggtacttcggcaaaagcaagatgcccaagggttcacacctccccagctgggcgccagccaacagtatgcatctgacttccataacgttttgaaggaggagcaggaggcactgtgcttggatctgtggggcacagagaggcgagaggagaggagggagcctgagccccacagcaggcaaggacaagctctgggggtgaagagagggtgccagctccatgagcccagctcggcactgtgtccagctccatccgccaaagtcatcaagatgcccaggggtggcccccaacagctggggacgggggccaacactccagccagggtctttgtggccctctctgattacaaccccctggtgatgtctgccaacctcaaggctgcagaggaggagctggtcttccagaaaaagcagttgctaagagtgtggggctctcaggacacccatgatttctacctcagcgagtgcaacaggcaagtgggcaatatccccgggtgcctagtggctgagatggaggtggggacagagcagactgataggaggtggcgttctccggcccaagggcacctgccttctgtggcccacctcgaggactttcaggggctcaccatcccccagggttcctccctggtgctccaggggaactccaagagactcccactgtggactccaaagatcatgatagcagctctggactatgatcctggggatgggcaaatggggggccaggggaagggcaggctggcgctgagggcaggagacgtggtcatggtttacgggcccatggatgaccaaggattctattatggagagttgggcggccacaggggcctggttcctgcccacctgctggatcacatgtccctccatggacactgagcaagcatccttgcccaggtagtggcctctggctgctcacaccctgccagaggagaagcaagcgttcagaccctcacaccagcacccctcctcaccaccataagtagcatgtgctccaagtgccactgtgttaaactgatggtagtccttaagcgtcccctaggctctgaaagtagcaggacttaagcctgagttatttgcaaaagcaaacacaacaagccaacccctgagagtctgagaagccatttcaaagttgctgataactatggcaggtatacggagaagcgcctttttctgtggccaatgtgtgttttctctgggaggttaaggttatctgtccattgccttgtacgaaagtctcaagaaaagtctacatcttaaaaaagaaaaagcaatctgagtgttatttttgggatgtgagggtgatctggctgcgacatgtgtcaccccattgatcatcagggttgattcggctgatctggctgactaggcgggtatccccttcctcccgcaccactccatgtgcgtccctccagaagctgtgtgctcaatggaagaggatgaccatccccgatagaggacgatcggtcttcagtcaagagtataagagtagctgcgctcccctgctagaacctccaaacgagctttcag

SEQ ID NO: 7954 - DNA, 2009 bp, Homo sapiens
gtcaccgatggccagagactccaccctttagctacacttgtggcgacccatccacctacagagtcaccttccccgtctgcccccagaagctgtcactggctcctccgagtgccaaggccagcccccacaaccctggaagctgcggggagccccaggccaagttcctagaagcattctttgaagaacccccaaggaggcaatccccagtgtccaacctgggctcagaaggagaatgtccgagttcaggggctggcagccaagcccaggagcttgcagaggcctgggagggctgtagaaaggacctgctctttcagaagagtccccagaaccacaggccaccttcagtcagtgaccagcctggggagaaggaaaattgctcccagcacatgggcaccagcaaaagccctgctccaggattcatccatctacgcaccgagtgtgggcccaggaaagaaccgtgtcaggaaaaggctgcccttgagagggtacttcggcaaaagcaagatgcccaagggttcacacctccccagctgggcgccagccaacagtatgcatctgacttccataacgttttgaaggaggagcaggaggcactgtgcttggatctgtggggcacagagaggcgagaggagaggagggagcctgagccccacagcaggcaaggacaagctctgggggtgaagagagggtgccagctccatgagcccagctcggcactgtgtccagctccatccgccaaagtcatcaagatgcccaggggtggcccccaacagctggggacgggggccaacactccagccagggtctttgtggccctctctgattacaaccccctggtgatgtctgccaacctcaaggctgcagaggaggagctggtcttccagaaaaggcagttgctaagagtgtggggctctcaggacacccatgatttctacctcagcgagtgcaacaggcaagtgggcaatatccccgggcgcctagtggctgagatggaggtggggacagagcagactgataggaggtggcgttctccggcccaagggaacctgccttctgtggcccacctcgaggactttcaggggctcaccatcccccagggttcctccctggtgctccaggggaactccaagagactcccactgtggactccaaagatcatgatagcagctctggactatgatcctggggatgggcaaatggggggccaggggaagggcaggctggcgctgagggcaggagacgtggtcatggtttacgggcccatggatgaccaaggattctattatggagagttgggcggccacaggggcctggttcctgcccacctgctggatcacatgtccctccatggacactgagcaagcatccttgcccaggtagtggcctctggctgctcacaccctgccagaggagaagcaagcgttcagaccctcacaccagcacccctcctcaccaccataagtagcatgtgctccaagtgccactgtgttaaactgatggtagtccttaagcgtcccctaggctctgaaagtagcaggacttaagcctgagttatttgcaaaagcaaacacaacaagccaacccctgagagtctgagaagccatttcaaagttgctgataactatggcaggtatacggagaagcgcctttttctgtggccaatgtgtgttttctctgggaggttaaggttatctgtccattgccttgtacgaaagtctcaagaaaagtctacatcttaaaaaagaaaaagcaatctgagtgttatttttgggatgtgagggtgatctggctgcgacatgtgtcaccccattgatcatcagggttgattcggctgatctggctgactaggcgggtatccccttcctccctcaccactccatgtgcgtccctccagaagctgtgtgctcaatggaagaggatgaccatccccgatagaggacgatcggtcttcagtcaagagtataagagtagctgcgctcccctgctagaacctccaaacgagctctcag

SEQ ID NO: 7955 - DNA, 375 bp, Homo sapiens
agaaaaaacatattttagaagttgaagcacaaccaaggaaacatgagcctggctttcctccctctcacttctgcgcactgggtccgcaagggctacagaaatgttttcctggctgaggaagggagggtgcacccttctgctttttttttcctggctgcagtctattcccagaacacattccatcacatggttcccagaactcagattgtgcggtggccacgtcatcattggctggggctcacagtcacagcagcagaggcctccctaaacctccctctcctctagccccacccgctgtcccctgctcctcatgcccccatgctgtgtcccctggcctcacttccgttgccatgttttcataatcctctcaggctc

SEQ ID NO: 7956 - DNA, 494 bp, Homo sapiens
ggcgctccagtgtcggcctggtcaccctcctgaacagccctgggagaccagtcaaatgccggagtcccaagttaaaggtagcagaaggcccaagttccacgcacggcctgaagactacgcagtgtcacagcccaacagagacatacaggagaaaagggaagcctccctcgaggagagcccagttgcccttggggagtcagccagtgtcccccaagtttcagagacagtccctgccagccaacctctgtccaagaaaaccagctcccagtcaaactcctcctctgaggggtcgatgtgggccaccgtgccgtcctcccctactctggacagggacacagccagtgaggtggatgacctggagcctgacagcgtgtccctggccctggaaatggggggctcggcggctcctgctgcccccaagctcaagatcttcatggctcagtataactacaacccatttgaggggcccaatgatcaccctgagggtgagctgc

SEQ ID NO: 7957 - DNA, 205 bp, Homo sapiens
ttttttttttttttttgagatggagtcttgctctgttgcccaggctggagtgcagtggtgcaatctcagttcactgcaagctctgcctcccgggttcacgccattctcctgcctcagcctcctgagtagctgggactacaggcgcccgccaccacgcctggctaattttttgtatttttactagagacggggtttcactgtgtta

SEQ ID NO: 7958 - DNA, 494 bp, Homo sapiens; identical to SEQ ID NO: 7956

SEQ ID NO: 7959 - DNA, 375 bp, Homo sapiens
agaaaaaacatattttagaagttgaagcacaaccaaggaaacatgagcctggctttcctccctctcacttctgcgcattgggtccgcaagggctacagaaatgttttcctggctgaggaagggagggtgcacccttctgctttttttttcctggctgcagtctattcccagaacacattccatcacatggttcccagaactcagattgtgcggtggccacgtcatcattggctggggctcacagtcacagcagcagaggcctccctaaacctccctctcctctagccccacccgctgtcccctgctcctcatgcccccatgctgtgtcccctggcctcacttccgttgccatgttttcataatcctctcaggctc

SEQ ID NO: 7960 - DNA, 375 bp, Homo sapiens; identical to SEQ ID NO: 7955

SEQ ID NO: 7961 - DNA, 1283 bp, Homo sapiens
ggggtgcccgccttctacacccccacgggctacgggaccctggtccaggaagggggcgcccccatccgctacaccccggacggccacctggcgctcatgagccagccccgagaggtgagggagttcaacggcgaccacttccttttggagcgcgccatccgggcagacttcgccctggtgaaagggtggaaggccgaccgggcaggaaacgtggtcttcaggagaagcgcccgcaatttcaacgtgcccatgtgcaaagctgcagacgtcacggcggtggaggtggaagagatcgtggaggtgggggctttccccccagaagacatccacgttcctaacatttatgtagatcgcgtgataaaggggcagaaatactagaaacgaattgagcgcttaacgatccggaaagaggaagatggagacgctggaaaggaagaggacgccaggacgcgcatcatcagacgcgcagctctggaatttgaggacggcatgtacgccaatctgggcataggcatccccctgctggccagcaacttcatcagtcccagcatgactgtccatcttcacagtgagaacgggatcctgggcctgggcccgtttcccacggaagatgaggtggatgccgacctcatcaatgcaggcaagcagacggtcacggtgcttcccgggggctgcttcttcgccagcgacgactccttcgccatgatccgagggggacacatccaactaaccatgcttggagccatgcaggtttccaaatacggcgacctggcgaactggatgatccctggcaagaaggtgaaaggcatgggcggtgccatggacttggtgtccagtcagaagaccagagtggtggtcaccatgcagcactgcacaaaggacaacacccccaagatcatggagaaatgcaccatgccgctgaccgggaagcggtgcgtggaccgcatcatcaccgagaaggccgtgtttgacgtgcacaggaagaaagagctgacgctgagggagctctgggagggcctgacggtggacgacatcaaaaagagcacggggtgtgcctttgctgtgtccccgaacctcaggcccatgcagcaggtggcaccctgacgggacctggatctgggcggggtggtgcgctcctcagggcgggtgccaccgggttccccaggggaatacatgtccccagctctgggaggggtttgccactggcctcctactttcctccctaggtggacagtgctcctctagagagctgcgactttaattaaaaacaacaggaaaacaga

SEQ ID NO: 7962 - DNA, 1733 bp, Homo sapiens
atggcggcgctgcggctcctggcgtcagtgctcgggcgcggggtccccgccggcggctcagggctcgcgctgtcccagggctgcgcccgctgctttgccaccagtccccggctccgtgccaagttctacgcggacccggtggagatggtgaaggacatctctgacggggcgaccgtcatgatcgggggcttcgggctctgcgggatccccgagaacctgatcgccgcgctgctcaggacccgcgtgaaagacctgcaggtggtcagcagcaacgtgggcgtggaggacttcggcctgggcctcctgctggccgccaggcaggtccgtcgcatcgtctgttcctacgtgggcgagaacaccctgtgcgagagccagtacctggcaggagagctggagctggagctcacgccccagggcaccctggccgagcgcatccgcgcggggggcgccggggtgcccgccttctacacccccacgggctacgggaccctggtccaggaagggggcgcccccatccgctacaccccggacggccacctggcgctcatgagccagccccgagaggtgagggagttcaacggcgaccacttccttttggagcgcgccatccgggcagacttcgccctggtgaaagggtggaaggccgaccgggcaggaaacgtggtcttcaggagaagcgcccgcaatttcaacgtgcccatgtgcaaagctgcagacgtcacggcggtggaggtggaagagatcgtggaggtgggggctttccccccagaagacatccacgttcctaacatttatgtagatcgcgtgataaaggggcagaaatacgagaaacgaattgagcgcttaacgatcctgaaagaggaagatggagacgctggaaaggaagaggacgccaggacgcgcatcatcagacgcgcagctctggaatttgaggacggcatgtacgccaatctgggcataggcatccccctgctggccagcaacttcatcagtcccagcatgactgtccatcttcacagtgagaacgggatcctgggcctgggcccgtttcccacggaagatgaggtggatgccgacctcatcaatgcaggcaagcagacggtcacggtgcttcccgggggctgcttcttcgccagcgacgactccttcgccatgatccgagggggacacatccaactaaccatgcttggagccatgcaggtttccaaatacggcgacctggcgaactggatgatccctggcaagaaggtgaaaggcatgggcggtgccatggacttggtgtccagtcagaagaccagagtggtggtcaccatgcagcactgcacaaaggacaacacccccaagatcatggagaaatgcaccatgccgctgaccgggaagcggtgcgtggaccgcatcatcaccgagaaggccgtgtttgacgtgcacaggaagaaagagctgacgctgagggagctctgggagggcctgacggtggacgacatcaaaaagagcacggggtgtgcctttgctgtgtccccgaacctcaggcccatgcagcaggtggcaccctgacgggacctggatctgggcggggtggtgcgctcctcagggcgggtgccaccgggttccccaggggaatacatgtccccagctctgggaggggtttgctactggcctcctactttcctccctaggtggacagtgctcctctagagagctgcgactttaattaaaaacaacaggaaaacaga

SEQ ID NO: 7963 - DNA, 699 bp, Homo sapiens
atgtccgtagaaggaaagcaggaccatctccaagggaagggaccgggtgatgggagagactgagaggggagaggctgccggtgctgaaatccaccaggaagcttcctctatctgtgtgtggccaaaggctacagcctaggacaggaggagttctagaaccctaaccaagggactagatgagttttctcagcttcatttgaattgttcctgcatcattcacaccagacacttaggccctcctctctgggatggaggcccaaactggccacttgtgtgatggtccgttgtaacccaagaggctgtgaggcatttcctcctgaatctatagtctcaaaaactaaaattaagattgtgtgtgtgtgtgtgtgtgcatgcacgcgtgcacacgtgctgttgacaaccaagcctggcctggtgcatgcactgcataagtgtagctctgggggttcccaggccattgggggcatgtggtcagagtagtaagttctcactggtcaaggacagactttccaggggcccattggagcctcaccctgcaggaaaggccagatcctgggaaggagagcagagcagggagagttggcgctcatggagggcacagactgggggtgtggaaaaggggccagggactatggctggggttgggggcttgaaatgaaatgtcatctagtgggcagtggggtgcctttggggctcctg

SEQ ID NO: 7964 - DNA, 696 bp, Homo sapiens
atgtccgtagaaggaaagcaggaccatctccaagggaagggaccgggtgatgggagagactgagaggggagaggctgccggtgctgaaatccaccaggaagcttcctctgtgtgtggccaaaggctacagcctaggacaggaggagttctagaaccctaaccaagggactagatgagttttctcagcttcatttgaattgttcctgcatcattcacaccagacacttaggccctcctctctgggatggaggcccaaactggccacttgtgtgatggtccgttgtaacccaagaggctgtgaggcatttcctcctgaatctatagtctcaaaaactaaaattaagattgtgtgtgtgtgtgtgtgtgcatgcacgcgtgcacacgtgctgttgacaaccaagcctggcctggtgcatgcactgcataagtgtagctctgggggttcccaggccattgggggcatgtggtcagagtagtaagttctcactggtcaaggacagactttccaggggcccattggagcctcaccctgcaggaaaggccagatcctgggaaggagagcagggcagggagagttggcgctcatggagggcacagactgggggtgtggaaaaggggccagggactatggctggggttgggggcttgaaatgaaatgtcatctagtgggcagtggggtgccttttggggctcctg

SEQ ID NO: 7965 - DNA, 10855 bp, Homo sapiens
gtagcgagaggcgctagctgccagctccagcagcccagatcgcgcagtatttctgcgtggcaccggtgcggatgcggctgtaaagcagtggtcaccgcctccgggagcccacttctatgtggagaggggagcacccagagagggtcttagggtgaaatttcaattttggcatatcactcagtgggtactgttgtgaccatggctgtgttaacactccctcccgaggagacttccctgccacaggcgctgggtcagaatgaggactgtgtgtgtgtatctgtgtgtctggatgggaggtttgggcactgtcgcaatattaactggcggcatcattctctggctcgatccccgcttccagacttctgggggtgttgggcgtcggggaacagagattagggacaggagacagggggtgtgtcattgcgtctttccctcctcagagtcctcccatggcttcacagaagcagatggaggtagtgaccaaaggaactgggttccggcgccgccccaagaccatcacttacaccccggggacctgcgagctgctcagaggtcagtccgttaaagcagcgatcccagcctttttggcaccagggaccggtttcgtggaagacaatttttccactgacggaggtgtggggaatggtttcgggatgaaactgttccacctcagatcatcaggtattagttagattctcataaggagcgtgcaacctagatccctcgcgtgcgcagttcacaatagggttcgcgctcctatgagaatctaaggccgtcactgacctgaaaggaggcggtgaggctcgctagcctgccgctcacctcctgctgtgcggcccggttcctaacaggccagggactggtaccagtccacggacggagggttggggacccctgagttaaaggatgagagaagaatggtggtagttaccctctgtaactcagttcccccgtacctgacctgtggcttagcactattttcctttacagataaggagcctggggttcagaaagcttcaaaattctactgcatatgccttattcgggggcggggcggggcgggggggaggggaaggttcaaggtgctacaccttgccaaaagtcaaagaactaaaatttttagagtagttaactcctatgcatcctttagatcacactttcaactttcccgaggaagacttctgctcctcaccaccacagtaggatcaactgttatgtgccctcacacattttccttcactgggcttagcacaagctgtagtcagttatttggtgtcccatctatccctccagatcatgaatttcatcaggcaggaaccgtgcctgtttcggcccacaattgtagctccagcccctgaaacatgatgaacaagtattcatgtgttcttttactcaacaacttttttgtttttttccaacaacaacatttttaagtctaccatgtgccttagactctgttttaggtgctggggatacagcagtgaaagaaaatgaggtggctcaaaccggtaatcccagcactttgggaggccaaggtgggcagatcacctgaggttaggagttcacgaccagcctgaccaacatggagaaacccagtctctactaaaagtacaaaattagccgggcgtggtggcgcatgtctgtaatcccagctacttgggaggctgaggcaggagaattccttgaacccaggaggtggagattgcagtgagctgaggtcgcgccactgcactccagcctgggcaacaagatggaagctccatctcaaaaaaaaaaaaaaaaaaaaaaaaaaaaaaaaaaagagaaagaggaaaaaatatttaacagagggcagaaattttattaaaccagcaaaaattcttatcatacagctaatatagaaggataacaataaaataaaatatatagaattttaggtggtcgtaagtgctatagaaaaaacgaagcaggaaagatagagaaggcatgctcagtgcagaatggggctaggatgtagggttttaaatttcagtagggtgtcaggtgaaggcatccgcctgcagcccaagaggcctcatagaatgctttgtcgtgcagtgatgatgaaggaatccaaactgacgaacatccagcagcgccacatcatggacatcatgaaaagtaaggggcagtccacagaggcttcctggacagagggatctggggccacacttttaatgcttctccatgttaagggagagaggacctcatataaaaaaaacaaagacagccgggcacgtggctcatgcctgtaattccaacactgggaggctgaggtgggaggatggcttaagcccaggagttcaagaccagcccgggcaacgccacaagccacaagacctcatctccacaaaaccttttttttttttgagacagagtctcactctgtcgcccaggctggagtgcagtggcgcaatctcggctcactgcaacttctgcctcccgggttcatgccattctcctgcctcagcctcccaagtagctgagactataggtgcccaccaccacgcctggctaattttttgtatttttagtagagacggcgtttcatcgtgttagccaggatggtctcgatctcctgacctcatgatccgcccacctcggcctcccaaagtgctgggactacaggagtgagccaccacgcctggccaacttttttgttttgttttgttttgagatgagtctctctctctgtcgcccaggctggagtgcagtggcatgatctcggctcactacaacctccgcctcctgggttcaggcaattctcctgcctcagcatcctgactagctaggattacaggcgtgcgccaccatgcccggcttaatttttgtatttttagtagagactgggtttcaccatgttggccaggctggtctcgaactcctgacctcgtgatctgcccgcctcggcctcccaaagtgctgggattccaggcatgagccactgcacccagcccccaaaattttttaaaattagccaggtgtggtggtgccaacctgtagtcccagctactcaggaggttgaggtgggaggatcacttgaccctgggaggtcaaggctgcaatgagctgtgattgcaccactgcactccagcctgggcgaccgagtggagcctaatctcaaaataattaaaataaaataaaattaaattaaaataaaaacaggtcaggccgggtgtgggagctcacacctgtaatcccagcactttgggaggctgaggcgggcagatcacctgaggtcaagagttcaagaccagcctggccaacatggtaaaaccctgtctctatgccaatacaaaaattagctgggcatgatggcggatgcctgtaataccagctactcaggaggctgaggcaggaaaatcacttgaacccagcaggcagagggtgcagcgagccgagaccataccactgcactccagtgtgggtgacagagcaagacatcgtctcaaaaacaaaaaataaaaaataaaaaaaaacaggtcagctgtggtggcttatacctataatcctatcactttgggaggctaaggcaggaggattgcttgagcccaagagttcaagaccagcctggcaaaacacatacatactggggtgtacctgtagtcccagctactcaggaagctgaggcaggagaatcacatgagcccaggagttcaaggccagcctgggcaacacagtgaaacctctctctacagcaaaatttttgggtgtgtgaccaaaaaaattaatacttctgaccgctcgctcctggggaattgaccttgtagaggctggatgggcagaaaaggtagacaggcacccagatcaaaacagtggatgagccaggtgcggtggctcacgcctgtaatcccagcacattcagaggccgagacaggcagatcacccaaagtcaggagttcaagaccaccctggccaacatggtgaaactccacccctactaaaaatacaaaaattagccaggtgtggtgacccgggcctgtagtcccagctacttgggaagctgaagcgggagaatagcttgaacccaggaggcggaggttgcagtgagctgagatcacaccattgcactctagcctgggtgacaagaacaaaactctgtctcaaaaaaaaaaaaaaaaaaaaaaaaaattagccaggcgtggtggcacacaccataatcccagctactcaggagactgaggcacaagaatcgcttgtacccaggaggtgtaggttgcagagagccaagatcatgccactgcactccagcctgggcaacagagggagactctgtctcaaaaaaaaaaaaaaaaacaatggatgggacctgctctaagctgggctttatggcagttgagaggtggggtcaactgaccagacaggtgacacacttggatcgcctgggggagaagccccagggatggccaagcggggggatggacagcaggagggataggtacctgctgtcatccaaactgtccctgcttgtccatgcaccacacagaaagttttaggaacccatccatagaaattaaagcatcggtacaaagatttgatgtacaagaatgtttattgcagcattgtttgaagtagtaaaaaacaaacctagaaataacctaaatttctgaaacaaggaggtgagctgaataaataatgtatccattctaaggatactagtatatagctataaaaaataagttatatataaatggattgatctggacagatgtccatgaaaaaatgttaagtgaaaagagtctgttattttaatatattacagtacgatccagtgtttgaaagaatcttatatgcacatatatctttgaacatgtttgtataagcatcaaaaaggaaggagaccaccaaactgttaccattatcactcattcattatagaggggtgggactggaaggaagaagagaagactccttgtactgtttgacttgttttgttttgtttcattttgttttgttttttgagacagagtctcactctgttgcccaggctggagtgcagtggctcaatctcagctcactgcaacctccacctcctgggttcaagagattctcctgcctcagccttcccagtagctaggattacaggcctgcatcaccacgcccagctaatttttgttttttgggggtttttttgagacagtcttgctcagtcacccaggctggaatgcagtggtgcaatcttggcttactgcaacctccacctcctgggttcaagtgattctcccgcctcagcctcccaagtagctaggattacaggcacccgtcataatgcctggctaattttttttgtttttctttagacatggggtttcaccatgttggccaggctggtctcaaactcctgacctccagtgatctgcccacctcagcctcccaaagtgttgggattacaggcgtgagccactgcacctggccttttgacttcttttaacaggtaggtattacctttatttttattctattaatttttttttgagacgaagtctcgctctgtcgcccaggctggagtgcagtggtgcaatctcagctcactgcaagtcccacctcccaggttcatgccattctccggcctcagcctcccgagcagtagggactataggcacccgccaccacgcccagctaattttttgtatttttagtacagacagggttacaccgtgttagccagggtggtctcgaattcctgacctcaagtgattacccatctcggcctcccaaagtgctgggattacaggcatgagccaccatgcccggccaacttttatttttaaaaagtggccaggtgcaatagctcatgcctataatcctagcactttgggaggccgaggtgggtggatcacttgaggtcaggagtccaagaccagcctggccaacatggcctgtctctactaaaaatacaaaaattagccaagcatggtggcgcatgcctgtaatcccagttacttgggagactgaggcaggagaatcgcttgaacctaagaggcagaggttgcagtaagccgagatcgcgccgctgcactccagcctgagtgacagagcaagactcagactcaaaaaaaaaaaaaaaaaaaaaaaaaagccatgtgggtcctcccaccccaactcttcgttccccaggaggagatgctttgcccctacagtgcagcccaacatccagccagagagtcttaccttccaagcaaatagcctcgcccatctacctgcctcccatcctcgcagcccgtccccacctccggcctgccaacatgtgtcaagccaatggggcctacagccgggagcagttcaagcctcaagccaccagtaagtgagggtctcagctagggcctttctccatctccctgggggaggacaagggagagggacgcaagcagcccacagggcaggtgggaaggtagctaatcaaatccccatgcactttgtaccaatgctcttgagcctcagcacatgttggcttaggggtattcagggcgcagaggaaaccagtcagatggtccttttttttttatttttccagaactcaggattaactgaaatctaccacttcctgatgataggggctatcagggctcaatgccacagcctaacctctccctgcagcccctatacataagttgccactacaggcatcgccgaggccccaggttcctgagctttcttagccttgctctgctaagttttgacaaaactttttttttttttttttttttaaagacagagccttactctgtgcccaggttggagtgcagtggtgctatctcggctcactgtaacctccgcctcccgggttcaagcaattctcatgtgtcagcctcctgagtagctgggattacaagtgtccaccaccatgtccagttaatttttttagtagagatggggattcaccatgttggccaggctggtcttgaactcctggcctcaagtgatccgcccaccctggcctcccaaagtgttgggattacaggcacaaacgaccgctcccggcctttttttttttttttttttgagacagtgtcgctctcattctgtcacccattctgtaatacagtggcatgatcatagctcactgcagccagaactcctgagctcaagcaatcctcctgcctcagtctccagaatagctgggaccacaggtgttccccacacccagctttttttgagacggagtctcgcgctgtcacccaggctggagtacagtggcacgatctcggctcactgcaacctccacctcctgggttcaggcaattctcatgcctcagcctcccaagtagctaggattacaggcaccatcaccatgccctgcccagctaattttttttttttttgagactgagtcttgctctgtcgcccaggctggagtgcagtggcaccatctcggctcactgcaagctccacctcccaggttcacgccattctcctgcctcagcctcccgagtagctgggactacaggcacctgccatcacgccgggctaatttttttgtatttttagtagaggtggggtctcaccgtgttagccaggatggtcttgatctcctgacctcgtgatccgcccacctcggcctcccaaagtgctgggattacaggcatgagctaccgcgcccggcccatgcccagctaattttttgtatttttagtagagatggggtttcaccatgttggctgggctggtctcgaactcctgacctcatgatttgcctgcctcagcctcccaaagtgctaggattacaggtgtgagccaccgtgcctggactttttttttttttttttttttagagataggatatcggtcaggcgtgatggctcatgcctgtaattccagcactttgggaggccgaggctggcagatcgtttgagctcatgtgtttgagaccagcctgggcaacatggcaaaactccatctctactaaaaaaaaaaaaatacaaaaattagctgggcacgatgacgtccacctgtagtcccagctactcgggaggctgaggtgggaggatgacttgagcccgagaggttgcagtgagccgaaattgtatcactgcactccagtctgggcgacagagtcagaccttgtctcaaaaaaaaaaaaaaaaaagaagaaaaaaagagatgggggtctcactacatccattaggctggtcttgaactcctggtcctaagcaatcctcccacctcagcctcccaaagtgttggaattacagaccatacccaaactcttttcttggttctttccacctcttcctgcctctcttgacagtacagtattgctcaggagaacccagggtagcagcaggtgtacggaagccctgtctgcatgaccaggcaccctgcagcaagcacgtgcacttgggaacacagaccatgaataagggcaccctttacagcctaactaggccatttctttttggccctacaggggatttggagaaggagaaacaaagactccaaaatatctttgccacagggaaggacatggaggaacggaaaagaaaggcccctcctgcacgacagaaggctccagcccctgagctagaccgatttgaagagcgtaagactccgacggaccagtcatgctgggggtgggggtaatgtgaggagggggcccagaattggatggagcagtcaggggatccctgagggccaagggccaacaagtgagaaacactatttatttatttatttatttattttgagacagtcttgctcttattgcccaggctagagtgcagtggcgtgatctgggctcactgcagcctccacttcccaggttcaagcaatccctcctgcctcagccacctgagtagctgggattaccagcgcccgccaccatgcctggctaatttttgtatttttagtagacacggggtttcaccatgttggtcaggctggtctcgaactcctgacctcgtgatccacctgccttggcctcccaaagtgctgggattataggcgtgagccaccgcgcccggcctagaaacactatttgacaatagaaccacttcctctcctcaagagaggcaacccgctgcctgcatccctcatgggaacctgacagccctctcctctgtccagtggtgaaggaaatccaggagaggaaagaattcctggctgacatggaggccctgggacagggcaaacagtaccgaggaatcatccttgctgaaatctcccaggtaggagaaacaaccaggaaagtggggaggggaagggcccagcgccaagtgcgaatggaaatacagggtctgctgtggcagggttcaggggtcaggctctagctcactgctgtgacagctcctcaggttcctagccctgatacacctgctttccctgatgccctttgcagaaactccgggaaatggaagacattgaccacagaaggagtgaggaacttaggaagggtcttgccaccacttaatctgtctccagagacgggcagggtagcccaagctcgaccactggagtccactcctctgccaggcagggccatcctcaggccagcccatcctaccagccttctgccacgtcaggtggtggcatagcactgccctgcagtaccccaaggcatactcagcagcctagcccctgccccggaatgcagatggagcctctgagactcacagccccgtccgcagagaagcaaagcccgagcatccctactaggacatgtgtctaaaggtatccactgggcctgcttcccaccacttctgacctgtggcctgttcatttagttttctgaattcaggaatgaatatgattcctttcttcctgttttaggatttacttatttgatttcttaccgccttaggcaagtattcaaccacaatgattaactggccaataaaacatatttaacgtgggtcattacaagcaccattttgttttcagagggataagcttatttgttcaaggcattagactttgtcaagcccagatggtttctagctacctgtttgcatatttcaagtggcaacgggaaccaacctcttgggcaccccatggctggctgctgtggcgggtgctgaattccactctgttaatgatctcaataaacctctgcaacggttcattatccctctgtgaaaactaagtctcaacaagataccacaaccaagggcatttacctggcaagcagtgcattcaggattaaaagttggctttagctttatgtctttccactatacccatggccacagaaagaaacatgaaaaggtgggagcgacctagagccctggcctgggagttccaatccctgcatgtgccgcgtgacctttcttgggcaaaacccaccagctccgtgcttgtgcatctgcgaggccctgctgggaaggagtcacctgacaccttgtcctgtacacagcacatctgtccccctcccctctggctcctgacacccacgatccctgccttctccggtattctgtcatttgcttgtcccactaaatcaccaaaatattttggaaatatcaaccttgtctcgggcacctggagggagtcccataatcccatcaggtcacatgacccaagtttcggtttgcagaataaaacggccctgtaaatggtgaggccccaatcaagggccggctcagggacatcccatggaaagcctctgtgtccacacaccctcaagaacctgagggcagagggtgcaatctaatgggaacagttgtcctcgacctcgaaggccccatcatgtggtcaggaggcagcaaaccagagaaccccccaggacaaatccagtccaccctggacacacagtatcagccaacccttgattgaaattcaggctagtggccgggcgtggtggctcacgcctgtaatcccagcactttgggaggccaaggtgggt

SEQ ID NO: 7966 - DNA, 5793 bp, Homo sapiens
cgcaatctggagcgctcgggtgcccagcacgcgggctcgctcgtacttggtcatgtatggtgtggtgattcgcttctggttggcctgcggtcgctccccagaggggaggatctcgacattctcctggccttcctggacaccaagacaaaaaagagggaaagactcaggtggcacttttgggttacagggagagtgataatgacaacaatcacaattctcgctacagccaccgttaatgcttactgcatgccaggggaccacataactgcttcctaacaactcatgtaatccttacaataaccttatgaggcagggattacagttctcatttcagaggcttggaaagtcagctaacctgaccaagcctcagacctggtaatggaggtctgagattccagagctaactgcctcatccagaagagagcagagggcctggagatggggtggtatcagaatgttggtcctgtaaaagaggtcctggcacaaaaaaattaccctaagcaggaagctaggaatagtcttcccatctttcagataggggagctgagccaatgggccaagtggctagaaaagtcaaggtgaaggcaggaatatttaacaattacttactaagcatttgtcctgagccagatattgttaacagatgctgagaaagaaagctaggaatttctgctctcaattaatggtctaaaggggagacaagagtaaacagagcaggtgctatgaagggtgcaacagagttcccgaggaggtggggacacctcactcacactgggggttaggaaaactccagggatgaggcttgagctcacctagaaggatgagcaggagctgtcaaaccaatgaggaaggaggcaacatgcaaaggcatagaggagaaagaggtttggacaactagttgtggacaataattagaacaaaaggtgcgtagaggattgtaggcaagagaataaattctgtggtatataaagaattaagtaaacaggccaggcgcagtggctcacacctgtaatcccagcactttgggaggccgaggcgggcggatcacaaggcaggagatcgagaccatcctggctaacacggtgaaccccgtcactactaaaactacaaaaaaaaaaaaaattagccgggcgtggtggtgggcgcctgtagtcacagctactcagaaggctgaggcaggagaatggcatgaacccgggaagcagagcttgcagtgagtcaacatcgccccactgcgctccagcctgggcgacagagcaagaccccgtctcaaaaaaaaaaaaaaaaaaagttgactctgagctgggcatggtggtgcagaacctgcagtcccagctactcaggaggctgaactggaaggatcacttgagcccaggagttcaaggctgtagtgcgctatgaccacacctgaaaatagccattgtactctagcctagacaacgtagcaagacaccacttcttaatttaaaacaagcaaacaaacaacaacaacaacaacaaaaaacagaaagaaaggatcactctggatactctgttgcgaatattctgcagggggcagtggcagaagcagagaggccatttaggaaagccagtagtaactgagcatgtgggcaagtaagaaagggtgctgaaaggagaagagcacacagagcagagtctggagtgagactgaagcaggaaaaccagccacacaattcctgcaggaatgtggctgaaaagcaataagatctaagccaggttaaggcaccaggagtagaaaaatgcagacagggctgaagtacatctaggaggcacaatctacatgacagggatgggaaggggaccagaaggatggagaaggacgcatctgactcaagtgaaaaggtatctgaaagtgccatgcagagagagagaaggctccatgtctctccagaacataactgcattttttccctcatcagtcacacaagacagaaagccctactttcctcttgaggctggcaacctatccacctagttgctcaagccagaaacctgagagtcgtcctcgtcaccactcactttctcagccccataaccaacccaccgaaataactcttttatctgccttctcatcacctgcactaccagcacctatgtccaagccacaggcctctcacctttcactcttgcccttccccagttcactccttactcgaggcaggaatgtactttctaaaatgtaacctggactgtgccctggctcaaagtttgtcagtagcttcccattgcctttaggctacaaaatactgcctcatctgagccctgcttacctcttccctttgctccttaagcagtcccacccagcagaaagcacctggcatataataaacattcaacacatgtttgccaaatgaaggaaggcaccgtttaacttgtcagtgaactaactgccccagaagccacaggctgtggaccacatggacaaaagctttcaggcccaccctgcagggctgttctgctatgcaagactggaacacagctcactctaactgggaatgcttatggcaggggccttgaccacaaatagaaggcagacacattcagctaatcatcacctgtcagacgatttggcagcttgggctgcagaggtgggagcctgaggctgaatactgacctcttcggcattctccaagtcatctagcccttcatcctcctccacatcatcaaagtcgtcgccatcaaaactgtacaggaagaagagatcagttacttagagcatcacttaaaagaatcaaagaggggccaggcacggtggatcacacttgtaatcctggtactttcggagattgaagtgggcggatcacttgaggccaggaattcaagaccagcctggccaacaaggcaaaaccccatctctactaaaaatacaaaaattagccgggcatggtggcacatgtctgtaataccagctacttggggggctgagtcacaagaattgcttgaacccaggaggtggaggttgcagtgagccaagattgcaccactgtactccagcatgggtgacagaacaagaacctgtctcaaaataaataagaaaaattaaaaaaaaaaaaaattcagaggccgggcatggtggctttgtattgtggctctgggattaagcctgtaatcccagcactttgggaggccaaggcgggtggagttcaaggccagcctgaccaacatgatgaaaccccgtctctactaaaaatacaaaattagccgggagtggtggtggcacatgcctgtaatcccaactacttgggaggctgaggcaggagaatcacttgaacccaggaggcggaggttgtggtgagctgagatcacgccattgcactccagcctgggcaacaagagtgaaactccgtctcaaaacccccccccgccaccgcaaaacaaaaaacaaacaaaaaaaaaatcaaagagggcagagatctgtgtctcgcccagtatgtaggaagcactcaataaatatttacttaataagtaaatcagctgagtgcagtggctcacgtctgtaatcccagcactttgagaggccgaggtgggtgcatcacttgaggtcaggagtccaagaccagcctggccaacatggagaaatctcgtctctgctaaaaatacaaaaaaattagccgggtgtggtggtgggcgcctgtaatcccagctactcaggaggctgaggcacaagaattgcttgaacccgagaggcggagggtgcactgagccacggtcaccccactgcactccagcctgggtgacacagcgagactccttctcaaaaaataaaaaataataataagaagaagaagtaaatccgacttttgttccattttaccccttcaatttttccccatctgcccccaaatattgctagtactcattcatcatcactgtttccctctctactggatcattcccatcagcattttttttttttttgagacaaagtctcgctctgttgtccaggatggagtgcaatggcgtgatcttggctcactgcaacctctgcctcctgggttcaagcaattctcctgtctcagcctcccgagtagctgggattataggcacacgccaccatgcccagctaatttttgtatttttagtaaagatggggtttcaccatgttgaccaggctggtctcgaactcctggcctcaggtgatccaccctcctcggcctcccaaagtgctgggattagaggtgtaagccacagcacccggccccatcagcatttcaacatgtgcttttcctcatctaaaaaaaaaaaaaaaaaaacccttatttctcttctctctccccctatagccctaattccatggtgtcctttgaagcaaaaatgtgtgaaagagctgtccaccctcactatcttcctctcttcccattttgtcataatctcactccaaaaagcctttcaccccaacagctccatcaaaaccactttccaagctcattaatgatctccacgttgctaaatccaatggccaactctccttctcatttagcctgatctatcagctggcacattaggccacttgctctcctcacttgactccaaggacacctcaccctcttggtgttcccccacctccccggcttctcttttcccccaagcactcaatgtccaaatgccctaatgctcagccacgggtcatctcctcttctctactgacactcactgggaatggggtagcaatcccacacgtttcttatttttatcttcagactagctctctttgcacccacatatcccacaggtaatttttgggctctatctttaaaatagtaatatatccagaattcaaaaccagttctcaccacctctactcctaccaccctactataagctactgacttctctcatctagattactacaagcaggccgggcacggtggctcacgcctgtgatcccagcactttgggaggccgaggcgggtggatcacaagctcaggagttcgaggccagtctggccaacatggtgaaacccgtctctactaaaactacaagcaattagcaaggcgtggtggtgcacgcccataatcccagctagtcgggaggctgaggcaggagaatcccttgaaccccggaggtggaggctgcagtgagccgagatcgcgccactgcactccagcctgggcgacagagcaagactctgtttcaaaaaaaaaaaaaaattactgcaaaggaccgtcccagacttttatttaatgccacccggtggagctgccccagaccctcctctggagtactcctatactacatacgtctagaactggggaagctcacgcgaccaccgttacctgcttgcttgcttacttatgggcctgtgaccccttttctagaaagtgagcacgtggagaggcagggacgattgttcattcacctcaatattcccactgcatgatacagagcccggctcgctggaacatttgctgaaggacaccttttctacggatcccctctggaccctcgagcctgggccctcctgtgcctccagccggggctgtgctcctgggtcgcccgcccttcccttcctcggctccgccggccccctcaggaccccagtcccctcagacattgcccctagacgccaggctcctcagccgacccaagccttgcctcatccgccccttccaaggttgccgcaaaggccactccgctcccgcactcacttgtcctcgttgtctgacatgacaccctcgcctcagcgaccccgctgcgccccggtcccgcgcggagacccgcaaacagcgacactacgactcgcgcggctcctagcttatcttgcgcctgcg

SEQ ID NO: 7967 - DNA, 260 bp, Homo sapiens
ctaatattttcaaattaggaaaaatttgaagctctcacaagtaattcagcattaaatatgagaatgtactaaagcatagggtggattgaggcactgtatgttatgctactactaaggtagtagcaaaataagctcttatgggtgttatctgctgccaggatggccagattgaatcagaaacaaagtcaagatttcagctggtcaacctgttttatttaggacaatgtttggcaaattggagagtgtgacctgtaagtggg

SEQ ID NO: 7968 - DNA, 599 bp, Homo sapiens
taaacatctaatactttgcctggaacatagtagatgcttaataaacagttaattaaaagggtatgaaacataattgaatactagtatatattttaaaacactgttttgagtatccaggaaaaagtatgaagtgtaagagtaattaaatcacatgcatgggtagaaattccttgtgaccttttgaaaaattgaaaaaaagcataattgtaaaagattgcttccttttttaaaaaaaaaattgcccagttagcataatatgcaagatgtaaactagaaattaaatgagccaaaaccagagttagttgcttgtaaagattaaaaatgaactcacactgggtgtggtggctcacacctgtagtcctagcactttgggaggatgaggcttgagccaggagtttgagtacagcctggaccaaatagtgagactttatctctacttaaaaaaaaaaaaaaaaaaaaaattagccggggtggtggtgtgtgcctatagtcctagcactctgaaggttaggtaggggattgctggagcctaggagtttgagcttgcagtgagctacgatcttgcttgtacttcagcctgggtgacagagcaagacttt

SEQ ID NO: 7969 - DNA, 491 bp, Homo sapiens
atttaaattagtttcaaggacagacacagtggctcacggctgtaatcccagcactttgggaggccaaggtgggaggatcacttgaggccaggagttcaagatcagcctggccaacatggcaaaaccccatctccactaaaagtataaaaattagccaggtgtggtggtgcacacctgtaatcccagctacttgggagactgaggcagggaaatccgtttaacccaggagacagaggttgcagtgagccaagattgcaccactgcactccagcctgggtaacaaagtgagattctgtctcaaaaaaaattagtttcagagttccaaatattaccactcctgtctcaaattaggtttaaggcactcctgtgaacaggcagattctataggtataaattaagatgtcatttccctagagaggctaagaaataaatacattcaacaaatatttgatgaattaaaggaatgagatgaagatatctggagaaaacga

SEQ ID NO: 7970 - DNA, 276 bp, Homo sapiens
tttttttttttttttttttgagacaaagttttgcttttgttgcccaggctggactgtaatcatgtgatctcagctcactgtaacctctacctcccggagggttcaagtgattctcctgcctcagcttcctgtgtagctgggattataggcatctaccaccatgcccagctaatttttgcatttttagttgagacggggtttcaccatgttggccaggctggtctcaaaactcctgatctcaggtgatccacctgccttggcttcccaaagtgctgg

SEQ ID NO: 7971 - DNA, 1777 bp, Homo sapiens
tacaaaaaatatttttaaaaaagtttttaaaagaaagtacaagaaggtacacataccctttcacaagtcacagtgatatcttactaaaatgcctggagccacaagaagcctgttttcccttcaaatgaaaagtaggttaaaactggattcaccaaatctcacagaagaaaaaagtacacacactgaacttttttagttttttattttgattcctatggctggacaaggtatctacattctagaacatcttcttaatccctaaacaagtggaaatctactacttatatataaaaagacaagtagaaaaggtcatgattgtctaacagggaacatgaatccccaaataaattatcttacaaaaatatcatacttgcttttctacttttttactatactggtaaaaatgaaatgaaaaaaataattcacattaaaataaaatctgtagggtggcatagaagacaattatttttacatattaaagtccttcaaataaatattttacacacaaatttaagtaagtttttaaaaaaaataagtatttacgctatatttttttgctctgctaaaaagagaccacttattaaactgacattaaactggactgcagctcattctctgcaaagagtaaaatgcatgtcacaggcagattggatacacacgtgcatattacatacatatgaaatggctaacactgctgtgcatactactgccataactagttttaccctgtaaaaatactgtagcctatactgtatcaaattgcaatgaaagaacaaaaggtactacttgcctattttagacacttggtcaagcatttaaaaaaatacaaaaattggtccactgcagtggctcacacctgtaatcctagcactttggaaggctgaggtgggtggaacacctgaggtcaggagttcaagaccagcctggccaacatggtgaaaccctgtctctactaaaaatacaaaaattagccaggtgtggtggccgacgcctgtaatcccagctactcaggagcctgaggcaggaggatcgcttgaacgtgggaggcagaggttgcagtgaactgagatcacaccactgcactccagcctgagtgacaagagtgagactccgtctcaacaaaaaaagaaaaagttataatgttttggggacttaaagattactgaagaggggataaaagtcaacactgcttacaaatacctgaacatggagagcacagtcaacacattcatgtggacagcacatgaacggatgtattaatacattacacagcttcttctatctgacctattcctcttgttctaaagagttacatggacttggatcctttaagatgattttaaaaataatattacattaagttttcctggtctaataaccaactttgagaagtacagtggaagggtatagaacttcctatatcttctatacttttaatgccaatttgatttttattgtgatgtgatatttaacagtatgctaaaaataaaattgactgaattgtatgattttgtccacaacattgaagtctctttttgctaaaatattacaaaatgaatccagtaaacactttccaatggcctaagttagagatgaattcaactttttttttaaagcaattacaactacgctgggctgaggacagctacgttagaccctgaaaaccaaagccaagcacccaaacatctaaaacactaacactttccatccaggatagaaaaatgagcatccaaagtaaagagaaccacaagactgatcaagtaaccagtcaaaaacc

SEQ ID NO: 7972 - DNA, 4503 bp, Homo sapiens
agatgcatcaaataaatagtagtggagtactctctcttccggaactttctcagaaaactctcaaagcacccacacttcaggtaagtgcctatttaccatattgattacaggcatactttagagatgttgcaaatttggattcagaccacagcaaaaaagcaaatactgcaataacgcaagtcacacaaatgttttggtttcccacggcatatggaagttatgtttacgctatactgtagtctagtaagtgtgaaaaagcattatttcttttttttttttttaaagggacataccttaatttagaaaacgctttactgctaaaaaatgttaacaatcatctgcaccttcagcaggtcgtaatctttttgccagtggagggtcttgcctcaatgttgatggctgctgactgatagcgtggtgattactgaaggttgggatgcatgtggcaatttcttaaaataagaagacaatgaaatttgccacatcagttgattcttcctttcacgaaagttttccctgtagcatgtgatgctgtttcatagcattttacccacagtagaacctccttcaaaattggagtcagttctctcattccttgtcacagctttgtcagctaagtttttgtcatatactatatccttcattgatatttcaactatgttcataacatcttcatcatgaatagattccatctcaagaaaccactttctttgctcatccataagaagtaactcctcgtccatccaatttttatcatgagattgcagcaattcaggtacatcttcaggctccacttctaattctggttctcttgctgtttccaccacatcttcagtcacttcctccactaaagtcttgaacttctcaaagtcatccatgaggattcaaaattgaatccattttttctaaactcctgttattggtattttgacttcctcttgtgaatcatgaatgctcttactgacatctagaatgataaatttattttaatatgtttacaatttattttgcccagatccatcagagaaatcactacctagggcagctatagccttatgaaatgtatttcttaagtgataagacttgaaaattgaaatgactctttgattcagaggctgcagaacagatgtgttagcagatgtgaaaacaacattaatctccttgtatatcttcatcagagctcttgggtaactgtgaacattttcaatgagcagtaatattttcaaaggaatcttcttttctgagcagtagctcttaacagtgggcttaaaatattcagtaagccatgctctaaacagttgtactgtcatccaggctttgttgttccatttacagagcacagacaacacagatgtagttgatttagtagaattaaggaccctgggattttcagaatgatcagtgagcattggcttcaacttcatgtcaccagctgcattagcccctaacaagagcctaacaaaagcatctcctttaaagctttgaagccaggcattgccttctcttttccaactatcaaagtcctagagatagcatcttcttccaatagaatgctgttttatttacattgaaaatatgttgtttactatagccaccttcaccagtgatcttagctagctaggtcttctgggtaactagctgtaatttttctatcagcacttgctgcttcaccttgcactttttatgttataaacacagcttctttccttaaaccttatgaactaacttctgctagcttcaaacttttcttctgcaacttcctcacctctgtcagccttcatagacttgaaaacagttagggccttgctgtggattaggatttggtttaagggaatgtcgtggctggtttgatcttccatccagaccactcagacttcccatatcaacaataaggctgttttgctttctcattattcatgtattcactgaagtagcactttaaattttcttcaagaacttttcctttgcattcacaacttgggcgtttggcacaagaggcctagcttttggtttgcgtggcttttgataggccttcctcactaaacttagtaatctctagtttttgatttaaagtaagagacatgattcttcttttcacctgaacacttagaggccattgtagcattattaactggcctaatttcaatatcgttgtgtcacagggaatagggaggcccaaggagagggagagaaactgggaaataaatggccggttggtggagccgtcagaacacataacaattaccaattcagttcactgtttgatatggttgcagttatggcacccagaacaattacagcagttccatcaaagaacactgggcatagatcaccataacagataccgtaataatttttaaagtttgaactattacaagaattaccaaaatgtgatgtagagatacaaagtgagcatgtgcttttggaaaaatggtgctgatagacctcctttgcacagagttgccacaaaccttcagtttgtaaaaaatgcagtgtctgggaacacggtaaaatgaggcatcctggtatatcatagaccaattatacattacatatatgaaaacattatgtcctatttcgttctttaaacaaatggaacctgatataaactgtttggcaaattacttttctcattcgactgtatagtttgaacatcttgtcagtcacgtagatctctcatttttgttgatagctatgtaacattctgttgtatggaggtcatataatttgtaaattactgatggaaatacataatttttttaatacaggtaagactgggtacacccttgtacatatgtctttactgatttgtatagtcataattgtaggatacatttctagaagtaaatactgacagtttggtttttttaatgcttctaacaatagcatataactccttataaaatagtactgtcttatttgtagtaaactatttcttccaagggctctagtagacattgtagtataaatgtttgtagcattggaaagtcttcatgttttctcaagaagtaatttgaaattttcctattggctgggcacagtggctcacacctgtaatcccagcactttgggaggccaaggcaggcggattgcctgaggtcaggagttcgagaacagcctgaccaacatggagaaaccccatctctactaaaaatacaaaattagccaggtgtggtggcacatgcctgtaatcccagctattcgggaggctgaggcaggagaattgcttgaacctgggagctggaggttgcagtgagccaggactgcgccattgtactccagcctgggcaagaagagcaaaactccacctcaaaaaaacaaaaacaaacaaacaaacaaatcctatcatttaccagtggtgaaaggagcaggatggggagagggagagatagatttgaaagaagaatggcgattcgttgacaattattgaagttggatgatagatacttaaggtttattttactgttctctctaacatacatttgagatttctcataatagaatgttaacaactacatttaatactatctttcccacagaaagaaattttggcgctaattccaaaccagaatgctcttctaaaggacttggatattcttcataattcatcacagatgaagagcatgtcaaccttcattgaagaagcctataagaaactggatgcatcttaaagagtgttttttttttagattgttccatattaatttaatgttcgtgaatttgtaaaactgttaacctatgattatatgtacagaggctaaggcttctgcaggatttattatctcctgatatgcactttaaaattagtctttgtagttctatcattagcatctaatgtagttctgaagactgtttttagcagttgccaaatctaggaaactaacatttatattgctgtatctataagtatttgcctaaaaccataaaataggaattgccttaaggatctagtagtttataatgcctgaatggaactcatttattggttaacagctcatatcaggagctgtgataagtaagtgtttacatacactgtctagtgcataaaaaccttagtgtttgctatcattcattctgtagccaatggcttacagtttctgtctggtcatctggaacttgaaaaatcctcaaatgccttcactcttttacctaactccctagtctttttgggaagtagttaagatatgcctgctatctttaactttggaggtagtatcaaaattttacttctttggttgtttagtgaattaatgttgaatattttctactgtcatcaaaacatattcccaaaaagtattaaaaaggaaccttagcacatttattttattaaaacaagaaaacccaaaatatataaaccttttcttattatgataataagcttatatatgtgaataagttataacctagtgtataaaaaattatttctaacaaactacagtatactgtcttgggtttttttttttttttttagtctgtaaaataaaatgactgcaattacttttt

SEQ ID NO: 7973 - DNA, 273 bp, Homo sapiens
gccaaaatatatttcttgaggaagactactctcccagcaatagttctgcatccagtatttggaaaagacatagatatagcatcaactttattgctgaacaagatttaagagttattacttatgtatattttctgtgtggcttatttacttgttccccaaagcatacaggcaatgttatcattgactgttgctaggaccatatttgaaagcagtgccatgtttaataccctttagaaacctggaggcttgctaattttaattttatacttggcc

SEQ ID NO: 7974 - DNA, 287 bp, Homo sapiens
ccggccaaagagacgggcgcatcagagcgtaggcgaactacagagaaaccgcgcttcactgcacgagccacatttctttcaccgcacaccacacacacactcacacgcacacacagaaagacacacggaaacatccaacagtcgcacagaaacacacacagccaggcagctcctgaggctgcgcggttctgctctctgccaggaaacccctccggaaagagagcgccccggggaacacaggcaggccgtacctcgaaatcccagcggggacacctgtcagggagacg

SEQ ID NO: 7975 - DNA, 392 bp, Homo sapiens
cttaattcattcaagaaatgctgactgagttcctgctgtgtgttggacactttcttagaagtgggacacactgcagtgtgtgggacaaaggctgggccgctcattgcttatgttctagttgaagagagagtcaatcaacaacattctactttcagacattgataaatgctgtcatgaaaagacaaggaacatgaaaaggtaagaaaagggatggagagagatgggatgaggggtgcctgggcagacaatgcaatgatctggcaaaagagtaggacaatcatgagactgcatgtgttccagtttctgctgctgtaaaacagcatccacaggttacatctttactattctgttacatacatactattatttaaataaaaaatagtactagttaa

SEQ ID NO: 7976 - DNA, 304 bp, Homo sapiens
ggacacctaccaccccagcccctcctaacagggccctattcattcgtccaccgaatggcaccgtgtccaagccaccttaaccagctctggtcactggggtggttggggtctgtcaccagcctggacagtaaccgttgttccaaacaaacatgacgaagacgaagactatggcggtgccttaaaacctggcagcctgtggtgttggctttccagatggcttcaggactttcccacaagcagcaggacccagcgctgttcggctcccggttcagcatgatggatggtggaagatgactctgggggg

SEQ ID NO: 7977 - DNA, 254 bp, Homo sapiens
  SITE (196): n equals a,t,g, or c
  SITE (234): n equals a,t,g, or c
  SITE (244): n equals a,t,g, or c
caagagggtagcccactcccctgaagagtaagtcccaggcctggcagcattcaccacaaactgactggagagtccttgggccttagctgaacatcagcagtagcctggcggcactctccatgggcctgtggtagtagtggccatgagcagcggctcctccgcatgtggaaagcagatggaagaggaggaaggactntgtcttgtggcttgaaggccagcttagctgcaggagtntagagcatanggtagacttc

SEQ ID NO: 7978 - DNA, 320 bp, Homo sapiens
caagagggtagcccactcccctgaagagtaagtcccaggcctggcagcattcaccacaaactgactggagagtccttgggccttagctgaacatcagcagtagcctggcggcactctccatgggcctgtggtagtagtggccatgagcagcggctcctccgcatgtggaaagcagatggaagaggaggaaggactttgtcttgtggcttgaaggccagcttagctgcaggagtttagagcataaggtagacttctaaggtttttgactccagctcttggctcccagacagcatctctggacccgcccagggcctgggggg

SEQ ID NO: 7979 - DNA, 272 bp, Homo sapiens
agaacaaggctctgggcagaggataccagctcagccgcagtagaatagggcactgggcagaggataccagctcagccacagcagaatagggctctgggcagagtcatgaggcccccactccaggccttagctcctgggtggccttcctagacacaccttgggccagaagggaacccactgccttgtaggggagggcccagtcctggcaggattcatcatctactgacgaaagagcccccgggccctgaataaccagcaggggtccacagggg

SEQ ID NO: 7980 - DNA, 195 bp, Homo sapiens
agtaaggaaaaagaacaagagtctctccctggcaatccagaaaattcttctggatcttatttaagaccaccaaggtgatacctctacatgtctgcatgaaccacagaattaggggcttggagtgttccctaatgaggtacggcttagaccacaacactcaagtcccttcgtatgcctagaaagcctttgcaagaa

SEQ ID NO: 7981 - DNA, 342 bp, Homo sapiens
ctttccgggctaccttgtagcaatttgaggctctgtcatcagtttctgctacgtttcaaagatccaggagaagcttagtgttgtgtcaagacgccgatggacccatcacagtttaatccaacctacaacccagggtctccacaaatgctcaccgaagaaaattcccgggacgattcaggggcctctcaaatctcctccgagacgttgataaagaaccttagtaacttgactatcaacgctagtagcgaatctgtttcccctctattggaagctttactccgtcgagagtctgtgggggcagcagtcctcagggaaatcgaagatgagtggctttacagcagg

SEQ ID NO: 7982 - DNA, 510 bp, Homo sapiens
ccgcttgagcctccagagcctgcgcccaccatctcttctaagatcaggagcttggtgacttcagagcagacctcgccctccccaggccccacctcccaggcctctcccactgctttagtcctgagggtccacattcccttcatccgaagtacactcactcttgctctttccgggctaccttgtagcaatttgaggctccgtcatcagtttctgctacgtttcaaagatccaggagaagcttagtgttgtgtcaagacgccgatggacccatcacagaagtttaatccaacctacatcccagagtctccacaaatgctcaccgaagaaaattcccgggacgattcaggggcctctcaaatctgctccgagacgttgataaagaaccttagtaacttgactatcaacactagtagcgaatctgtttcccctctatcggaagctttactccgtcgagagtctgtaggagcagaagtcctcagggaaatcgaagatgagtggctttacagcagg

SEQ ID NO: 7983 - DNA, 3884 bp, Homo sapiens
ggttttcagcctctttccgggctacctggtagcaatttgaggctctgtcatcagtttctgctacgtttcaaagatcctggagaagcctagtgttgtgtcaagacgccgatggacccatcacagtttaatccaacctacatcccagggtctccacaaatgctcaccgaagaaaattcccgggacgattcaggtaagccagataatgcccttcttgactatctgactataggggggttgggaggtcaaaaggctgccgtctttttttttttttttttttttttttttttaatgttgacttcagtctttgcaagaggaatgtatttaggtaaacctcaaaccagagggagtcaacacagagaggtcaaagactttattaaaagcggtgatggtggtggtgagaaatgtattattttattcactatgcttaggagtacttcagatttctttctttttttttctttttttttttttgagacggagtcttgctctgtcgcccaggctggagtgcagtggcgcgatctcggctcactccaagttccgcctcctgggttcacgccattctcctgcctcagcctcccaagtagctgggactacaggcgcccgccaccgcgcccgtttttttttttgtatttttggtagagacggggtttcaccgtgttagccagggtggtcttgatctccttacctcgtgatccgcccgcctcggcctcccaaagtactgggattacaggcttgagccactgcgcccggccagtacttcagatttctaagaccagtttctggggataaataattggaatcacagaacgcggctcgtagcgtcgttgcatcagtatcttccccaacagcaaatacatgtcaggaacggtaaaaaggaacaaatacagagaccaaataaacaaaagatagggaaaaaaaatgaaacaatatgagaaactttaacttcagttgaacctaaagtttttcttaatctctcgccaacattatttttatttatatatttttttgagacggagtctctgtcgcccgggctggagtgcagtggcgcggtgtcggctcactgcaacctccgcctctcgggttcaagcaattctcctgtctcagcctccaaagtagctggattacaggcatgtgccaccacgcccggctaatcttttgtatttttagtagagacagggtttcactatgttggccagactggtctcgatctcctgacgtcgtgatccgcccacctctgcctcccaaagtgctgggattacaggcgtaagccagcgcgcccgtcctatttttatttttatttttatttttgacagtgggtctctccatgttgcccaggctggtatcgaacacttgggttcagtccatcctcttgcgtagctgggactgcaggcgtgcgccaccgagtccgggctctaagccaacatttttgagacaggctttccagctaaatgttaataaacagactaacagcttcactgggaaaatggaagggagaggccgtaaacgtgctccgtaatgtaaattagtagcaggacctccaccggagggcggcttatctagaaactgcttgggtaattctgctccctgataggccgggtcttccggtggagaactcctttcttacagcagcacccaagcgcgggcttggccacagaggccctccacgtggtttgaagtcttatttatgaccctgacagcggggctgggtgtctagggtggtggcggcagaaaccctggagccaacaccttcgactgcccgatgctgggaggtctgggaactgggccgctggcgcgctgacgccctctgcgcctggtcttagctgtgtcccctgcgtccagaagaaagaatgctggtctatatatccgagtgggaaagaaaaatgaacgtacccccagtctctccctttccttgcgtctgccttagtacctcacagttccacaaaggatcctcgtttctatgtgcacaggtccctagactttgagaatcgatctcgaactttgatattgtttaatactttcacatatagggggcaaaaaacaaaacaaaacacacatacacgggcagttaacgataaccttcttattgtatgagatatgcgtatgtatgggatacgcctcacagttcggatgggagagacgagaatgagtggttgatttcccaaaatagagtttgagtgaagagatctaataccatgaaggagctgggcaactaaattagggctaactggagagggtaacagccacttacttcgactgcccagttttgcttaaggatgaggattctgggagaaaatagtatatgggtttttcttgtctctttcacaagattccacagaatgtacggtaggtaatgcttgtgagatactcagtggatctcttaagtgtaagtgaacaaagctagctcagggcagcgtgtgggacacgcttgtagcgccagctactctggacgctgaggtgggaggatcccttgagcctgggaggtagaggctgcaatgagccatgatagtgccactgcactccagcctgggtgacagagcaagaccctgtctcaaaaaataacagtctaccatcctggctaacacggtgaaaccccttctctactaaaaaatagaaaaaaattagccgggcatggtggtgggcgcctgtagtcccagctgctcgggaggctgaggcaggagaatggcgtgaacccgggaggcggagcttgcagtgagccgagatggcgccactgcactccagcctgggaggcagagcgagactccgtcttaataataataataataacagtctagaaaacaagggattacagtcatccctcggttatactctgggaattgttccaggacatccccaaaatctgtaagtgatcaagtgccacagtgggccctgcgaaaccttgtgaaaaaggttaacagtgtgtgtggggatttcgaattttgtgattggttggaaaaaattctcgcgtaagtgggacccaaagtttaaacccgtgttgttcaagggtcaactgtgttatcatgtgcccctgtacaagtgacttcttcctgccttgactttcctttttttttgagacggagttttgctcttgttgcccaggctggagtgcagtggcgcaacctgaggtcactgcaaacctccgcttcccggattcaagcgattctcctgcctcagcttcccgagtagctgggattacaggcatgcaccaccaccacgcctggctaattttgtagttttatttctatttttatttttatttatttatttttttgagacggagtcttgctctgtcccccagactagagtgcagtggcgcgatctcggctcactgcaagctccacctcctgggttcacaccattctcctgcctcagcctcccaagtacctgggactacaggcgcccgccacaacgcccggctaattttttgtattttttagtagagagggggtttcaccgtattagccaggatggtctcgatctcctgaccttatgatctgcccgcctcggcctcccaaagtgctgggattacaggcgtgagccaccgcgctgggctaactttgcgatttttgagaaaagactagaggttgtgcgttgtttactgtgaccttccaccctgaggaatttcccacacagcgccctgttcccctgcttaagggcagacctagttgatgtgtgaatgttgaagatccccttaatgtaatggcttttaaccttctctttcaggggcctctcaaatctcctccgagacgttgataaagaaccttagtaacttgactatcaacgctagtagcgaatctgtttcccctctatcggaagctttactccgtcgagagtctgtaggagcagcagtcctcagggaaatcgaagatgagtggctttacagcagg

SEQ ID NO: 7984 - DNA, 342 bp, Homo sapiens
ctttccgggctaccttgtagcaatttgaggctctgtcatcagtttctgctacgtttcaaagatccaggagaagcttagtgttgtgtcaagacgccgatggacccatcacagtttaatccaacctacaacccagggtctccacaaatgctcaccgaagaaaattcccgggacgattcaggggcctctcaaatctcctccgagacgttgataaagaaccttagtaacttgactatcaacgctagtagcgaatctgtttcccctctattggaagctttactccgtcgagagtttgtgggggcagcagtcctcagggaaatcgaagatgagtggctttacagcagg

SEQ ID NO: 7985 - DNA, 342 bp, Homo sapiens; identical to SEQ ID NO: 7984

SEQ ID NO: 7986 - DNA, 3885 bp, Homo sapiens
ggttttcagcctctttccgggctacctggtagcaatttgaggctctgtcatcagtttctgctacgtttcaaagatcctggagaagcctagtgttgtgtcaagacgccgatggacccatcacagtttaatccaacctacatcccagggtctccacaaatgctcaccgaagaaaattcccgggacgattcaggtaagccagataatgcccttcttgactatctgactataggggggttgggaggtcaaaaggctgccgtctttttttttttttttttttttttttttttaatgttgacttcagtctttgcaagaggaatgtatttaggtaaacctcaaaccagagggagtcaacacagagaggtcaaagactttattaaaagcggtgatggtggtggtgagaaatgtattattttattcactatgcttaggagtacttcagatttctttctttttttttctttttttttttttgagacggagtcttgctctgtcgcccaggctggagtgcagtggcgcgatctcggctcactccaagttccgcctcctgggttcacgccattctcctgcctcagcctcccaagtagctgggactacaggcgcccgccaccgcgcccgtttttttttttgtatttttggtagagacggggtttcaccgtgttagccagggtggtcttgatctccttacctcgtgatccgcccgcctcggcctcccaaagtactgggattacaggcttgagccactgcgcccggccagtacttcagatttctaagaccagtttctggggataaataattggaatcacagaacgcggctcgtagcgtcgttgcatcagtatcttccccaacagcaaatacatgtcaggaacggtaaaaaggaacaaatacagagaccaaataaacaaaagatagggaaaaaaaatgaaacaatatgagaaactttaacttcagttgaacctaaagtttttcttaatctctcgccaacattatttttatttatatatttttttgagacggagtctctgtcgcccgggctggagtgcagtggcgcggtgtcggctcactgcaacctccgcctctcgggttcaagcaattctcctgtctcagcctccaaagtagctggattacaggcatgtgccaccacgcccggctaatcttttgtatttttagtagagacagggtttcactatgttggccagactggtctcgatctcctgacgtcgtgatccgcccacctctgcctcccaaagtgctgggattacaggcgtaagccagcgcgcccgtcctatttttatttttatttttatttttgacagtgggtctctccatgttgcccaggctggtatcgaacacttgggttcagtccatcctcttgcgtagctgggactgcaggcgtgcgccaccgagtccgggctctaagccaacatttttgagacaggctttccagctaaatgttaataaacagactaacagcttcactgggaaaatggaagggagaggccgtaaacgtgctccgtaatgtaaattagtagcaggacctccaccggagggcggcttatctagaaactgcttgggtaattctgctccctgataggccgggtcttccggtggagaactcctttcttacagcagcacccaagcgcgggcttggccacagaggccctccacgtggtttgaagtcttatttatgaccctgacagcggggctgggtgtctagggtggtggcggcagaaaccctggagccaacaccttcgactgcccgatgctgggaggtctgggaactgggccgctggcgcgctgacgccctctgcgcctggtcttagctgtgtcccctgcgtccagaagaaagaatgctggtctatatatccgagtgggaaagaaaaatgaacgtacccccagtctctccctttccttgcgtctgccttagtacctcacagttccacaaaggatcctcgtttctatgtgcacaggtccctagactttgagaatcgatctcgaactttgatattgtttaatactttcacatatagggggcaaaaaacaaaacaaaacacacatacacgggcagttaacgataaccttcttattgtatgagatatgcgtatgtatgggatacgcctcacagttcggatgggagagacgagaatgagtggttgatttcccaaaatagagtttgagtgaagagatctaataccatgaaggagctgggcaactaaattagggctaactggagagggtaacagccacttacttcgactgcccagttttgcttaaggatgaggattctgggagaaaatagtatatgggtttttcttgtctctttcacaagattccacagaatgtacggtaggtaatgcttgtgagatactcagtggatctcttaagtgtaagtgaacaaagctagctcagggcagcgtgtgggacacgcttgtagcgccagctactctggacgctgaggtgggaggatcccttgagcctgggaggtagaggctgcaatgagccatgatagtgccactgcactccagcctgggtgacagagcaagaccctgtctcaaaaaataacagtctaccatcctggctaacacggtgaaaccccttctctactaaaaaatagaaaaaaattagccgggcatggtggtgggcgcctgtagtcccagctgctcgggaggctgaggcaggagaatggcgtgaacccgggaggcggagcttgcagtgagccgagatggcgccactgcactccagcctgggaggcagagcgagactccgtcttaataataataataataacagtctagaaaacaagggattacagtcatccctcaggttatactctgggaattgttccaggacatccccaaaatctgtaagtgatcaagtgccacagtgggccctgcgaaaccttgtgaaaaaggttaacagtgtgtgtggggatttcgaattttgtgattggttggaaaaaattctcgcgtaagtgggacccaaagtttaaacccgtgttgttcaagggtcaactgtgttatcatgtgcccctgtacaagtgacttcttcctgccttgactttcctttttttttgagacggagttttgctcttgttgcccaggctggagtgcagtggcgcaacctgaggtcactgcaaacctccgcttcccggattcaagcgattctcctgcctcagcttcccgagtagctgggattacaggcatgcaccaccaccacgcctggctaattttgtagttttatttctatttttatttttatttatttatttttttgagacggagtcttgctctgtcccccagactagagtgcagtggcgcgatctcggctcactgcaagctccacctcctgggttcacaccattctcctgcctcagcctcccaagtacctgggactacaggcgcccgccacaacgcccggctaattttttgtattttttagtagagagggggtttcaccgtattagccaggatggtctcgatctcctgaccttatgatctgcccgcctcggcctcccaaagtgctgggattacaggcgtgagccaccgcgctgggctaactttgcgatttttgagaaaagactagaggttgtgcgttgtttactgtgaccttccaccctgaggaatttcccacacagcgccctgttcccctgcttaagggcagacctagttgatgtgtgaatgttgaagatccccttaatgtaatggcttttaaccttctctttcaggggcctctcaaatctcctccgagacgttgataaagaaccttagtaacttgactatcaacgctagtagcgaatctgtttcccctctatcggaagctttactccgtcgagagtctgtaggagcagcagtcctcagggaaatcgaagatgagtggctttacagcagg

SEQ ID NO: 7987 - DNA, 731 bp, Homo sapiens
ggagtaagaacactgctgtctgtgcagagagaaaagatggcaagattgagatacatgttactgggcggagttcgtacgcatgaaagaagaccaacaaacaaggagcctaagggagttaagaaggaatcaagaccattcaaatgtccctgcagtttctgcgtgtctaatggatgggatccttctgagaatgctagaatagagaatcaagacaccaagccacttcagccataaatcttattcttgcacctttttttcttgctagtaattttatatagcaggttgagaaagctactctatgctagtatagactatacaccaataattttgataatgagttctaggatgtatttttcttgtatctttttcttcctactatgatactagtaattcataagggatctgtgtaatctgaatgtatttcaataactttagctctactgtttgatttgacccaaagaagccaagacgatataagtattcccatgtgtcttagaagcccaaagtcagtgagatgaaacccaacatcaagaaattgaagcaaagttacttgtggataaagaaagcattaggtagtttggctatagcataattagattttctggctttcaaaaatttggattgcaatcacagcaaactttgttatttttacagttttcagtacaaaagtgtttatatagaaacaataaagttgacatttgagtacctttaaaaaaaaaaaaaagaaaagtaaa

SEQ ID NO: 7988 - DNA, 728 bp, Homo sapiens
ggagtaagaacattgctgtctgtgcagagagaaaagatggcaagatcgagatacatgttactcggcagagttcgtatgcatgaaagaagaccaacaaacgaggagcctaagggagttaagaaggaatcaagaccattcaaatgtccctgcagtttctgcgtgtctaacggatgggatccttctgagaatgctagaatagagaatcaagacaccaagccacttcagccataaatcttattcttgcacctttttttcttgctggtaattttatatagcaggttgagaaagctaatctatgctagaacagactatacaccaataattttgataatgagttctaggatgtatttttcttcttgtatctttttcttcctactatgatactagtaattcataagggatctgtgtaatctgaatgtatttgaataactttagctctactgtttgatttgacccaaagaatccaagacgatataagtattcccatgtgtcttagaagcccaaagtcagtgagatgaaacccaacatcaagaaattgaagcaaagttacttgtggataaagaaagcattaggtagtttggctatagcataattagattttctggctttcaaaaatttgaactgcaatcacagcaaactttgttatttttacagttttcagtacaaaaaggtgtttatatagaaacaataaagttgacatttgagtacctttaaaaaaaaaaaacaaa

SEQ ID NO: 7989 - DNA, 115 bp, Homo sapiens
tttttgtatttttagtagagatggggtttcactgtgttaggcaggatggtcttgatctcctgaccttgtgatccgcccacttcggcctcccaaagtgctgggattacaggcgtga

SEQ ID NO: 7990 - DNA, 383 bp, Homo sapiens
gaaacagcgtcttgctctgtcgcccaggctggagtgcagtggcgcaatcccggctcactgcaacctccgcctcctgggttcaagcaattcctctgcctcagcatctcaagaaactgggattacaggcacacgccactatgcccggctaatttttgtattttcagtagagacgggggtcttaccatgttggccaggctggtctggaactcctggcctcaagtgatctgcccgcctcggcctcccaaagtgctgggattgcaggcgtgagccaccgcgccaggacagaaaaaaacatttttaagaaaacttacctggcagaactatcttcggactaagggatcacaagcaaaaattttcacatttcctatcaatgtatattctac

SEQ ID NO: 7991 - DNA, 2210 bp, Homo sapiens
ggagtaagaacattgctgtctgtgcagagagaaaagatggcaagattgagatacatgttactcggcggagttcgtacggtatgttgatgtgatgtggccggggctgtccaattccggagagtgacactcataaattaagacctaattaagactccctagctctaggcccggtgcggtggctgaggcctgtaatctgagcacttcgggaggctgaggcaggtggatcacctgaggacaggagttcgaaaccagcctggccaacatggtgaaaccctgtctctactaaaaatacaaaaagttagctgggcctggtggtgggcacctgcaatctcagctacttgggaggctgaggctagagaattgcttgaaccctggaggcggaggttgcagtgtgccgagattgtgccattgccctccagcctgggcaacaagaacaaaacaagcgtctcaaaaaaagactcccagctcacgtctgtaatccctgcactttggaaggctgaggtgggaggatcacctgagctcaaggagttccagaccagcctaggcaatataaaaaattaataaaatcagccatctctacaaaaaattaattagctgggtgtagtggtgcgtgcctgtaagtcccagctgctgtggggtgggtggctgagggctgaggcagctggatcacttgagcctggggggttaaggctgcagtgagccatgattgctccactgcaatccagcctgggcaacagagaaagaccctgtctcaacaaattccctagcttctctcccttatatagatgtgtaatattagtaatctttttcttgatagttttcaataaacatatttttttcccatgaagcatgaaagaagaccaacaaacaaggagcctaagggagttaaggtaagtataatttttttctttttattttccttttttttttttggctatatatgtggatgggtatctggtttgtttccttttgccggaatagggaattagggaatttgcttggactttctgaatccccagggactctggataagtcagttcatgtttgtagtttttaaaaatatattctttattctttatttttcagagaagttttatgttcatagcctttcccccacaccccacacatgccgcctctactgtcaacgtcacacaccagaattgcacactttgcagctgatgaacttaccctgacaggattatcatccagagttcatagtttacactaggggtcactcttggtgttaggttgatactttcacgtgctgtcacaaatatcttcacggtagcactgtatagtaagaggacaaacacttcagcagagtgtctagtagcagaatgagttacatttaaggcattcagagaacggagactagaatgttttattgacagtctgcacttgttaccattacaaaatgacccacaagctgccattctgtggtacccatattttgatctttttttctcctaaaatgttttgcttttggcccgtgtgtccttttttgtgtgtgttccctgttccaacacttaccaaaataaacaacattatagttgagggcttattacatttctctggggtacaatattccaattaatccatttcatcattttttttcagaaggaatcaagaccattcaaatgtccctgcagtttctgcgtgtctaatggatgggatccttctgagaatgctagaatagggaatcaagacaccaagccacttcagccataaatcttattcttgcacctttttttcttggtagtaattttatatagcaggttgagaaagctactctatgctagtatagactatacaccaataattttgataatgagttctaggatgtatttttcttgtatctttttcttcctactatgatactagtaattcataagggatctgtgtaatctgaatgtatttgaataactttagctctactgtttgatttgacccaaagaagccaagatgatataagtattcccatgtgtcttagaagcccaaagtcagtgagatgaaacccaacatcaagaaattgaagcaaagttacttatggataaagaaagcattaggtagttgggctatagcataattagattttctggctttcaaaaatttggattgcaatcacagcaaactttgttatttttacagttttcagtacaaaagtgtttatatagaaacaataaagttgacatttgagtaccttttaaaaa

SEQ ID NO: 7992 - DNA, 731 bp, Homo sapiens; identical to SEQ ID NO: 7987

SEQ ID NO: 7993 - DNA, 731 bp, Homo sapiens; identical to SEQ ID NO: 7987

SEQ ID NO: 7994 - DNA, 89 bp, Homo sapiens
ttttttttttttttgagactgagtcttgctctgtcacccaggttggagtgcagtggcacgatcttggctcaccgcaacctccacctcct

SEQ ID NO: 7995 - DNA, 2210 bp, Homo sapiens; identical to SEQ ID NO: 7991

SEQ ID NO: 7996 - DNA, 2216 bp, Homo sapiens
ggggagaataatatatttaggatcttggatatgtttaatatattttttaaagttactgtaattcctttttgagccctcatttgtcttttttgagccaaggctatcatatattaataaataaaccctctttcatctataaatttggtcattcagtatgtgtcttgcaaagaataattacctgccaaagcagtccatttttttcaaagtaatttgggtaactacagttacgtaactttattagagacatttgcatatttttaaaaatctaaataacatttttgttgttttctgtttgttgaggatgatatgctacaatgcacataaagcaattagaacaatgtttagcacattcttaagcattcaataaaacatggctattagaatcataatgattctgaaattctgctgacaatttggttgcattttatttggcaactggaggacttcactgtcttatttttctttagaagtaaagataagcctttggaagtaaagataagccagtgatgcacaatttgcttaattaattgattaataatctgttttgtgccacttacattggtaatgtggtcatgagaatggaaacttacttgagatagtctaccacaatttttacagttggcagcttgtaagcaggcctgagtagcagaagagttaggggttggggaaggtggagtagaatgaggaatgaaatgttctttctcatatgcttattatataagtgggtccggaacatgttctcacctcaaggttaacaaatacctaatgcaggaaagaaaatacatagccatggtcccttcctcaaggactttataattcagtgagatgtaaagatgagtgcttaagtgtatgcacctgattattgtctcttcattgccgcataagtcggaaaaggggatcacttgcagcgaaaaatggccactagatggcaatatcaccccatagtcaccaaacaggattacttgcatccctaattatgttctaccagagggaatatagtacagacttttccaagattgataaagacagcagattccctttcacctttgccaaattaactctactagctatttgcaagacctgtaattatctaataaattggcttaaatatatagaagctagaaaatgccaattcctcttccctcaaaagttacctgacattcaaatatttaaatacccttgctttgcattttagatatatctttgaattcaggtattcattttgtataatctctcaacttttaagcatttttataatgtaaagttgaaaacagcttaatagaaccacagaatgtttattttggagtcattttcttatattcagagctatgaaagcaaattgggaataaagccttatcctgctcagctttacctagttgactcagttgacttttgagtatctactacataaaaagcccattactattaagaaactcaagacaaacatgatttttaacctttaatagcctaagatttcttgtgggccaaggaattaattattccaatcagaaatggaggccttacctcatttgggcaaagattagtgctagttattgaagatttacctaataaatgatctgttaaggaatttagttttttatgggatatgttgttttggttgttgaaaactaaggtataattataatagttatttttggaagatatgtttggctagccatcaattagaagttagagagtttgtcctaacagaataagctaaaaccctcacattttaaaacaggcatagggaacaaggaacaaaaacaaattcaaaattttactaaggtaaagcggtatattgtgattgttaaaacactttttttcgcctaaggagtttcccagaatttaaatcctggttctacacttcccaaacctcaggtcaccttctgtggcctctctaacctcaatttttttacttgtaaaatggggacatttaatagtatctacctcagtgtcgtgaagactaaatgaagtaccacttgtaaagagtttattacagtgcctgacatatactgtatggttagtactgctaaaatgacttcttaaggttaccaaaaggaaaattccacaagctgaccacctttcctattgtgatggtcactggtatttcagctatgatcctttgttgtgtatttatccagactgaaagatgtttttctagtaaccatcttgcatcgtcttagtctccccattaaataaacttttcctacaaacta

SEQ ID NO: 7997 - DNA, 3094 bp, Homo sapiens
ttttagagatgaagaaaatgtgggagctatgaatcagtatagaacaagaactctgagtatcacttcttcaggcagtgctgtaagctgttcaacaattcctccagtaagtagtcattcaacatgtactgaatgtttattacatcactactgtgatctgattgccttgtctcattaaacaataatgtatgcctttcaggtacagacttctgttgattgctttttgacttgtcttgaaaccagtactttctttgattttaataaatgaatgttgctcaaaggatgtggtagagttgtgtcctgccaccattatgtgtaaaatgaaggccaaatgactttttgttggtaaaactcaaaacaccttctttttcaattgtcctgattttaggcagcctgttgactaaatttcaagtaattttttcttagaatacaaactgatgagtttcaaaaaattaatgtaagtcacttgataaattgatcaggtttgaggtggatgagtcattcttcatatgagctgaagattaatgagcttggtcactgtgaggattataaggtgtgtaagcctcagacacttggacgtacatgttaatggtataaaattttgttgttgttgtttgtttttgtttttgttttttttttgagatggagttttgctcttgtcatccaggccggaggtcatccaggctagagtgcagtggcatgatctcagcccactgcaacctccgcctcctgggttcaagcaattctcctgcctcagcttcccgagtagcttggattacaggcgcctaccaccatggctggctaatttttgtatttttagtagagacaaggtttcaccatgttggccaggctggtctcgaactcctgacctcaggtgatccgcccacctcagcctcccaaagtgctgggatttcaggcgtgagccactgcgcccagccatttgtacttggatataagtacaaatttggccgggcatagtggctcagacctgtgatcccagcactttgggggccaaggtggaaggatcgcttgagcccaagagtttcaggccagcctgggcaacatagcaagaccccctgtctacaaaaaatttaaaagttagccaggtgtagtggtatacacctgtattcccagctactcaggagactgaggcagaaagatcactcaagcccaggaggttgcagccaccgtgaactgtgttcctgccactgcactccaacctgggcaacacagcaagaccctgtctcaaaaaaaaaaagaagacccttgttcctggcttgcagagtttgcagctatcttcttttttaggagaaaagttgaatgatacaaggttatatacagttattaaataacagactgtagtgcttcagagaaagaaaaggtcattgtgaactgagtatttcacatttcttattcatcttgtaagtcatgtgacttgcacagtgtatcttaactgataagtaacttgaatttatgatcaaaagacatatgaagacttttccatgggtgattgctaccatcaggtcaattctacagctgaaactgtgaaggcattcttggatatattcagcaatactgaatgctttcaaaaataattttctatacaaaatctactctaaaagcctacttttaacctaaaaagcagaggaacaagcagtttcatcttgttttttccatcagttttcatgatggacactaggtggcactatggtaattttttaaaaattctgcctatacactatattttttgctatataatctgtatttctgtttggaatttaatttctcctatataacagtttctatatagtactgtcagtgtttggaatcttaaaattcatggtgtcaatatataaatagaacagatattagcagtgtactttttgaaatggttcattatcagtaatactaatttatgaaatctttccaggaactggtgaaacagaaggtgaaacgtcagttgacaaacagcaaaatcagctgtcagacgtcgattgcagaaaggagaagcaaatatatttaccaagcaacgtagggaaaacatgcaaaatatcaaatcaagtttggaagcagctagcttttggggagaataatatatttaggatcttggatatgtttaatatattttttaaagttactgtaattcctttttgagccctcatttgtcttttttgagccaaggctatcatatattaataaataaaccctctttcatctataaatttggtcattcagtatgtgtcttgcaaagaataattacctgccaaagcagtccatttttttcaaagtaatttgggtaactacagttacgtaactttattagagacatttgcatatttttaaaaatctaaataacatttttgttgttttctgtttgttgaggatgatatgctacaatgcacataaagcaattagaacaatgtttagcacattcttaagcattcaataaaacatggctattagaatcataatgattctgaaattctgctgacaatttggttgcattttatttggcaactggaggacttcactgtcttatttttctttagaagtaaagataagcctttggaagtaaagataagccagtgatgcacaatttgcttaattaattgattaataatctgttttgtgccacttacattggtaatgtggtcatgagaatggaaacttacttgagatagtctaccacaatttttacagttggcagcttgtaagcaggcctgagtagcagaagagttaggggttggggaaggtggagtagaatgaggaatgaaatgttctttctcatatgcttattatataagtgggtccggaacatgtgctcacctcaaggttaacaaatacctaatgcaggaaagaaaatacatagccatggtcccttcctcaaggactttataattcagtgagatgtaaagatgagtgcttaagtgtatgcacctgattattgtctcttcattgccgcataagtcggaaaaggggatcacttgcagcgaaaaatggccactagatggcaatatcaccccatagtcaccaaacaggattacttgcatccctaattatgttctaccagagggaatatagtacagacttttccaag

SEQ ID NO: 7998 - DNA, 7129 bp, Homo sapiens
aggagagaagacactcttgatgtggaggtttctgccagtggctacacaaaggaaatgcaggcagatgatgaactgcttcatccattaggtccagatgataaaaatattgaaacaaaagagggatctgaattctcattttcagatggagaagtggcagaaaaagcagaggtttacgggtcagaaaatgaaagtgaacggaactgtctagaagaatcagagggctgctattgcagatcatctggagaccctgaacaaataaaggaagacagtttatcagaagagagtgctgatgcacggagttttgaaatgactgaattcaatcaagctttagaagaaataaaagggcaggttgttgaaaacaactctgtaactgaattttctgaggagaaaaacagaactgaaaattacaacaggcaagatggtcagagagttcaaggaggagtccctgctggctctgacgagtatgaagatgaatgccctcatctaattgccttgtcgtcattaaatagagaattcaggcctttcaggtatagacttctgtcgattgctttttaactttagtcttgagactgatactttgttagattctagtaaaagaatgtttttttcaaatgatgtgacaaaattgtattctgccaccttgatgtataaaatgaaagccaaataattttttgttgttaaaaactcaaaatagcttccttttcaattgacctgattctaggcagcctattgactaaatttcaagtaattctgccttaaaatacaaactgatggctgggcacagtggctcgctcatgcctgtaatctcagcacttctgggaggccaaggcaggcaaatcacctgaggtcaggagtttgagaccagccaggccaacatggcaaaaccctgtctctactaaaaatataaaaattaaccgggcatggtggcctgtgcttgtaatcccagctacttgggagactgaggcaggagaatcacttgaacctgggaggcagaggttgcagtaagccaaagatcgtaccactgcactccagcctgggtgacgagcaaaaaactccgtctcaaaaatatatatatatatacaaactgatgattttaaaattattgcaggtctctggatacattgatcaggttttagatggatgagttattcctcatatattttcctaattacacatctgatgtgtgtttgagttatgtaaaggcatgtaaatattaaaacatgcaataaatgtactttctatatgaaacatctgcagtgaattttctctagtaccttgagccttctatcctttgttcatgtgtagttaaaattatctaatgatattatgttttcttttaataatttttttttgtaaatattaatcaggctcagcttagattaggaaaagttctaaaacttaatttttggatttgggattgcttattcagaatcaaattgtagttaaatgaaatattggttttatttatttcaaaatagtaatatgacaattaaaattagttcagcaatacatttattaaacatttttcagtacatgtttgggcttatatcttaagcctacctttatctttaaagttttattcctgaagcaaaacatgagaattttgttcctttttcatatagctgtgtatctgtgtcacagggctactgccatttaaataataaacttggaaaattaaatcagaagcttaaaaggaaaagaggggtgacagaggctcaggattttgagtaagtgattgtattagactggattcttcaaagaaacagaataaataggagatttattttaaggaattagcccatggggttatggaggctgagaagtcccaggatctgtagtcaacaagctagagaccaaggagagcccatggtacagttccagtccaaatccaaagagctaagaaccagaagagacaatagcataagttccagtccacatccaaagaaaggagaggacccatgtcccagttcaaagacagttctctcttactttgcctttttgttctcatcaggccttcaatggattggatgaggtccacccacactggggagggcaatctgctatactcagtttattgattcagaaacgccctcaaagacacacccaagttaatgtttaaccaaatatatggcaccctgaggcccagtcaagttaacatataaaattaaccatcacagtgatagaagaaaatctatataggattaaatggtcttttaaactcagaatgggaacaataattttgttcccactctggatacatgctgggcaaaacttccattcaaagtaaaagcagaacagcagatgttgctgaaaaatattaactgttaggagttaatatcgtccgagtttttatacattgcatatattgaaactttgagccatgtgaaaaacattagtctctaggttgcagattttcctaccctagtggagctgactataatgagtactgtctgtttccattatatcttctgtttgtgaaggtggaaagagtctcaaaaatttagatagggagagacagatttatatagttcagtgaaagaagaggagaggattattagaaaagggaagatgaattgtggggaggtgataaatttcaatggcttaagcattctactgtttttaaattttgatagtgactaacaaaatgctggaaaatgaaaattgttaatgtatagaacttaacagtaggtagttttatcttcacagaaattttaaaatataatgatctttctgaagtattttatgtcttcagttttgctgcatgcaaaaaataatataaattaatcaaatgggattcattacattatacaaattaactagataaattgtgggttttttaattttagagatgaagaaaatgtgggagctatgaatcagtatagaacaagaactctgagtatcacttcttcaggcagtgctgtaagctgttcaacaattcctccagtaagtagtcattcaacatgtactgaatgtttattacatcactactgtgatctgattgccttgtctcattaaacaataatgtatgcctttcaggtacagacttctgttgattgctttttgacttgtcttgaaaccagtactttctttgattttaataaatgaatgttgctcaaaggatgtggtagagttgtgtcctgccaccattatgtgtaaaatgaaggccaaatgactttttgttggtaaaactcaaaacaccttctttttcaattgtcctgattttaggcagcctgttgactaaatttcaagtaattttttcttagaatacaaactgatgagtttcaaaaaattaatgtaggtcacttgataaattgatcaggtttgaggtggatgagtcattcttcatatgagctgaagattaatgagcttggtcactgtgaggattataaggtgtgtaagcctcagacacttggacgtacatgttaatggtataaaattttgttgttgttgtttgtttttgtttttgttttttttttgagatggagttttgctcttgtcatccaggccggaggtcatccaggctagagtgcagtggcatgatctcagcccactgcaacctccgcctcctgggttcaagcaattctcctgcctcagcttcccgagtagcttggattacaggcgcctaccaccatggctggctaatttttgtatttttagtagagacaaggtttcaccatgttggccaggctggtctcgaactcctgacctcaggtgatccgcccacctcagcctcccaaagtgctgggatttcaggcgtgagccactgcgcccagccatttgtacttggatataagtacaaatttggccgggcatagtggctcagacctgtgatcccagcactttgggggccaaggtggaaggatcgcttgagcccaagagtttcaggccagcctgggcaacatagcaagacccctgtctacaaaaaatttaaaagttagccaggtgtagtggtatacacctgtattcccagctactcaggagactgaggcagaaagatcactcaagcccaggaggttgcagccaccgtgaactgtgttcctgccactgcactccaacctgggcaacacagcaagaccctgtctcaaaaaaaaaaagaagacccttgttcctggctttgcagagttttgcagctatcttcttttttaggagaaaagttgaatgatacaaggttatatacagttattaaataacagactgtagtgcttcagagaaagaaaaggtcattgtgaactgagtatttcacatttcttattcatcttgtaagtcatgtgacttgcacagtgtatcttaactgataagtaacttgaatttatgatcaaaagacatatgaagacttttccatgggtgattgctaccatcaggtcaattctacagctgaaactgtgaaggcattcttggatatattcagcaatactgaatgctttcaaaaataattttctatacaaaatctactctaaaagcctacttttaacctaaaaagcagaggaacaagcagtttcatcttgttttttccatcagttttcatgatggacactaggtggcactatggtaattttttaaaaattctgcctatacactatattttttgctatataatctgtatttctgtttggaatttaatttctcctatataacagtttctatatagtactgtcagtgtttggaatcttaaaattcatggtgtcaatatataaatagaacagatattagcagtgtactttttgaaatggttcattatcagtaatactaatttatgaaatctttccaggaactggtgaaacagaaggtgaaacgtcagttgacaaaacagcaaaaatcagctgtcagacgtcgattgcagaaaggagaagcaaatatatttaccaagcaacgtagggaaaacatgcaaaatatcaaatcaagtttggaagcagccagcttttggggagaataatatatttaggatcttggatatgtttaatatattttttaaagttactgtaattcctttttgagccctcatttgtcttttttgagccaaggctatcatatattaataaataaaccctctttcatctataaatttggtcattcagtatgtgtcttgcaaagaataattacctgccaaagcagtccatttttttcaaagtaatttgggtaactacagttacgtaactttattagagacatttgcatatttttaaaaatctaaataacatttttgttgttttctgtttgttgaggatgatatgctacaatgcacataaagcaattagaacaatgtttagcacattcttaagcattcaataaaacatggctattagaatcataatgattctgaaattctgctgacaatttggttgcattttatttggcaactggaggacttcactgtcttatttttctttagaagtaaagataagcctttggaagtaaagataagccagtgatgcacaatttgcttaattaattgattaataatctgttttgtgccacttacattggtaatgtggtcatgagaatggaaacttacttgagatagtctaccacaatttttacagttggcagcttgtaagcaggcctgagtagcagaagagttaggggttggggaaggtggagtagaatgaggaatgaaatgttctttctcatatgcttattatataagtgggtccggaacatgttctcacctcaaggttaacaaatacctaatgcaggaaagaaaatacatagccatggtcccttcctcaaggactttataattcagtgagatgtaaagatgagtgcttaagtgtatgcacctgattattgtctcttcattgccgcataagtcggaaaaggggatcacttgcagcgaaaaatggccactagatggcaatatcaccccatagtcaccaaacaggattacttgcatccctaattatgttctaccagagggaatatagtacagacttttccaagattgataaagacagcagattccctttcacctttgccaaattaactctactagctatttgcaagacctgtaattatctaataaattggcttaaatatatagaagctagaaaatgccaattcctcttccctcaaaagttacctgacattcaaatatttaaatacccttgctttgcattttagatatatctttgaattcaggtattcattttgtataatctctcaacttttaagcatttttataatgtaaagttgaaaacagcttaatagaaccacagaatgtttattttggagtcattttcttatattcagagctatgaaagcaaattgggaataaagccttatcctgctcagctttacctagttgactcagttgacttttgagtatctactacataaaaagcccattactattaagaaactcaagacaaacatgatttttacctttaatagcctaagatttcttgtgggccaaggaattaattattccaatcagaaatggaggccttacctcatttgggcaaagattagtgctagttattgaagatttactaataaatgatctgttaaggaatttagttttttttggatatgttgttttggttgttgaaaactaaggtataattataatagttattttttgaagatatgtttggctagccatcaattagaagttagagagtttgtcctaacagataagctataaccctcacattttaaaacatgcatagtgaacaatgaacaaaaacaaattcaaaattttactaatgtaaagctgtatattgtgattgttaaaacacttttttttgcctaggagttccagatttaaatcctggttctacacttcccaaacctcaggtaccttctgtggcctctctaacctcaatttttttacttgtaaaatggggacatttaatagtatctacctcagtgtcgtgaagactaaatgaagtaccacttgtaaagagtttattacagtgcctgacatatactgtatggttagtactgctaaaatgacttcttaaggttaccaaaaggaaaattccacaagctgaccacctttcctattgtgatggtcactggtatttcagctatgatcctttgttgtgtatttatccagactgaaagatgtttttctagtaaccatcttgcatcgtcttagtctccccattaaataaacttttcctacaaacta

SEQ ID NO: 7999 - DNA, 12384 bp, Homo sapiens
ggaaatttccagttccaaagccaattgattacaatcgtcatgcagtggtcatggaactcataaatggttatccactgtaagtattcattattcttaaagccatgaatcctgataaatgaatttaagtttcagggtttttaataaaattttttttagttaatgaaatattgcctctgggaggttaaaatttatttaaaggaatagactcaaagacaaattaaaaacccagtttcattctgacaatatgaactttgtaatctctgtgattcattcattcattcaatattaagagactgttaggtgccaggaacttttaatctcagcagtgaacaaaacaaagtccctgccctcatggaatttacattctgatggaaggagatgtgcaataaataactaaaggaaatgtatatcaattgttagtaagtactatggataaaaaaaagcagagtaagggagataggaagtactaacgggacaggagactactgttttatgtagggtggtcaagaaaagtctcactaataaggtgaaacctcatcaaattttgattcagattagcagctattggagtgggagtattttgagcagagaagagatgtgatctcatcaatcagtgatctcagtgttttcagagggtcactctgcttgctgaattaatagactctggggagacaaagaattaggaagacaagttaagaggctattacaataatctaggcaagaaatggttgtaattctgattacagtgatagttgtgaaggtgatgaaaagtggtcagattctgaatgtgttctgcaggttgaaccaacatgatttgagattggatatggatgtgaaggaagggatgagtcaatggtgacaccaaggtttttcccctgagtagcaaattaactggaaggagaaatctaccatgtatagaaacaggaaagctacaggaacagcattttggagttggagggtgggacagaatcagagattccattttggacatgctaagtttgagatgcctgggagttagagaagtctacattaaaatcagtgtatatgtggtatttaaaccattaacctagatgagatcaccaagaatgagtctaaataagagaaaataaaaggtcataggattgacctttgaggaactccagaatttagaggtcaaggaaaaagatgaagtacaaatagaaaagactaagaaggtatgatctgtgaggaaggaagaacacctggagagaatggtgtcccaagagttaagtgaagaaaatgttcaaagaggtcaactgacagaccacatatgatgaggactaagaattgacctttggatttagcaacattgaagtcattgtagtctcaacaagggtgatcttggaagcactttggcctcccaaagtgctaggattacaggggtgagccattgcgcctggcccgtacatgctattattgattctggatgtgggtgtgtttgtttagaatataatcattttttcataatttttcaattttgtgatactattatttaggtcactcactggtttgaagtggctagtgttaacgttataaaaagcctgtttgaaatggtatgagagagtaggaggaaacaaattggaaaagcacatgtagacaagtttggctgtaaagatcaaagaaaggtagtagtagaaaagagatacagaattgaagcagtgtggctatttttttaatagatgggagatattatatctgtgtgctgatgggaatgagaagaaagctgctggggatacacagcatggaaataatatatatgttcacatgcatacatactttcgttaaaaccgtaaatgaacacaagtaacctattttcatgcttaaaatactttcagatgtcagatacaccatgttgaagatcctgcatcagtatatgatgaagctatggaactaattgtcaaacttgcaaatcatgggctgattcatggagattttaatgaatttaatctcattttggatgaaagtgaccatatcaccatgattgattttccacagatggtttcaacttctcatcccaatgctgagtggtacgtacttgctatttttttatttttattttattttatttttttggagacggagttttgcttgttgcccaagctggagtgcaatggcgcgatctcggctcactgcaacttccacctcccgggttcaagcaatgctcctgcctcagcctcccgaggagctgggataacagacatgtgccaccacacctggctaattttttgtatttttttttttagtagagatggggtttctccatgttggtcaggctggtcttgaactcctgacctcaggtgatccacccgcctcggcctcccaaagtgctgggattacaggggtgagccattgcgcccggcccttacatgctattattgattctggatgtgggtgtgtttgtttagaatataatcattttttcataatttttcaattttgtgatactattatttaggtcagtcactggtttgaagtggctagtgttaacgttataaaaatttggttttttattaaagtataactactagagttttccccataagaatttgaatttctctgttgtaaattgacagacgttcaaaagtcaaattttcttagccatggaaccctttgttcaaacagacttttagatggaagaccaattgttaaaacaggtaaaagtagggagtgtagtggggaactctagaaccacttttgtctttccctttttcttgctgttccatgattgcctccaagagagattcaccaagtataactcagtaatctcgatgatctgaataaaagttgtggttttggactggactcagttgtcaaaccagtgataattacctcttgtcacttttagctttatttattagaaaaaaaatcacataaaactttatctctgacacagtgcagaatcatgatatactgcgataatcatattcttcacattacttatttaaaccaagccagccaagtcatgaaacaggaccttatcctttatttgcttgaggtttatgattcaattgagtgtaactaaggatttttttttctttctgttccaagctttatgagaaacttttttcctaaactaacaactagtatcacttatataatagagtatattaattcttccagagattgagcttgaagtagttttgttaagtgaagcgtctcttcatcctggtttccagtagaaaatgtctatacttatgctacagaaagaaatgtcatttgaaaataaatttttaaaacgttttcaacaaaataatactaaaagattaatgcctggcactggggtggtcagtactctttggatgatgactaatcatgatttttattaataaggagtaacatagtcacacagtaaaggaacatctaggagcctccagagtgtgacagattatgacattctaggtttaggctgcatcgttctatggagagacattgtgatttaatttcaatttttatgaaccagttctggggccaaggagctgtgctaattgctagagattgagatataaataacccctatatatgctttagaaaatgttactgtctcgtagggagatgtaaacatatataaaatagtctttttaaaatgtattagtatttttcccagagtaccctgtgagcaaagaggagaggcattatcttcctatttccaaacttcatctttctcaaagagagtcaattgcacattatcctgtccttaattctcccttgtctggaaatcttctagagaattgaatccatttttgctgctttgtggtggcccaaaaaggcagcctgatattcagatattgttctacttttggtccagattaacatgtcctcagattatttttataggctgtagcattatttatccctttgggtgttattgcaaatcggctaatggataacaaagatacataaacataattcagtagtctccaaacttaactgtttaatattaatatctttttatcgtcagatctttcagttggctaggggttctagtgagtgttgctgataagaagcatagccagactcaggacgaacagaataagtggaaacctatccccaaaccataggcccattatcttatttcctggggttcacattcatctttccctagtgtatctaactatataccagtaactatgacaaaaccttgactttcctaaccgtaggaactgcatggcattgacagcttatatccttgagatttccttggattttagtttttcaaacacactggttaactcatttgtatcttttttcttttgtgtaacatcttttatctccttgtgtaaggaggagcaataccattaaccaataagtatattgtcattggctaataaggaaaaagaggagcaataaagactatatcataaatgattcttgcttttgcaggtattttgacagagatgttaaatgcattaaagatttctttatgaaacgtttcagctacgaaagtgagctttttccaacttttaaggatatcaggtttgtactccccattgctttacataatagaacagtttaaatatctggtctgtgtatttctaaaaattaacattttcatctaaaaaactttccaaattttgacacgtaatcactgttagatgtcattgctctgtagtacataactgaaacttaaaaacttgaaaatacctgcatttggtccattaaggcactgttactgaattttaggaagcggacatatctagattcttataaattcaagaacttttattctattttggatgctatttgagtaactcattcataaggaataacaccaaacattcattgaaatttgtgtttttcctttatcaaggaccaggaggtatctttaattgattctcaaaacataactatcatgtgcattctcaaagctcagttttctcatatttattttatacacttaagatattttctgatctgggatgagtcacataatctgaaggaaatccttagccccctttgaaagttaatttacaaagttaataaacataagctgaggtttttataacctttttatttatattgttgcttttcagttattttattcttaaaatgacagccagcatatacctttcatatttgtttacctgtgtcatttaaatattacattttagggaaggaaaatttatttttaacatataagctattaaactcacttgaatcataatttatcagagtagtagatatttgctcctcttagataaacattttttctctctttctatgcttgacgccttttttttctaggagagaagacactcttgatgtggaggtttctgccagtggctacacaaaggaaatgcaggcagatgatgaactgcttcatccattaggtccagatgataaaaatattgaaacaaaagagggatctgaattctcattttcagatggagaagtggcagaaaaagcagaggtttacgggtcagaaaatgaaagtgaacggaactgtctagaagaatcagagggctgctattgcagatcatctggagaccctgaacaaataaaggaagacagtttatcagaagagagtgctgatgcacggagttttgaaatgactgaattcaatcaagctttagaagaaataaaagggcaggttgttgaaaacaactctgtaactgaattttctgaggagaaaaacagaactgaaaattacaacaggcaagatggtcagagagttcaaggaggagtccctgctggctctgacgagtatgaagatgaatgccctcatctaattgccttgtcgtcattaaatagagaattcaggcctttcaggtatagacttctgtcgattgctttttaactttagtcttgagactgatactttgttagattctagtaaaagaatgtttttttcaaatgatgtgacaaaattgtattctgccaccttgatgtataaaatgaaagccaaataattttttgttgttaaaaactcaaaatagcttccttttcaattgacctgattctaggcagcctattgactaaatttcaagtaattctgccttaaaatacaaactgatggctgggcacagtggctcgctcatgcctgtaatctcagcacttctgggaggccaaggcaggcaaatcacctgaggtcaggagtttgagaccagccaggccaacatggcaaaaccctgtctctactaaaaatataaaaattaaccgggcatggtggcctgtgcttgtaatcccagctacttgggagactgaggcaggagaatcacttgaacctgggaggcagaggttgcagtaagccaaagatcgtaccactgcactccagcctgggtgacgagcaaaaaactccgtctcaaaaatatatatatatatacaaactgatgattttaaaattattgcaggtctctggatacattgatcaggttttagatggatgagttattcctcatatattttcctaattacacatctgatgtgtgtttgagttatgtaaaggcatgtaaatattaaaacatgcaataaatgtactttctatatgaaacatctgcagtgaattttctctagtaccttgagccttctatcctttgttcatgtgtagttaaaattatctaatgatattatgttttcttttaataatttttttttgtaaatattaatcaggctcagcttagattaggaaaagttctaaaacttaatttttggatttgggattgcttattcagaatcaaattgtagttaaatgaaatattggttttatttatttcaaaatagtaatatgacaattaaaattagttcagcaatacatttattaaacatttttcagtacatgtttgggcttatatcttaagcctacctttatctttaaagttttattcctgaagcaaaacatgagaattttgttcctttttcatatagctgtgtatctgtgtcacagggctactgccatttaaataataaacttggaaaattaaatcagaagcttaaaaggaaaagaggggtgacagaggctcaggattttgagtaagtgattgtattagactggattcttcaaagaaacagaataaataggagatttattttaaggaattagcccatggggttatggaggctgagaagtcccaggatctgtagtcaacaagctagagaccaaggagagcccatggtacagttccagtccaaatccaaagagctaagaaccagaagagacaatagcataagttccagtccacatccaaagaaaggagaggacccatgtcccagttcaaagacagttctctcttactttgcctttttgttctcatcaggccttcaatggattggatgaggtccacccacactggggagggcaatctgctatactcagtttattgattcagaaacgccctcaaagacacacccaagttaatgtttaaccaaatatatggcaccctgaggcccagtcaagttaacatataaaattaaccatcacagtgatagaagaaaatctatataggattaaatggtcttttaaactcagaatgggaacaataattttgttcccactctggatacatgctgggcaaaacttccattcaaagtaaaagcagaacagcagatgttgctgaaaaatattaactgttaggagttaatatcgtccgagtttttatacattgcatatattgaaactttgagccatgtgaaaaacattagtctctaggttgcagattttcctaccctagtggagctgactataatgagtactgtctgtttccattatatcttctgtttgtgaaggtggaaagagtctcaaaaatttagatagggagagacagatttatatagttcagtgaaagaagaggagaggattattagaaaagggaagatgaattgtggggaggtgataaatttcaatggcttaagcattctactgtttttaaattttgatagtgactaacaaaatgctggaaaatgaaaattgttaatgtatagaacttaacagtaggtagttttatcttcacagaaattttaaaatataatgatctttctgaagtattttatgtcttcagttttgctgcatgcaaaaaataatataaattaatcaaatgggattcattacattatacaaattaactagataaattgtgggttttttaattttagagatgaagaaaatgtgggagctatgaatcagtatagaacaagaactctgagtatcacttcttcaggcagtgctgtaagctgttcaacaattcctccagtaagtagtcattcaacatgtactgaatgtttattacatcactactgtgatctgattgccttgtctcattaaacaataatgtatgcctttcaggtacagacttctgttgattgctttttgacttgtcttgaaaccagtactttctttgattttaataaatgaatgttgctcaaaggatgtggtagagttgtgtcctgccaccattatgtgtaaaatgaaggccaaatgactttttgttggtaaaactcaaaacaccttctttttcaattgtcctgattttaggcagcctgttgactaaatttcaagtaattttttcttagaatacaaactgatgagtttcaaaaaattaatgtaggtcacttgataaattgatcaggtttgaggtggatgagtcattcttcatatgagctgaagattaatgagcttggtcactgtgaggattataaggtgtgtaagcctcagacacttggacgtacatgttaatggtataaaattttgttgttgttgtttgtttttgtttttgttttttttttgagatggagttttgctcttgtcatccaggccggaggtcatccaggctagagtgcagtggcatgatctcagcccactgcaacctccgcctcctgggttcaagcaattctcctgcctcagcttcccgagtagcttggattacaggcgcctaccaccatggctggctaatttttgtatttttagtagagacaaggtttcaccatgttggccaggctggtctcgaactcctgacctcaggtgatccacccacctcagcctcccaaagtgctgggatttcaggcgtgagccactgcgcccagccatttgtacttggatataagtacaaatttggccgggcatagtggctcagacctgtgatcccagcactttgggggccaaggtggaaggatcgcttgagcccaagagtttcaggccagcctgggcaacatagcaagacccctgtctacaaaaaatttaaaagttagccaggtgtagtggtatacacctgtattcccagctactcaggagactgaggcagaaagatcactcaagcccaggaggttgcagccaccgtgaactgtgttcctgccactgcactccaacctgggcaacacagcaagaccctgtctcaaaaaaaaaaagaagacccttgttcctggctttgcagagttttgcagctatcttcttttttaggagaaaagttgaatgatacaaggttatatacagttattaaataacagactgtagtgcttcagagaaagaaaaggtcattgtgaactgagtatttcacatttcttattcatcttgtaagtcatgtgacttgcacagtgtatcttaactgataagtaacttgaatttatgatcaaaagacatatgaagacttttccatgggtgattgctaccatcaggtcaattctacagctgaaactgtgaaggcattcttggatatattcagcaatactgaatgctttcaaaaataattttctatacaaaatctactctaaaagcctacttttaacctaaaaagcagaggaacaagcagtttcatcttgttttttccatcagttttcatgatggacactaggtggcactatggtaattttttaaaaattctgcctatacactatattttttgctatataatctgtatttctgtttggaatttaatttctcctatataacagtttctatatagtactgtcagtgtttggaatcttaaaattcatggtgtcaatatataaatagaacagatattagcagtgtactttttgaaatggttcattatcagtaatactaatttatgaaatctttccaggaactggtgaaacagaaggtgaaacgtcagttgacaaaacagcaaaaatcagctgtcagacgtcgattgcagaaaggagaagcaaatatatttaccaagcaacgtagggaaaacatgcaaaatatcaaatcaagtttggaagcagccagcttttggggagaataatatatttaggatcttggatatgtttaatatattttttaaagttactgtaattcctttttgagccctcatttgtcttttttgagccaaggctatcatatattaataaataaaccctctttcatctataaatttggtcattcagtatgtgtcttgcaaagaataattacctgccaaagcagtccatttttttcaaagtaatttgggtaactacagttacgtaactttattagagacatttgcatatttttaaaaatctaaataacatttttgttgttttctgtttgttgaggatgatatgctacaatgcacataaagcaattagaacaatgtttagcacattcttaagcattcaataaaacatggctattagaatcataatgattctgaaattctgctgacaatttggttgcattttatttggcaactggaggacttcactgtcttatttttctttagaagtaaagataagcctttggaagtaaagataagccagtgatgcacaatttgcttaattaattgattaataatctgttttgtgccacttacattggtaatgtggtcatgagaatggaaacttacttgagatagtctaccacaatttttacagttggcagcttgtaagcaggcctgagtagcagaagagttaggggttggggaaggtggagtagaatgaggaatgaaatgttctttctcatatgcttattatataagtgggtccggaacatgttctcacctcaaggttaacaaatacctaatgcaggaaagaaaatacatagccatggtcccttcctcaaggactttataattcagtgagatgtaaagatgagtgcttaagtgtatgcacctgattattgtctcttcattgccgcataagtcggaaaaggggatcacttgcagcgaaaaatggccactagatggcaatatcaccccatagtcaccaaacaggattacttgcatccctaattatgttctaccagagggaatatagtacagacttttccaagattgataaagacagcagattccctttcacctttgccaaattaactctactagctatttgcaagacctgtaattatctaataaattggcttaaatatatagaagctagaaaatgccaattcctcttccctcaaaagttacctgacattcaaatatttaaatacccttgctttgcattttagatatatctttgaattcaggtattcattttgtataatctctcaacttttaagcatttttataatgtaaagttgaaaacagcttaatagaaccacagaatgtttattttggagtcattttcttatattcagagctatgaaagcaaattgggaataaagccttatcctgctcagctttacctagttgactcagttgacttttgagtatctactacataaaaagcccattactattaagaaactcaagacaaacatgatttttacctttaatagcctaagatttcttgtgggccaaggaattaattattccaatcagaaatggaggccttacctcatttgggcaaagattagtgctagttattgaagatttactaataaatgatctgttaaggaatttagttttttttggatatgttgttttggttgttgaaaactaaggtataattataatagttattttttgaagatatgtttggctagccatcaattagaagttagagagtttgtcctaacagataagctataaccctcacattttaaaacatgcatagtgaacaatgaacaaaaacaaattcaaaattttactaatgtaaagctgtatattgtgattgttaaaacacttttttttgcctaggagttccagatttaaatcctggttctacacttcccaaacctcaggtaccttctgtggcctctctaacctcaatttttttacttgtaaaatggggacatttaatagtatacctcagtgtcgtgaagactaaatgaagtaccacttgtaaagagtttattacagtgcctgacatatactgtatggttagtactgctaaaatgacttcttaaggttaccaaaaggaaaattccacaagctgaccacctttcctattgtgatggtcactggtatttcagctatgatcctttgttgtgtatttatccagactgaaagatgtttttctagtaaccatcttgcatcgtcttagtctccccattaaataaacttttcctacaaacta

SEQ ID NO: 8000 - DNA, 144 bp, Homo sapiens
ctggctaatttttgtatttttagtagagacaaggtttcaccatgttggccaggctggtctcgaactcctgacctcaggtgatccgcccacctcagcctcccaaagtgctgggatttcaggcgtgagccactgcgcccagccatt

SEQ ID NO: 8001 - DNA, 244 bp, Homo sapiens
gttaatatcgtccgagtttttatacattgcatatattgaaactgtgaggccatgtgaaaaacattagtctctaggttgcagattttcctaccctagtggagctgactataatgagtactgtctgtttccattatatcttctgtttgtgaaggtggaaagagtctcaaaaatttagatagggagagacagatttatatagttcagtgaaagaagaggagaggattattagaaaagggaagatgaa

SEQ ID NO: 8002 - DNA, 6834 bp, Homo sapiens
tgcgggagactcacgttgccggcgaagtgggagagagaaaagtggtaacctggggctgggggccggcgcggcggagctcggagtagtagagcggagtgaagacacgggggaggatagagactggcattcctttgggccgggggattggcgggagtcgtgctgggtgctctcgccgtgttgaggtcccagtgaggggaaggagaagcggaagagggtctctagtcggggcctagggcaaagggactacaaaaaggatgcagatgactatagaaatgaggacgacgaggagatgctgtggaggagcagtagaggtgagaagatgatgcaaagaaactgtgtcagtgaggaactgtatagagggtcatagaggtgaggtggcggagagaaactaactaacggaccatagaggtgggggagccattgtagaaggacgtggacgcgaaagggtcgtgtagatgggcatatgtgtgaagcagcaacgtagaggggctgaagaggagaaattcatggagagaaagaatgcacctagagtgagctctgcagagtgctgcgtgggatatccctagagtttggtctagtgaaggcacgctaaccaggcacctaaggcatttcaagtagtgacttcccacatttggctaggaatgtgggtcctcctccgaagtgggtaccccctccgtatcttgttacccctgcgtggggagtggatgggtcggaggggcctgccccgaaacttggccccaggccctcctcgcagacgttacaggaaggagactctccaagccttggatatgccagtgttgcctgtaactgcaactgaaatccgccagtatttgcgggggcatgggatccccttccaggatggtcacagttgcctgcgggcactgagcccctttgcagagtcttcacagctcaaaggccagactggtgttaccacttccttcagcctcttcattgacaagaccacaggccactttctctgcatgaccagcctagcagaagggagctgggaagacttccaggccagcgtggaggggcgaggggatggggccagggaggggtttctgcttagcaaggcaccagaatttgaggacagcgaggaggtccggaggatctggaaccgagcaatacctctctgggagctgcctgatcaggaggaggttcagctggctgatacaatgtttggccttaccaaggttacagatgacacactcaagcgtttcagtgtgcgatatctgcgacctgctcgcagtcttgtcttcccttggttctcccctgggggctcaggattacgaggcctgaagctcctagaggctaaatgccagggggatggagtgagctacgaggaaaccactattccccgacccagcgcctaccacaatctgtttggattaccactgattagtcgtcgagatgctgaggtggtactgacgagtcgtgagcttgacagcctggccttgaaccagtccacggggctgcctacccttactctaccccgaggaacgacctgcttaccccctgccttactcccttacctggaacagttccggcggattgtattctggttgggggatgaccttcggtcctgggaagccgccaagttgtttgcacgaaaactgaaccccaaacgatgcttcttggtgcgaccaggagaccagcaaccccgtcccctggaggccctgaacggaggcttcaatctttctcgtattcttcgtaccgccctgcctgcctggcacaagtccatcgtatctttccggcagcttcgggaggaggtgctaggagaactgtcaaatgtggagcaagcagctggcctccgctggagccgctttccagacctcaatcgtatcttgaagggacatcgaaagggcgagctgacggtcttcacaggtaaccctttgagaaatcactacttagagtaaaggggcagaagatcaggtgacaaaagcaagtgggtttgggccatgacaatgttgaaaagaaggttggccctttccccccagttttaaagccctgacctatgtcttggtttcaagggtaggacttcctcctcacccaggtctgttccaccccactgcagggccaacaggcagtggaaagacgacattcatcagtgagtatgccctggatttgtgttcccagggggtgaacacactgtggggtagcttcgagatcagcaatgtgagactagcccgggtcatgctgacacagtttgccgaggggcggctggaagatcaactggacaaatatgatcactgggctgaccgctttgaggacctgcccctctatttcatgactttccatggacagcaaagcatcaggtgagactcccagattccagccaccttgctttcccagacatatcccagcactcaggaacctttggttccttttccagctccagtaggaactcccccatctccttaggtttggagtttttcaaagaatgagagggcagggctggacacactggctcacgcctgtaatcccagcactttgggaggctgaggtgggaggatcacttgagcccagggatttgagaccaacctgggcaatatagggagaccacccctctctataaaaaaatttttaaaaattaggctgggcatggtgatggcatatgcctgtggtcccagctactcaagaagctaaagtaagaggatcgcttgagcctagtaggttggggctgcagtgagctgtgatcacaccactgcactccagcctgggctacagagcaagaccttgtctcaaataatagtaataataatagaagggcagaggaggcagccaagagagttttcaggatgctagttcttctgcctggggtggtctagagacaacttgtcaaattccttgcctttcctcttcccaggactgtaatagatacaatgcaacatgcagtctacgtctatgacatttgtcatgtgatcatcgacaacctgcagttcatgatgggtcacgagcagctgtccacagacaggtgacggtgacatcctctcttgtctagcttgagcccgcttggacatacaacacacacttctcaggcagctggcctctaggcacacatgctgtgctctcctattttctgagatgtgtgcaggcacgtaccacccccatgtgtatcatatggaggtgtggggtatggcagcaggatgtatggacagggatctgagtgtgagtccttgggtagagggaggtagagtgggttgtggtagtttgtggggagatgtgaatggatcaagagtatgtgtatgttcttgtccttctgtgtctgataagctctttgtgttgttgggatggcgtaggatcgcagctcaagactacatcatcggggtctttcggaagtttgcaacagacaataactgccatgtgacactggtcattcacccccggaaagaggatgatgacaaggaactgcagacagcgtccatttttggctcagccaaagtgagtggcctttagcggagctcaagctttggaaaatagagtgggtaggtgtgaccagggacagccctcattcagccttaatcgtcttgactgtccatccgaacaggcaggaggcaatgcctctggggccatgacatgaggaatatatgtgctggaaatacaaaggctgatagttggttcttatgctcttcttgtcccccaggagctcacatcctctcctggggaaacagtaagacagtgattgcaattcagtatgataagagtatgataggcagcacaagtatttggagagcaaagagaaaagatgtctgagtcagcccgggacatctgggagacttccagaggaggtgacaacaaaggttgggttgaggtttggtagacaatgggtattagacaatcagataaatgtgagggccttctgggcatcaggaccagcccaatcctggagcttctagtgttacactgaatgcctattacatacgaggcctgggctgggcctagggaattcagagcaaggagcacaaatcatgtgccatgatggaacaaacatggagctgggaaagagagtaatgcagaagtggaaaaatggcagggtacagtggatcacacctgtaatctcaacactttgggaggctgaggcaggaggattgctggggcccaggagtttggcaatctgagcaatgtagtgagaccctgtctctacaaaaatatttgaaaattggccaggcgtggtggctcacgcttataatcccagcactttgggaggccaaggcgggtggatcacgaggtcaggagatcgagactatcttgctaacatggtgaaaccctgtctctactaaaaatacaaaaaaaaaaaaaaattagccgggcgtggtggcaggcacctgtagtcccagctacttgggaggctgaggcagaatggcgtgaacccgggaggcggagcttgcagtgagcggagatcgcgccactgcactccatcctgggtgacagagtgagactccgtctcaaaaaatatatatatataatatatatatatttaaaaattagctgggcatggtagcatgcacctttggtcccagctactcaggaggctgaggtgggaggattgcttgagcctgggaggttgagactgcagtgagccgtgctcacaccactgcactccactccaacctgggcagcagagtgagaccctatcttttttttttttttttttttttttttgagacggagtctcgctttgtcacccaggctggagtgcagtggcgcgatctcggctcactgcaagctccacctcccaggttcaagtgattctcctgcctcagcctcccaagtagctgggactacaggcatgtgccaccacacccgcctaattttttgtatttttttagtagatacggagtttcaccgtgttagccaggatggtctcaatctcctgacctcatgatccgtccgcctcggcctcccaaagtgctgggattacaggcgtgagccaccgtgcccagctgagaccctgtctttaaaaaaaaaaaaaaaaaaaaaaaaagaatggtctccttcatgagatgtgacatttagactgagacctaaaagagaagaagctgaggttgagtggggtggcccgctgtggagaaggagagggaacagcacaggcagcgtctgaaacagtagcaagcttgtcagggaactgaaagatttgagtggccccagcatcgtggtcagtagttcaaagagctttggtcatggggggaagtacttttccctctcccattctttctctttttttttttcttttttgagacggagtctcgctctgttgcccaggctggagtgcagtggcacaatcttggctcactgcaacctccgcctcccggattcaagcgattctcctgcctcagcctcccaagaagctgggactataggtgcatgccaccatgcccagctaattttttgtatttttagtagagatggggtttcaccgtgttagccaggatggtcttgatttcctgacatcgtgatccactcgactcggcctcccaaagttctgggattacaggcgtgagccattgtacccagcccctctccccattcttatcactcctccctgccctgtcagcccccctttctgctttgctcatgtcctcttactcctgctttcctccttctgccccctgttccccaggcaagccaggaagcagacaatgttctgatcctgcaggacaggaagctggtaaccgggccagggaaacggtatctgcaggtgtccaagaaccgctttgatggagatgtaggtgtcttcccgcttgagttcaacaagaactccctcaccttctccattccaccaaagaacaaggcccggctcaagaagatcaaggatgacactggaccagtggccaaaaagccctcttctggcaaaaagggggctacgacacagaactctgagatttgctcaggccaggcccccactcccgaccagccagacacctccaagcgttcaaagtgaaggccgtgcagagctggtcactgaaatgagcctgataggataggctggagcataaaactctgcaagggctcctctatcctgtggtcctgagctgtgtgcccttctcagtctgaggggcctaacctagagcaggtttccatagtgagaaaattcaatgtagcagactactgagaaactactgtgttgctcaggctttgtttgaggtcctgtatatacagcactgaaaagagagataaagtccctgcctgcatgcattctggcggaagagacaagcaagcaatgaacaaattagcagaaaacctagttttagtgaaaaatgctgtaaagaaaatagaaatgcgatagagtgctggcaggctagtgtagataagtggtctgaaaaggtgtctctgagccgagggcatgtgagctggggcctaaacaactagaaggagagagccacgtgaacatccggcgaaggggacccaggcagagagaaaaggaaatccaagccctgaggtaggaatgagcaggtcagattcaaggcagtgaggtcaggccgcatgaacctggaggggaatcggggacttcatgcgaaactccagcctaggctttcaaagtcaaagggtgatacagtgggtaccaagctcctctgctccccactttgtagagcctagcatgaggtggcatgtactagaattggatcctaggtgcttagccctgcaatatcagggcctcactggtgggagctgcctcgggctgggttgcttggtcatagagccatagaaggaagctgtcagcccggagtgcctgccacctagacactgatgccattgtgtgctgcctcaagactgctggagtcaggacattttatagagccttttccagttttactaaaaaatttttccattgcc

SEQ ID NO: 8003 - DNA, 458 bp, Homo sapiens
ggtactcatcactgggccacatgagcccagtgccctgcctgactggccattcctctgtgatgtgagccactcacctctcaagtggacttagactcaacatattctgtccacccccatccatctccctcctgtaccctctccgtgtttctcatatgctaatgcgtgccagaactcctggggacttgtgaaaaatgcagaaactaggccccattctccccccatcctccaccacgtacatttctcattctggatttgaggacgggtacagtaatcctcatttttaacaagccgtggaggagactgtaaaataggtgacccagagggactgtcagaagtattcctaaatgatgacaccttctcatctctcgtcctctgatatcccaaagtcccagtttccctttggatttgcctgaaagagtcgtgagaatgcaatatgttctgagggggctggggagaat

SEQ ID NO: 8004 - DNA, 6998 bp, Homo sapiens
ttaggcctcttgcagggtgctgagagcagatcccatagttggggtctaactctctgctctttccataccagctgatggctggatccacaaggccgtagtcctgggctctgggatgcacattattgaagagacacaagtgttcagggagtcccagtctgtggaaaatctagtcatctctctattgcaggtagcccttctctgtgacccttaatatagccttgctgaaataggaagagggagtggggaggttgggcagaggctgtgtatctgtatgagtggggacgctgccgaccaactgtcctatctggctcccagcacagcctctatgtgggggctcctagcggagtcatccagctaccactctccagctgctcccgctaccgatcctgctatgactgcatcttggcccgagacccctactgtggctgggaccctggcacccatgcctgcgcagcagccaccaccatagccaacaggtcccagggaagcaggtgggaagtggtggggggtgacagtcacatgtggtctgagtggaggaggaaggcctgatagctactgggggagtgcaggggctagttattagtaacagacctatctaccctttcactgggaaactgaaacccagttccccttgttcataaaacctgatcttctgtcccaggacagcactgatacaggacatagagagaggaaatcgaggctgtgagagcagcagggatacaggtaagtgactcatatgagtgtgggtctagctacgcagactgtcctctttgccatttactgccatgtgtacgtatatgtttgtatctgagtggctgtggctatgtacatttggtaaggatgactcaaacacagagcctggcacagagtaagtgctcaacaaacatttactgcccaaatgaattataaactaggaaacatatttaagatgtgaagtgtcttgtcacttctggagcttatagccaagtagtggatgacaagggttcaggacggtaatgggtatttccccaaggaagatcggatgactgaactgatatctgaagaaagaacaaaagttaatcatcacagctaagatgtattaagtatttactgtgtgccagacactgatctaaatacttctatgcatgatgtcatctactgtcacagcattcttatgagaaaggtgccattattattatccccatgagggacctctctgaagcccagggagtgtaagtaaattgctcaaacttattcagctattaagaaactggaccagaattcaaacctggctgagtacagtggctcacgcctgtaatcccagcacttcgggaggctgaggtaggtggattgcttgagctcaggaattggagaccagcctgggcaacatggcaaaaccccatctctacaaaaaatacaaaaattagccgggtgtggtggcacatgtctgtaatcccagctacttggaaagctgaggtgggaggatcacttgagcctgggaggcagaggttgcagtgagccaagatcacaccattgcactccagcctggataacagagtgagacctcatctcatctcaaaaaaaaaaaaaaagaaagaaaaaagaattcaaacctgaccccaagcagtctgatttgactttgtgcttctggtcactatactatgctatctcccacaagttagccaggcaagcagaggacatggggtaatggggtgacatgcaagcagagggagcagcaggcagagggaggctggcacatttgagtgacaggagaataggctggacaagtgggcaaaggccatgttgaagattttggtctttatccgaaaagcaataggaaacctctgaagagttttaggctggagagtggcatgatcagatttgtgtttttaaaatacctctcatgaagaatggattacatggggccagagtgggccaggagtcatggaaggagagaaatcaacaggtctaagatagatgccagaaacagaatcttagtgacagttagatacaaacgtgaagaagggccgggcacggtggctcatgcctataatccagcactttgggaggccaaggcgagtggatcacttgaggtcaggagttcgagacaagcctggccaacatggtgaaaccctgtctctactaaaaatacaaaaactagctgggcatggtggcatatgcctgtaatcccagctactcaggagccagaggcaagataatcgcgtgaaccagggaggtggaggttgcagtgagctgagatcacgtcactgcactccagcctaggcgacagaatgagactccgtctcaaaaaaacaaaacaaaacaaaaaggcgagcaagaaagagaagggagactcccaggtttctgacttaagcaactgtgtggctggtggtgccattcacagtggtggcgattcaaggaaaggacttggtgtcgttggggagaaaagctttggttttgaggtgtccaagagacctcatgtggagatgcccagcacatggtagatatccgagtctggcactcaggagagaagtctgaggtagagattaggagttactggcagatggcagaaattgaaaccacaggagaggatgagagcatggagagagaatggaaaagggcccaaggcactgcctgcttcctgggaagggccaacgtgaaccttctgtggaagcatgagcacagagcctgggtcagctgtcactgtgattctgggttctgtgcttggtgccagggacttggcagtgaacagtctggcttgccatctctaatcccttcctgggacgggctggtactgacctctcccccaaaccccacagggccaccaccaccactgaagacccgctctgtgctccggggtgatgatgtcctcctgccctgtgaccagccatccaacctggcccgggccttgtggctactcaatgggagcatgggcctgagcgatgggcagggtggctaccgtgtgggcgtggacgggctgctggttacagatgcacagcctgagcacagtggcaactatggctgctatgccgaggaaaatggcctccgcaccctgctggcctcctatagtctcacagtccggccagccactcctgccccagctccaaaagcccctgccacacctggggcacagctggcacctgatgtgagactgctctatgtgctagccattgccgcgcttggtggcctctgcctcatcctggcctcctccctcctctatgtggcctgtctgcgggaaggcagacgagggcgccgacggaaatactcactgggtcgggccagccgggcaggaggatctgcggtgcaactgcagacagtctcaggccagtgtcctggagaggaagatgagggtgatgatgagggggctgggggcctggagggcagctgtctccagatcatccctggggagggagccccagccccaccacccccaccgcccccaccgccaccggctgagctgaccaatggcttggtggcactgcccagccggctgcggaggatgaatggcaatagctatgtgcttctgaggcagagcaacaatggagtaccagcagggccctgctccttcgccgaggaactcagccgcatcctggaaaaaaggaagcacacgcagctcgtggagcagctagatgagagctctgtctgagcccagcctcccagaacaaatgctcttccaagccagcctatctgtcccaggctgggccactgcctccctaacacagccaccctcccttcattacccccactccatacccttctcccaactttttgatgtccctgtagggctggccagtcaggcccagccaaagccccctcctcagtctccacagacccacatgtgagcagcccaggcccatcggtgctcctcagaggtaggtgctccctcaggatcaggtgccctgcagacccagagccagttcctatcccctaacctaaacacttataggtgaggactccatcctcctgttccattcatctgcccaaaccctttctctttctcccaggcagggctctgcaggtccatatgggctcaatgtcaccaccctctgcatggccctgtgtgctggatggtcctgaaaccagacaagacctctgccagccacctaagccctgcgtacattcacatgcacacatggaagaatgtttatcggctgggctgcagtgcccccaccctcaccttctcctggtgcattcttgtttcatccctgcttctggacttggggtaccctcccaattgccacatcctatctggtcctcttccccagccccatgtggtgacctctttgtcaagagcttgggaacgggccagcctggggaggtaagactgcatcactcccctcctctcccttcctgtgtggcccttgtgaatcagcctccccactctccttggtcattctcaagagtatgagagacagagctccaggcatgtcccatccccatgcacatgtggtaacacacacctgtatcacacatgtgcttacatttccactcacatgcacctctgagcctcccttgctgtcttggacctgtctgttgggtttagtccgtggacatttcagagggagatccccctcccatttaactgtcctcacaggcccttgcctaggatggatgaccaacactgcactcaatgagccagcctctcttttgggggaatcaagcatttgcttcctctagactacagcagggaaagggaggagaaatctgatgtctcaactggcacatgaagcccattcttggaactatgcaaagggcagaggctgggagtttggacgcttagctcctacccctgtcctacctcaccggggcactttcaggggccaggggcctctgaagtctctaggcctatatgggacaatcaattctgactgagctcccccattcccctcgggtgaggatgactgttatttttgtagctgagaacgtggaatcccacgggtttttactgcccttcacccaacctctcccacctccaccccacaatgaatgtatttattgtgagaatggctacacttctttaggaatgcccccacttacaaccaggtgggtggaacaggcatgtgacagagtggggagcctgggctcagctcctccccctgccgttggttaataaacaccctttttccccacagctatgactagtctgcttcatctagatgcgcccacccctgatcaccaggggacaggctcctgagcctatacagaaggtgatatctgcctccaggattggctctgctccccaatacaactatttgcagaggaaattgggatcctccgcttccatcctgactccttggcaggcacacaggcctctttagtaaggttcacactattcattgatcatggtgttagggcatgacaagaaaatgacaacagttcaagaattcttacaggggtttctagattttcatttcctgcctctcatttccccaccatcccccctttttaaactaagattagaaaatactcattaatatcagccttcctgcccttccccaaggttctcagcaccccccaccagctggctcaagggacatggattttatttctgcacaaagagggacgtggggggaaggagatgtatagctaagaccagagaaagcttgtcagccaggacttggtctgagaatcactcccctctccctttcaggggtcaggcctagattaatcacttggcctttgatactaaccacctgacagttgttatatgttctgcgtctagttttaaaataatgaaaactgaggcttgtgcttaacatatgcacacattttgaagacagacctgaaatgtgaccttggataagtttattaacctgttttataaatctgtattcacacagatataaagtgcctagcccatcacagcagagctctccgtagctcagtggttgttccaataagacatcagggattcttcagaagccagccttcagacctctcactgtgttttgagatcattattatcaatttggatttaaaaaacaagggccctgtaaaacccttgaagtcttcctcatctcaggttttagggatgccacttgcataaaaatgagtggttcacaaggtcactgcccccagaagcaggcactggaaagaaacaggcagctcttcattatcccaagcagaacctctgtcaacttgcccattgatgggttccatttgcctgggcttggaatcccaaaggggaagaaccacctttaccggagtaacagtccaaagcctggggctgcagttggtggggcaactcttcactgtgcttgcacctgggctggggcaggatcctgaacctctcgggggcgtagcccgcggaacgtggtcggcttgttggtgaaggggtgccactggccctggatgctagggttgtcggtgtggaagggcttgcggatgcggatcacgtccaagcccgactggtcggccagcttctgcaccagcgtcgagatctcctcgaccgacttgcagtggatgctctcctcgcgcacagccccgttaactggcagaagaggggtgagagtgggtggaagctggccggtgcgaccaagcgagaaggaggatagcgggtcgagcccctgatcccgccctccagcccgagcccggccccactcacggtattcggccactactctgggcacgcagcacggacgcgagtttacatatattacgacccctggattccgtcgggcgaagtcgatcacctcccgctccacgaactccctaagcgacccgggacagtgagcagtatgacccctgactgggggcgacctacccggggagtcgttgccacctccacacccaccccgacccgcgcctgcgcacttcccttggctcacctggcgccgcgagacgaggcgccgtcgcggctgacgctgaagctcagacgctgcagctgctgcacatagcgacccagtccgttgtggagaacgctggccaagaagcggctcggagtcccgcgcgccgtcatagctacagcttggaggccgcggagcctaagcagcgaggagaggggggcgggactaaacctc

SEQ ID NO: 8005 - DNA, 305 bp, Homo sapiens
agctccctcagcctttgggggtaggtttgcataggcctcctccccgtagaagaggtggagtcaggatttgcacccatatagtctagctccagagtatgtgctctgacacataggctatccttcctgaaggagtcagtcaaagaaatcaggataaagagaaagactgatgagccagtaaacacactgattctctacccttccgagaagaggaaaaatcggaacctctttggccttttccaggttcttgtttctggccagattcatagctaacagccactggctgagtctccacagaattcctgggg

SEQ ID NO: 8006 - DNA, 12574 bp, Homo sapiens
ccaagttggcagcaggctgttgtggggtcaagaagcccaaattatctggaagtggaacgcacagtcacgggaatcagtccacaactgtccccggctctagttcaggacctcttcaaaaccaccagcatgtggacagcagcagtggacgggagaatgtgtcagacttaactctgggacctggaaactctcccatcacacgaatgaatcccgcatcgggagcgctgagccctcttccccggcctaatggaactgccaacaccactaagaatctggtggtgactgcagagatgtgctgctactgcttcgacgtactctactgtcacctctatggcttcccacagccacgacttcctagattcaccaatgacccctagtgagtaaatcatgtgctgggggcactgaggaaggcatggtgacatctttctggggtgattctcttgagagggtctgctacttggaagtctttattatcatttgaggaaagggtaatgggaagagaatgataagaaatgtccagagaatatttaaaacattcagtggattcagtaatggaagggagcagttcacatttggaggaggctgtaggcttgttgttaaagtaatgttctggaaatcaagtgagttcattcttggctcttctgttggttcacatggcagtgggtatggcatttaacctctcaagtggggaagtcacgccataccattggggacacccatagtgttgaagtccaggtgagttggaagtctgagggccaggctggagactaggagctctcattcactgggatctgcgatttggttaacaggggtcccctcactttgttcatgagaaatcccttggtaaacctgtagggccactcacatcccatcaagaagtcagaatctgcttcagtatttttagttcaagattctttgttgcttgtcccaagccctctactggtctcagtgacttaaataagcaatatgtataaagtaaactgaagaattccatgctagcattttcttcttcctcagaattggaagccgctctgagctggctttgaagagcattgctgtttttttatttttgttttgggggtatgcttttggagtgttcattgatatgagattattcattcctcagttgttgattgccatacggagactacaaaaccttggctggggcatggagagggtgtgaagaaaaggagcctcttcccttgggaggcctgtcaggttggcaaatcacacacgcacagagctaaggggaagttgttctctgtgagtgtgtcagaggagaggaaacctggagggaagtgtgctcggttttttgggaaccgtcaccctggggtaacatggttagaaaacacctgactgagcaggtggagatcccaagcctgagtgagatccagggtgccccacgtaagagagagatgcagtttggaagaacaggtgatgatgtgggtgtttagggaaggtttagactgttgtattcaaggctttgcatttccatcctgcaggcaatggaggccttgtcttgaaggatttttcagtaggctttggggctgcagctttggctggtgctgtgcaggtgctttattgggaggaaaagatggctagatgggacagctgctgtggggacctttgtgacagtgatcaaagcagataactttgaaaacttaagttgcctctagaaatgattaactcaatctaagaggtaaggacattagagtgtggagggatttcaggaagagggaacaggccttgaaacctcttgctaaaaaatctgtcactgtcaatctgatatagccttaatgaagtgtgactttggcctagaaacagaaaatggcaactcagctaataaaaaggttccttggctgggcgcggtggctcatgcctgtaatctgtaatctctcagcacttcgggaggctgaggtgggaggatcgcttgagcccaggagttcaagattagcctgggcaacatagtgaggcccccctctatttttttttaatctttttttttttttttctttttgagacagagtctcagtcttgtcgaggctggagtgcagtggcacaatctcggttcactgcaacctctgcctttcaggatcaagtgattctcccacctcagcctcccgagtagctgagattacaggagcctgccaccacgcccagccaatttttatatttctagtagaggcggggtttcgccatgatgaccaggctggtctagaactccttacctcaagtgatccgcccaccttggcctcccaaagtgctgggattacaggcatgagccactgcacccggcctttttaaatctttttttaaaaattaaaaaatgttttttgagggaacttttttttctgaaaatttgtgagtggaaatatttgtagttgtcaggggcagacatgatcatggaagcaacatgggtttgcagatgaacggggctgtgcaggtgaggcgtgtcatcatgaaagacggagcgggggagcatggctacctggataaatagacttagggaagaggaaactggagaattcgaaggaaaagttgagtcttgggcagagaaagaggaaagtagcatgtaaatttggcggcaaagtgaattaaagctgtcagcatggaacatgggaaccactacacggagcctttccttatgctgccttgtaggtttcccgtttccagccaggggctgtgccgttttcagaaaggcagagagtccttcgggtagctggcaagtccaaaaacagggatttttggcaataacagaaatgaatagggacaaagccaaaaggttttgttcttatccatgattaatttggggctggagaatgttttgtgttttgctttttttagtccgctctttgtgacgtggaagacagggcgggacaagcggcttcgtggctgcattgggaccttctcagccatgaatcttcattcaggactcagggaatacacgttaaccaggtaatgacaccagacattaagaactgtagataaattggctagaatcagaaatagctgcctgactttatttcttctaagtgatgtacgttgagctttctctttttggtaatcaggaaatgtaaggggcttaatctggtgagtcagttatcagttcaagtacagacagttaatagcatcgagttgtttttaacatgttagtgttgatgaacaatagatactctctgcatagctcaagattcataaatatgtgggctctatggcacctgatattggctcctgactccagagcagccttacctatgttttctgtccccctccagtgcacttaaggacagccgatttccccccctgacccgagaggagctgcctaaacttttctgctctgtctccctccttactaactttgaggatgccagtgattacctggactgggaggtgagaacagccgcatttggaactctgcatctctcgttgcatttgggttcgggttagtacatggcaatgtatctccttcattgagagaaagggtataagaatgtgaaggctgagtttggaaccaattgtgggcaacataggtgacagaagaggtgctgctataccaggagtaggcagaagtgtcagtggaaaggctcgcttctcctgattctccctagtctgcttggtttacatccttctcccatgtctaataagagataatggggtaaaagaaaatattccagatccttcttggcaagccctggagtaaaagtttttgtttgcttgtttttttttttgagatggaatttcgttcttgttccccaggctggagtgcagtgacgtgatctcggcttactgcaacctctgcctcccgagttcaagggattctcctgcctcagtgtcccaagtagctgggattacaggtgcccaccaccatgcccagctattttttttttttttgagacagagtctcgctctgtcgccaggctggagtgcagtggtgcaatctcagctcactgcaacctccacccctgggttcaagtgattcttctgcctcagcttcctgagtagctgggactacagtcgcgtgccaccacacccagctaatttttgtatttttagtagagatggggtttcaccgtgttagccaggatggtctcaatctcttgacctcgtgatccacctgccttggactcccaaagtgctgggattataggcgtgagccaccatgcccagccatttgtatttttttagtagagacagggtttcaccatgttggccagcctggtctcaaactcctgacggccttggcctcccaaattgttgggattacaggcatgagccaccgcgcctggccaaataaaagtttttattaggaatcagatgtgaaggatcatgaccccagataaaaaccttgtggcatgtttatttaatggaatagggtcaaggaacatattcacaattcctggatgaattacttaaagaatgcatttctcctaccttcatattctcagagttggctgcacatactctcgacccttccctaaaagcagaactttctttggcctctatacctcctgagatagaattagtcatgaaatgcgagaaggtctcccttttccaggcctgtgttaagctggtcagggaacaatgttgatttatatgtggggactgaagttccattagagtaagtaaatgccatttacttggttgtacttttttctataggtaggggtccatgggattcgaattgaattcattaatgaaaaaggtgtcaaacgcacagccacatatttacctgaggttgctaaggaacaaggtgagttggatgaatgggattttaatgacaagtatcattcacagtggtgccagttaaagggcaagaaagtgaagtgtgtcatcttgcagcccaactgcagctgagaatgagggcctttctgcctcttaatacctgtcaaattcctatagaaccaagggtaaacttccaaaaaggtttaggagctgggaaaagcaaaagggtaaatcgttcacttactcgcctgatatttcaaacacttcttttcaatgaatagttttatttcttagccccttaaactacagtggcaattgtagcaaaataccaccaatcaacctgaccatattgtagaattcagtaggtaccgaactttggatcacaaatcattaaacaatattatacatggcaaagggtgtaaacatagtccctactgttttttaaagaactcagtagtcggccaggcgtggtggcttactcctataatcccagcattttgggaggccaaggtgggcggatcacaaggtcaagagattgagaccatcctggccagcatggtgaaaccccgtctctactaaaaatataaaaattagctgggcatggtggtgcatgcctgtagacccagctactcaggaggctgaggcaggagaatcacttgaacccaggaggcagaggttgcagtgagccaagatcgtgccattacactccagcctggtgacagagcgagcctccatctccaaaaaaaaaaaaactcagtagcctataagttcttctgatggggacgttaaaggtagggtggatcgagcagattttgtctttaaaagaatatctagaagggtacctttacatgttgcttgtgcattctgtgatacgtagtgcagttttccttctttcttggaattagtctgattttgaaaataatatgtgaaacacagtatttgttgggtatgagcctagaatagagaaaaaatacccggtgaagtgtatatcatgagcaaacatggaaaacgattgcctggttggtttttattttgcttgtgcttaaactttttcaagagcagtgtatatgtggcataatagcaaaccttttagccacctcttttaggtcataaacctaacacactctgtacaaggaggcataccatgttttgtaatggggaggtgtaaataataacttaagtaaataattaaattacttttgccatttgaaagttggttggaaaaataaaaacttcggagcacctagcatagtaatttaggggattttctttggtttttcaatttgatgaagttggttttatctgttaagaatgaggctgggcacgtttgctcacatctgtgatcccagcactttgggagggcaaggtaggtggatactggagcccaggagttcaagactagtctggtggcgaaacctcgtctctacaaaaaatacaaattcagctgggtgtggtggcacacacctgacagtcaacagctagttgggtggctgaggtgggaggatcacatgagcctgggaggtggaggttgcagtgagccaatattgcgccactgcgcttcagcctgggtgacaggagtgagaacctgtctcaaaaaaaagaatgtgcaagaataacaatagtatatgcatgagcaacttgtctgcccttcctgaaggaacagctccttccttccttccttcctttccttcctcttcctcttcctcttcctgtctttccctttttatttcttccttaagacagggtctcctcctgtcacccaggctggagtgcggtggtgtgatcctggctcactgcagtcttgacctcctgggctcagatgattctcccacctcagcctcctgagtagctgggactacaggcgcatcccacacgctcacttaatttttgcgttcttagtagggatgaggtttaaccatattgcctaggctgtccttgaactcatgggctcaagtgatcctcctgcctcagcctcccaaagtgctgggattacaggtgtgagccaccacacccagccagcttctttctcactgtcaattttttaccatagaaaacaggactccaaaaatcatcagattgaaggaagatcacacaaaggaatataagttgcagaatttaaattcctctcttcccacagagcagccttgggtaccagcactaggccaataggctggtctaagttggaaccatgtttgttcctagataattatactggggtaacatctgacaggaaggacgcaggagcagggagcctggggacagccattatggcatgtgtcgggctatcatctcatgtctcagagtctccacgggactggcagacagactgggcgccaggtacgtgggggtcagtgcccagggcttcctctgccttagcagactcggctgcttctcgagtcccatttctcttcttgcacgggccatgtgagagcatgccttactcttgcatgtgcattgacctcagtgtggcctttctcctccccagactgggatcagatccagacaatagactccttgctcaggaaaggtggctttaaagctccaattaccagtgaattcagaaaaacgatcaaactcaccaggtaagccattgtcttgttttccttatcatttcaatttagttggggttgaatggaggataattttgatgggatggagaagaagtgttctctgtgaatgtccctaaatcaaagaagtgtgggtgaagttcacattttgaggaagcagtggcagcaaaggcagagactctcccagcatcctgtgtgtctccatagctgagctgggggcacagttggagcagggcaggtctgccctgcaggctgtggatggctttgccagacccacgtggttgggaggctgagggggagactgagattaggagacaaggctctctggaagtccagagtcagttgaggtgctgctttctgactgcacatgtagtcagacggcaggagatacaggagagtaagaaaatgcttttacaaaaagttaaaaggaaatgcctctcatttgtggggaatacttctaggaggaggctgcctagtgtagtagaatgcagatggacttggagttggaatcccagctcaacatgtactagctgtgtgacctgagccagttattctgcctctctgagcctgttccctgtctgtaagatgtgaatgataataccttagagttgtttgaggctgtgctaaggtaatgtatggaaaatttctagcctgtggccagtcaacattgtaggtgatcaggagatgttagttctcttctcatccctattgaaatcagaaacactgagaggtttagcttctatgggcttttgtgggcctcttttgggcccctcatctgtaaaatgctgaataatcatatactaatctcacaggtctgtttggaagatgacccagtgttttttaaatgctttggattccaaaaatttttaaaaaacaacaaaaaactcttcaaatacaaagcattattattattattataatttatttgaacagccatttccctgtcaaaattcaggaataatcaccttgcagtggaggagtgattacagtgggaaagagatggctctgggtaaggattgtcacacccagctcctgtggtctgtagtaggctccataggtttgtaacaccccatgcttcgcatcctgactcatggctctttccagagcacagccaaagtgctatgaattctgttctgacgaccctgtgatatggcatattcatctggggagtgagacctatatagccccaaggatcctttaacctgcttcagcagactttgacccagaattaggtatctgtgtcccttttagttataataacttgtttgttgctcttacgcgaattgaggttgcatttctgtcaaatgtatcacatttactctggaagtagatgtgcagtttgcactgggttttggtgcagccatcttccaatctgccacccgagtaatttgaccttgaaattcttcatccagaccccagtagcggattgcttacgagcagcctgatgataagcacgtgtagtgtttcaaggtgggatgtgctgaaacacattctcgggggaattgtgattgtgctttttcatcttgttcatttgtaataacaacattgttttcttgtgctgtctttcattttctgtaagtaagattgctcttggtcttccattttattctttcaaaatgtggaataagcttttggtttttctctgctgagtgactttacaaaatgaagcgtttggggttcctaataccctttcctgtttcctcatacaggtaccgaagtgagaaggtgacaatcagttacgcagagtatattgcttcccgacagcactgtttccagaacggcactcttcatgccccgcccctctacaatcattactcctgacacacggctgcatgaccagtcccacccccccgtggccaccaatggctatgacatcattggagcagatgcctcctcttcctggtccagttacttctattactgcaccattttatgatgctagcttccgttgccaagtctgcctcccgctgactgagggagggtagggttaccttgaacgaaacagaacttgaggggcccaagccttatctcagcctttcctcaatatggggttccgttggattggggctcctccatgactagtgggaattactgtgggttcagaagacccttgtctggtatttgccacatggggtattggccacacgctggaagctgaaattgatgatccctgaaggttgaacccacacacacccctgcagcctccccagatgaagtaggtgtattcccctggcagtctgggcaacggagaccaagaaacatttttaggttgttttaaattcctttttttaaacttccagtttattgcgtaccaagagttgattacaacctccatgcttcataagcggacgccacgttagggttggacgtgggcaccacgagtcctttgaggctcctggacagagacccacatcaagatcggaagccctttgggtggcgttgcagatctcattgctcagtaggccgtgaagattttcatcctcatcccactctcagttggattttctggcactcttcctgcattgagtctcctgattactgaacagagctccgtcatgtagcctgctgaggaatggaatggaatggagatgcccacaggaggtcctgatgtcatcactgcacgcaggtgtgagaggagagacctcttctgcaccgcctggctacctcactcctctgctggtagcagtgcctatagctggacctaagttctcagaagcgtagatgtgcaaacaagcgattgagttgggctttaggaggacacatcataggagagaatccagggtctgtaagctggttttcttttcaggtgacatcctgaggggcctgtaagcaggggagctcctttttctagtttgcctgtagaggtgggaagactgttggtgtttctgtcctttacaggacattaggaaacagttgtgtaattacacaaggtggacctttatcttgcctgacatgctgggaatcttcaccccaccagggcaaatttccaaatagctcattttattctaggtctttcaaactttcatgtgacatatttccctttcccattgttgctgatttccaaatcgctgtcagcaattttttcctctctccttgcctattcttcactcatttggtggcaaagttcatagaactaggggacttggaagatgctttgaaaatattgttacaaaggcactgctaaaatgattcacagggagagtggccagttggaagaaggatcctaaggatgtgacactggttttcaacaacatgcttagagaactcatgaagtggattgggtgtcaacccagtgaacatgtttttatttaatttattttttgaagtttatgtggtgatggtgtggctttccgaaatgggcaaatattcagaagatcttttgcattttcttctgtcaggaatggggaaggggagtgggggcacaatctgagaaaggacacctgtgctgttctaggcatcgctggcaagtttgtgggaagggatgggcaagggtgagtgggtttgctccacaccgtcctgtgctgctcgagaggacctgggacgtgcgagggaaacgtgggtgacggtgcctaggctgcggcccttcactgctgtgctgggttcctgcagcctgctacgtttcccttggcaatgtaaatgaagatggaggggtcgtttcgtgatttcctgctgctgagaataaatgtcttgttaaaaacgtggcaacggttactcttaggtgccatggatcgatgtcagggtggtcagctctggactaagccacccacctccaatttgtacaacagtattgatacatagggctacactcattactgttcaagtgttctatgttaagagttgtgtttaatttctaaagattaaaaaaagcaaaaaaattggtgctaaaccttcacccctgagcacgctcagtgagactggtcatgcaagcatttacagtgccatgctcctcaagccgattttttcttgtagaaatgttgccctatttgtcttctccaatgtatggtatgttattttattttattattttattttattttattttattttatcgagggggggtacgatacctgccatttaagaaaatgaatagaaaattttaaaacccgagaaatggggaaaaaaaaatcagtgcacaagaattgggctggttaggcccagcaccacactgaagtgggctcagtggtttttggagtgaagaagccttactccctgcacattccctcatgctcccacacaagtccagcaatggaaatgcttgggttcctcttgctttgtcaggggactcaggagtcgaccaagggaaaccatttggccccgtgaggaatgggcattgtcagtatccgtcctgaacggggcctagtcaggaagcggtctagaagtgtacggtcacggtcgcctcatgaaagtgtgtagcaggtggctctcaggaaaaataccaagtctggatcatccatgtggcagctttgcatagggagaggatagctccgaactggaactgaactgccttctctgcacgcttgaccaaagcagtgatgagggcggcccagtacctgcggtgtgcgtggtaggtttaaagaaaagggaatgttttctgctgagtgtttcctttgtccttgggctgctcgagctggacagtaggtaaccactgttttcaaggaccagcccaatttctctggcttggttcggagttcgtttcatccctagctgtgagtgccttttggtctggaaagttggcttgtctcataatacccacagctaggacattctctctgtaattatgaattgtccttgttttacattaaaagagaatgtctttgatcactagagtctgtcggtgttggattatttccactgtgagattcttaaaacttttttgcttcataataataaaacaactcatgttagagaccctttcaacatgaaaggtttgtagttgagacattacatatattttattgtttataataaaaatcatctatacaaaagaagtcctgggtgttaatattttgcacaagatctgttttccatgatgtgttgacatctacaatttcactaactgttgacgttattttctattgagattctggagcctagggagctatgtgttctttttgttcatttcgttcttacttccctgaagcaagagactatatggccttcagtgcaaagacttcagaccaattctttgtattacacttggttgcctcttggctatataacttctgagtgcaaatcattgaacactttaacgaagtattgtagagaataaatcataatggataaaaatc

SEQ ID NO: 8007 - DNA, 227 bp, Homo sapiens
gaagaatataagccagttccagagctcttagctctaagtagcttcatgggctgccagccaacctggaaatgagctactcttgggtcaggtgcccatcctgctctaaacagtgtcactcctacctgaaacatcatttagctttcctgggcatgggacctctggtacagcaatgcaagcagtagtgggatatttctattctcgtcccactacaatttatttttcacaga

SEQ ID NO: 8008 - DNA, 2328 bp, Homo sapiens
agctgtgagtggcgctcacatccgccgctgccctgtcgaatgggggaaagagttcttgtgttctgaggagggtttggctatggtccttgaccctattcttgtctcagacttgcctcccaggtatcgaggtctccctgtgggtttcatatggcttggtcctttaggagctggaaaaattaggcataaagtccccccacccccttgacagaacgccccttctgactccagaggtcctttatcgagtgccaggcattggtctaggggcatttgaaaaagattcactgaaggacatttttaagagttcgctttctcagagggcagcttctcaaactcattcgctggtttcttttcctctttccgcctgtttaaggttagtgttccccaggtcctcttgccgtcttccttttcagagtttcctgagccatctcatccaggcccaacagctttgatcctgccgtgccccccataagaagtgacccctaagtgaatgtctctgcccacacttcccagcttgtggtccggcctgtggacacatccaggtggaattctgcaggcagctcaaactcagcagagcttggtagatagatgatcaacttgggctctggtgcaaatcacgtttagtaactggtcaaacaatcagtccctgaatctcattgtttctttttaaattgcaaaatggagataatggtacaacttagcttcgtaagagtgttgtgaggattaaacaaaatagtaaagtaaggtgattagcactatgcctgaaatcagtcgtcagtaaatgttaactatgtgatggtatccctcattaaaagtgtgatcccccatagaccgactcttccttctgggtttcatatctcagtggatgaccttccacccagttgcctgccagataacggaccaggacaccttaggtcgttgctgatcaggctcctgcttgctggctgatcaggctcctccatgccattccctcctatccaccctggttgggctgagtcaggtagagtccctactaggtgccaggcaagtgctacatccttcaactctcttttccaagccttgtgactcacacggaggagcagctcttactgctgccacagcatttacctaaagttttacttccgtaaaacagtaccaaggagggatagtgctaaaccattcatgagaactccatttccatgatccaatcacctcccaccaggcctctcctccaacaatggggattacatacagtttgacatgagatttgggcagggacacaaatccaaaccatatcagtcctgcactaccttcccttcaccatcaccctcaatttggtatttcctttcctttcccaggctactttctgtatggccattatcacatttgtcccgttgtattgtaattttttgtttacatcactgtctccctctttaagctttgagtttcttcaagatgggcccgttacttatttaatctaaggagcaatgagccctctttaaatgtttgttgcttacacaaatgattgccatttgtagggggaaatgaaggcaggaaaaccagacaaaattgcataggcaagaagctgtgaggatcagtgaagtaggataatggtcctggtgttagttgaatggggataagtttaaagaggagctgggcaactgatttgttttcagaagagagggagaggtcaaggataacacctggatttcttatttaaagtaatagataatggggccattgaccaagaaagcgactacagcaagtctgtaagaaagatagccttcagtcttgatgcatgagacttgaggtgcctatgataacatccaaacgtggtattccagtagatggttgaaaatatagatagggaattaagtggggcatctctcctagaaattttgacattggtatatgggcagcaattaagaccatgtttatgaatgagtgcgtggtgataggtgtgccaaatatttcctgttctcttacaggaatataggaggattgtatgccctggcctccctgtgatggggttgaactacatgacatgttctccgaattaagtgtgagcatagcatttaattgttgatgcaagaccttccagaactctttttctctttgccatggcaatcatcagtgttccagagagcatatgcacgatcagccttggtattggagggaagatgatgcggaacagagtcccagtcacatcatgaaggacatgtaaagtgagaagtaaaccttggttgttttaagccattgagatttgagttttgttaccagagcagatctttgtcatcctggataatgtgcctgagaagaagaggtttaaggaagaaaacttgtgaacaccaa

SEQ ID NO: 8009 - DNA, 412 bp, Homo sapiens
aacagccagtgatcctcagatggtgctggatctgggtcatcaattcttgcaagtggaatggcttctactcctaacactcccagcttctttctcaatgagaaagaaagcatgtgtatgtctgtttatggcgacttcaggtggggcctgtgcgtgtgccggggtgtctctgttggagagaggagaggaagctctgatgcctcgtccccagcttccctgggaaggtcgtgatatatatcaaatgccattcttggaaactccttgaaataaccagcatcttttggctgttacgtggggagagaaggaggaggttggaagtttatctttgacttctgcccacgatgtttagccttccttcccgacagctactgtcgccatctgccccacacctcctccccagctcatctgcttgggg

SEQ ID NO: 8010 - DNA, 559 bp, Homo sapiens
aaaaatgaacttttaaaagtgtacaggttatagatagcttgattaaaatttcactatgaacactgccatatcaagaactaaaactactgcagatacgattttattatgaaaaaatcaagggacaagatgaatgttaagcaaatgtataacttctagcttctgcctggcaaattgaagggaaaatgcagttcacagcaaagtttcgaaaaagcatgtacccaatagaaagttggataaaagacacaatacttaaacatatgaaaagatgtttaacctcattcgtagttagagaaatgcaaattaaaactgtattgagatacttttcacttaaattggtaaaaattaaaaagtaagacagcacattcttttggaagggctgtgagaaacaggcaatcttatacataaggcaaactggggatatttagcaatatctaaagaaactgtatgtacattttctatttgtgccagtaattccacctctagagatttaccttaaaaataagaaaatacttagcacaaagtgactctttgcagtattcattgtaactgagaaatgttg

SEQ ID NO: 8011 - DNA, 6442 bp, Homo sapiens
gataatctgcttgaggatgactttattcttcaggccaataaggcaacaggagaggaagagggaatggatatacagtatgtgtggtttgtttcaaagcagagatgatgacctaagtgttactgcttcagtgggatggtaaccatagaacgttacagttggaagagaccttcaagagcatttaatctgagacttctgtattttagagcagaaaatgtgagattcattgcttttcctaccaaaccagattgatcaaacaccctcactcttcctgcctagacaagaacccttcctgaaataccttccaattttacttgtgtaaagtggttttgttctgttactttttaagttgttttggtaggtaatttatgacctttactttaggaaatctgagaatgaagatgacagcgagtgggaagatgtggatgatgagaagggagatagcaatgatgactatgactctgcaggcctattgtcagatgaagactgtatgtctgtgcccggaaaaactcacagagctatagcagatcacttgttctggagtgaggaaacaaagagtcgcttcacggagtattcgatgacttcctcagtcatgaggagaaatgaacagctgaccctacatgatgagaggtttgagaaggtaaggtccccacataagggatgctttagtactatcttatgttaaatttttttttttaatacctgtcagctttagcccaggttgaagtgctcaccaaccacaaagtcaatcataggaagtttacaactatccagctataggttcgtgtagccagcataaagcagaagggtatcagtgcagtacaggagcacaaagactgcaaagggagcatagaactgtgcagaagaagagtaattggttaggaggatgtgacttttccaatttacatcacacgcttacaccaggaggtggctcaaatgatgcctcattcaacctgaatgggtaaccaaaagtagctgtaatagttttattctcactaactgtggtaggacaactcacttgagtttctatttggcccttaaaacccccagaagtggcccttaaaccctcaccatctctaatgttgtgcttctttattatgtatgtcatatatggatttgtctcagattagaatgtgaatcccccaagggcagagagttttttatattttgctcacgatacatctgaaagcctaaaatggtgtcttggcatgtagtagaagtttaaagtgttccataaatgataaatgaatgaaggaatagtttccttcaaggtgactctaaagatagaagcagtccactcaaggaccttgacgaagccgagcgggttgaggttgatctggaaactggaacatcctctggccaagtcagctgatccgcccgcgagctaagtagatgttaggcgccttgctgtgtgccttgtttttttttgttatttttctttttttattttttaaaaagagagattgggacccaaagctaaaacttttgagtgttgaaaacagcgtatctctttattaaaacagagcataaaagcaccttagttattgtcgttttccctttacatattctatgaggccagtcaccctagttttgattctggaaagaacgtgtgtaggtcaaaaggagttggctgatcaaacgttcttattttcccccttgaattctgacatcctgattctgaatttctccaacagtaatccataagatgctatatttctgaagtattggcctgattgagcacatcaaaattccatttctttccgtttctcatctggtgttttcagacataactaacactgaggaatagaatggaagtagagtataagacacttttgaaagcttgtattttcatatactctatttggttctgttgtaacagattagctccagggtttataatcccaacctatagactgtttatacaggtttttaatcccacctatcctgttgtttgttctgtagcacataacacctcctaacatcatctctaatgttgtgctttattatgtatgttatatatagatttgtctcagattagaatgtgaattccccaagggcagagagttctttgtattttgctcacggatacatccaaaagcctaaaatggtgtcttggcatgtaatagaagtttaaagtgttccataaatgataaatgaatgaaggaatagttgccatccaggtgaatctaaaataaaggctgttaccttgctaccttctcacctaatactattttccctcttctcttgagggagaaacaaactgttgctacaaatctcactcttcaggagatatatcccccccatttactctttgtcaaagcttaacagtgtcaacaccatttgcataatatagtaattattgtctaaacaagaacaaatatatacattagtaggtgaattttcagttgcacaatcttttagtttgcataactaaggaatatgaaaatatctttagtctaggcgtagtgtctcgtgcctataatctcagaactgtgggaggccgaagcagatggatcacttgagcctaggagtttgagactgtcttgggcagtgcagaccctgtttctatttaaaaaaataaataaaatggcctggtatggtggcatgtgcctgtggtcccagctgcttgagaggctgaggtgggaagattgcttgagcctgagagtttgaggctgcagtgaactatgatcacgccactgtactccaggctgggagacagtgagatacttaaaaaaaagaaaaagtatcttcaaaaatgttctgacgtaatctgtgctgcctagcattttgttctccaagctgagtggaataatgcctttcatttacatgttaaatggaagcctatttttaggctaaatgtaagtcttaaagtactgagcagaaatatcttccacatcctattgttgcattaaatccctactgatattttaatggtaattgtgatagtacctgaataactattgtgtaagaataaagttaatgtaaaaaaatttttaagtgtgtagtcttactgagtacatttgcttttcatggtatcttttctctgtttatattcaagttttatgagcaatatgatgatgatgaaattggagctctggataatgcagaattggaaggttctattcaagtggacagcaatcgcttacaggaagttttgaatgactactataaagagaaggcagagaagtatagtgacttttccttccttgtttagctgttcttttttttaaaaaagaaaaaattccaaagaaaggtctatagtataactgaattgaggaaaaaattaacctagtcaaaatacatattgagaaaatgaaaaaggaaaaaagaaaaggggaaaaaaaaagatagggcggaaaaaagaaagtggtacattttccataaacttgggtcatgtatagctcattgttttgcctacattttggtgttaaatgttctgaagtagaacgtaatgggaatatacgaggagccactttctccgtatctttgactggagaagagtcatggtagaatgtgtattcgtttattaaatttttttttttttttgagacggagtcttgctctgttgcccaggctggaatgcagtggtgcgatctcagctcacctgcaacctccgcctcccaggttcaggtgattctcctgcctcagcctcctgagcagatgtgattacaggtgcacaccaccatgcccagctaatttttgtatttttagtagagatggggttccaccatgttggccaggctggtctcaaactcttgacctcatgtaatatgcctgcctcggtctcccaaagtgctgggattataggtctgagccactgtgcctggccaatttttaatttttttttaacttttatttattttgcttaaaagttttgttttgatagaagcatgaatattattagggtgtgaaatataaggacaggctgggcgtggtggtgtacacctgtaatcccagctgtttgggaggctgagacaggatcacttgaacctggaaggcagaggttgcagtgagctgagatagcaccactgcttccagcctgggtgacagggcgagactctgtctcaaaaaaaaaaaaagaaataaagggacacattccccttggaaaataagatcgtgtttctagtcttttgggctgaagaattattccaagcatacgcttttttcatctttctgaaatgccaggtgttctgagaagtaggtatttacatctcgtggaaagacaagaatttgtctctccagctggattagcggaactgaccagccagttattttggcaaatcagcatccacatcaaggtgactcttctctgagagaaactgatgaagtgttcaaatcagctagaaaggtctgatgttccatgatcactataatatatagatcccatagcagaaaaagaagctatatagttgagtgaaatattcgaatactttgcagagacagatgagttatgcttttttaggctttaaaaacctgttttcttaggaagctgccttggaaagacacagctagatgttaccttcctatcagccgagtgaatgtccaaaactcactggagggaagaggcagggctgggtagaacagagtttgacagaaaataacggatgggtcactggaatatgtgcatttaaaacattggtttttccacagctaaaaattgcagttttagtgacatagtataataataggtcatttttccccctcttggtcttcacttttaaaaactcgtctaaaagttgtgtaaaattgaatacccttgaacccttggaggatcaagacctgccaatgaatgagcttgatgagtctgaggaggaagaaatgattactgtagtccttgaagaagccaaagagaagtgggattgtgaatctatttgtagtaagtatattcactttatgatagtaattttaaagtattaaagtatatcaactttaggctgggtgcggtgcctcacgcctgtagtaatcccagcactttgggaggccgaggcgggtgggtcacctgatgtcaggagttcaagaccagcctggccaacatggtgaaaccccgtgtctactaaaaaatacaaaaattagccaggtatggtggcaggcaactgtaatcccagctgctcgagaggctgaggcaggagaatagcttgaacctgggaggcagaggttgcaatgagccgagatcatgccattgcactccaacctgggcaacaagagcaaaactctgtctaaaaaaaaacatatatcaactttgaaaaaatacatatattttaataagagttaggcttttaggaaatttgtgaaaaattatttggaaagagtaatattccaatactgagttgtaagcaatttataaaacattgatcagagactccagtgttattttgcactatgaaaacacaaggtcagaaatatagtaggaattcagtaatgctttgtggaactgaaaacatgcttactgatacatgacttttatttgtttgtttaggtacatactcaaatttatataaccatccacagcttatcaagtatcaaccaaaggtaagtcctagtgtgctgagctatttgaaggatgcagtgcataaaaaatagagtgcacattttcgcacaataactttttatctttatggctagagtgatattagaaaaagcatcaacagtatgtcattaatgagctattttttaataggaatgagaagtaactctagtaccattttatctgtatttcagcccaaacaaattcgaatatcttctaaaacaggaatacctctcaatgtcttaccaaagaaaggactcacagcaaagcaaactgaaagaatacagatgattaatggcagtgatcttcctaaagtatcaactcagccacgttctaaaaatgaaagcaaagaagataaaagagcaagaaagcaagctataaaagaagagcgcaaggtaaaatatatttttcaaatgtgagatttacaaagagctggtggaggggaaattaggggaattttgtaaaagcagtctgtatcagtttaaagatgtgaataatacaagtatattcttgtacttataacaggaacgaagagtggagaagaaagctaacaaattagcatttaaactggagaaaagaaggcaagaaaaagagctgctgaacttgaagaagaatgttgagggtctaaagctatagacagtggagcatacagggcaaggcactttattaggggctcctcatctttggttattgactagaaacttcagaaagacaaaactgtttgccatttttactggcagataagaggaaaatacaatatttgtattatttttatactagtaagtgtcccctgccaaccatcttgtaaatattgtaatactttaatttttaatattataagcttacatttgctctgaagtaaatgacttcatgaatgtgaaatgtttgataaattaaaggaaaatatcttcataacgtgaa

SEQ ID NO: 8012 - DNA, 263 bp, Homo sapiens
cctgaatttgaatgttggcctctcttgctaggttgggtaagttctcctggataatatcctgaagagtgtttttcaacttggttccattctccctatcactttcaggtacaccaatcaaacatagagatttggtcttttcacatagtcccatatttgttggaggctttgttcgttccttttcattcttttttctctaatcttgtcttcacgctttatttcattaagttgatcttcaatcgctgatgtcctttcttccacttgat

SEQ ID NO: 8013 - DNA, 885 bp, Homo sapiens
gggagtttgtcttttcaacatcagttaatgcttggaaccattcatacttgattaaaatacatcgttgaaaactttccctgtttttgatgagttgatttttgttttaactgatttaaactttttcaaggtttaggcaatgacatcatcacaattgttgattatttggtaaactatgacttcttgcaacagattagtggtcctggtttatgttcttgactagtatgatgttatctggactgggctgtaaaaatctgtgaacactgttgctctgagttaggaacagaatggctggggcagaaccatttttggcaggtgagctgcacttgatatctaaattattagaaaatgccttcatctgtaatcattcatttatggcttttccaaagctggtaggtattagcttgttctaccatgtgtgatccgtttaaatctaagtattgtaggatttttaaagagttgtcaaaactgatggcattaggtattctaccaacattggctagaaaaaaatcttgactgaagagcttgtcattgcagaagtaggatactggagagaatgtatttaaatgccaacctgtgaagtaaagggtcagatgatggtttatgtcaatattgagaatgtaagtactaaaaggattggccatttattttgatagctgtctcaactgaagattctcaaaaacagcaagagtcttaataggcattggatgtttctttgtcatgttactcaaattctgtgttatgaggtgctaacttcactgtgtttaaatccatatattatatattttgcaattaagagaaaaagactaggccatgagtcttgatgaagcatattgtgatttaggcaggttatactccaaacttaaatattttaattttattctgaag

SEQ ID NO: 8014 - DNA, 1795 bp, Homo sapiens
tttttgttttgttttgttttactttgaagaatgggcattggaggacaagatggagaaaattatgaatttacttttgaaacttttgagtttgaaatgcctgtgagacatcctgaataggcagtggggcagataggcttaaaggatacatttgggctagagggaaaaaatgtgtgagtcatctgcatattggtggttattggaaccacactggcagggctgacattgattctcctgcattactttttttttttttttttttaaacattctttcttccagataaagtagaattactttatcatatttcttttcctcgctcctgtaccccatttgcacatctttctgagaatttggatgagatttctttaaagttatagattaagttagggagaatttatttacaatatttaatataaccattctaggaactgtattttcaaatcttcttttatgttcctcagcaatttaatgggtttcctacaattcctgcatattttttgctaattcccatgttggttgttattattactgctattataaaaagagatctttttttctgttatattttcaaagtatttattgttggtttacttaaaaactagttatttttaatatttatttcatagctaaattcatatattggttctattagctttttagatgatttattggtatttctatgttgacagttttgagttttaggtatgtcatataaattatattaccctaatacttttgtcatttatttcttgttctactacctagaactttgtaaacagcgttaaacaatgcaggcactagtggacatatttgacttgctccttatgttaatgagaatactgctactgttataacattattataatgttgctattaattttgatagaatattatatcaatgatgtatttctatatttctcttactggatttttttttagaaatggattttgaattatatcaaaattctttttgacatctctcagggttatatttttttcctttaactcatatgtcaccattaggtttttaaaatccttttaaatattttatttctagtgtaccttggagttccctttttcctcctttttggggaaagttttgaaaatgttttgtttttgtgtatgaaaagaatagctcaccaaggaagaaggggagtgtttttggtgaaataggaaagaagtctgaaactgtaggagaggaggggaatatggccgctgataaaaagcactagaggaggggggaaatactcttccataggaaggcttccagctacaaagatttgaagacatttttctggggaagtaaaacactaaatcagcattattttccaaagcccagaaaataacttaatagattgtttttaaattactgttttaattcagcttgtgaagatattctgaatagttcatgtagaatatcttactattttgcagatacttttgtataaatagttgccagtgagaaatgttgcaactgtgtcttttcaaatgaagtaaataggagagctagtatagcgcctgaaagaagtaagtgagttatattgtaacttcttgctctacctcagggtaagcactccttttagcatttattaaactctcattatttgtagagaaattatttagatgtaggttgagtattcctaatctgaaaatctgaaacacaagatgctctaaaattcaaaacaggatgctcaaaggagatacttgtttgagcatttcagacttcagattttcagattagggatgctgaactggtaagtataatgcagatattccaaaatctggaagaaaaaaaaa

SEQ ID NO: 8015 - DNA, 418 bp, Homo sapiens
atttcattttatattaccagtacaagtggcatttgttagtaccacattctttttgctgcttttattttatttttctatttgcttacatgtttcaactagagtgagcataccttttcactgaacttgttgcagtttctgcttgatctcttcttaaatatttatataaagccttagggtaattccaagttctgaagattcaagttgtcaatacatagtttcacattgttaattagcatttctccagtttctgtcatacttgaagcattaagcaagtaaataataatggtgaataagatttttttctaaaagaagctttccagttgggcctggtgactcatgcctgtaatccaagcactttgggaggctgaggcaggcggatcacttgaggtcaggagttcaagaccagcctagccaacat

SEQ ID NO: 8016 - DNA, 1306 bp, Homo sapiens
gttttatatattatattaatttatgccatgaagaaaaaatatcaagagaaagatatcaatgcatcagaaaatggaagtgtcatggatgaagcaaacttagaatccttaaataaaaataaacattttgtcccttctgctggggcagatagtgaaacacattgttaaggggagaaaaaaagccacttctgcttctgtgtttccaaacagcattgcattgattcagtaagatgttatttttgaggagttcctggtcctttcactaagaatttccacatcttttatggtggaagtataaataagcctatgaacttataataaaacaaactgtaggtagaaaaaatgagagtactcattgttacattatagctacatatttgtggttaaggttagactatatgatccatacaaattaaagtgagagacatggttactgtgtaataaaagaaaaaatacttgttcaggtaattctaattcttaataaaacaaatgagtatcatacaggtagaggttaaaaaggaggagctagattcatatcctaagtaaagagaaatgcctagtgtctattttattaaacaaacaaacacagagtttgaactataatactaaggcctgaagtctagcttggatatatgctacaataatatctgttactcacataaaattatatatttcacagactttatcaatgtataattaacaattatcttgtttaagtaaatttagaatacatttaagtattgtggaagaaataaagacattccaatatttgcaagctgtgattgtcaaacaacatattacattatgtgttaagtttccagtgggcccacggtaatgtattaggaaaaattgactttgactaatgtagccactctcatacttatcttagctagatttcctagatcatttgccgcaccttctacgtcagcacttgcttcttcactttgtacttagataatgaaaccagcttctttttttaaaccccgtgaaacaaattctacagctttttttcttttgcagctttcccacgtctcttagtcatcatagaatgacagagagttatgtccttgctctagattagatttggcctaagggaacattgtggctgctttgttcttcaatccaggctactgaagttttctccatgttagccataagtctgtttcactttgttattatttgtgtgttcactgaagtaggactcttaattatcttcaagtactttatttttgcattcacaacttggctaactgctgaatgcaagatgcttagttttgacttaccttggctcttgatatgccttcctcac

SEQ ID NO: 8017 - DNA, 156 bp, Homo sapiens
agccccatggccttgagcaaacattggcagtagtcagggagtaattacagcagaccttgggcaagactcataaatgtgctggcttcaggtgtaacccaatgtagtcatagttctggatgccacagaggtgcttacgccactccaaacctagattta

SEQ ID NO: 8018 - DNA, 485 bp, Homo sapiens
ggcttctgttgggcttttattcctttttaatttctaacttcatgccccaggcttcactgctgcatctgtccctgctgcagactgatgcagaacactctggaactgtagaaggaactgccagaagactgtgtcacccatgtttgtccttgtgccagcaggagggtcacgtgcatagtggtgtatagactacacttagagagatgctcaatttctgtattctgctgctaagtaaatactttcctgtttgtgggttgaatttttttttgacttttctttacagctaagaattgaaatttattgaagttcttaattaaatattaagccatttaaattgcccccattttcttctgtcactcttgaggaccattatccagcccccttgcagactgccccaccttgggtccagtgtcagcctagcttggtgtaggtgtatacatacagtactatgccaggcactaggttgcataaaaagcgtaaacaaaaaa

SEQ ID NO: 8019 - DNA, 5768 bp, Homo sapiens
tctccaactttttttttttttttttttttttgagacggagtcttcctctgtcgcccaggctggagtgcagtggtgcgatctctgctcactgcaagctccgcctcctgggttcacgccattctcctgcctcagcctcctgagtagctgggactacaggtgcccaccactacgcctggctaattttttgtttttgttttttttttttgagacggagtcttgcttatcgcccaggccagagtgcggtggcgtgatctcggctcattgaaaactccacctcccgggttcacgtcattctcctgcctcagcctcccaagtagctgggactacaggcgcccgccaccgcgcccggctaattttttgtatttttagtagagacggggtttcaccatattagccaggatggtcttgatctcctgacctggtgatccgcccacttcggcctcccaaagtgctgggattacaggcatgagccaccgcgcccggccctgttttctccaactttttgttatgaaaaaattgaaacatacataacatttgaaagaatagcacaatgaactaggatccacctgcatgctacttagatccgaaagttaacattttggtgcattcactctatatatgtataataaaagcataataaatgcacactcactcatatctttcactgaaccatttggaaggaagttgtagaatgatattttaccattaaatactatagcatgtatctacaatatgagtgatatttgaaactaacttttaaagttagttttaagaggaaacttaagggtaataggacttgtgaagatgaagcagagctggaagaaataattttttttacaaacttcattaatattaatgcattatcttgattttttgtcacatccatgaaatactggtgctattaataattggaatattcttttaaatatctcacttataaacacttaaatatcagtacatttatttagaaaggaaactgtatgcaggacagtgtatgaaatcggagcctagtgttcctctgagctacagagagcatttctatgatgagcatctctagggaatgaacagggaaagggaggggtagaatgaacagggaaagggaggggtaggggcaggtaggaagagaatgttggtgtgcaggcatgtgactgcaggctgtatgcaaggacctgcactctataaatttgtcctgtcattagggtgagccaagtaccggagctttggagctggcttctgttgggcttttattcctttttaatttctaacttcatgccccaggcttcactgctgcatctgtccctgctgcagactgatgcagaacactctggaactgtagaaggaactgccagaagactgtgtcacccatgtttgtccttgtgccagcaggagggtcacgtgcatagtggtgtatagactacacttagagagatgctcaatttctgtattctgctgctaagtaaatactttcctgtttgtgggttgaatttttttttgacttttctttacagctaagaattgaaatttattgaagttcttaattaaatattaagccatttaaattgcccccattttcttctgtcactcttgaggaccattatccagcccccttgcagactgccccaccttgggtccagtgtcagcctagcttggtgtaggtgtatacatacagtactatgccaggcactaggttgcataaaaagcgtaaacaaaaaattcagcatatattcgtgaatatttgagaattatatgaattagagaattcattttctctaaactgaatcacctggacttgtatttaagaatatattatttcattcagatttttaagataggattagtgtttctctgggacataaattattctattttatttttttctatataaataaaaagaaatttgatgcaatttaaaaaatgtcatctttcattttagtgtcaatactatttaagtagagatattcaataggcagaaagatcaaggatgacaggatgtcagaaaattttggtttcagtccaggcactgctactgaaaaactttggtctaatcactttatctcaataagtttcaattatttctcttataagatggggccaataccacttgcttttctaccctaccagagattgtagctactaggaagaatggaaataattgaaagctttaaaacaatataaatggaaatgtaccccatcttaaaaaaaattagccaggtgtgtttgtagtccccgctacttgggaggctgaggcaggagaatcccttgagtttaggaggttgaggctgaagtgagccatgatgatgacagtgtactccagcctgggcgatagagcaagaccttgtctcccaaaaataacccctaaaagggaggctgaggcgggggaattgcttgaacctgggaggtggaggttgtagtgagccaagataacgccactgcactccagcctggcagcagagcaagactccatctaaaaaaaaaaaaaaaaaaaaaacccaaaaaacaaacaccattcgtttctgcacaaagtaattttgagttgaatagctgaatacagcacaagtgagatggaacagtgtaaaggtgacaaaatacattttttttgaaaattatactttaagttctgggatacatgtgcagaacgtacaggtttgttacacaggtatacatgtgcatagtggtttgctgcacacatcaacccatcatctacattgtttctcctaatgctagccttccccttgcctgccaccccctgacaggccccagtgtatgatgttcccctccctgtgcccatatgttctcattgttcaactcctacttatgagtgagaacatgtggtgtttggttttctgttcttgtgttactttgctgagaatgatggtttctagcttcatccatgtccctgtgaaggacatgaactcattcttttttatggctgcctagtattccatggtgaatatgtgccacattttctttatccagcctaaaattgatgggcatttgggttggtaccaagtctttgctattgtgaatagtgctgcagtaaacatatgtgtgcatgtgtctttatagtggaatgatttataatcattttggtatatactcagtaatgggattgatgggtcaaatggtatttctagttctagatccttgaggaattgccacactgtcttccacaatggttgaactaatttacactcccaccaacagtgtaaaagcattcctatttctccatgtcctctccagcatctgtttcctgactttttaatgattgccattctaactgtcatgagatggtatctcattgtggttttgatttgcatttctctaatgaccagtgatgatgagcttttttttcagatgtttgttggctgcataaatgtcttcttttgaaaagtgtctgttcttaccctttgcccactttttgatggggttgtttgtttttttcttgtaaatttgtttaagttccatgtagattctggatattagccctttgtcagatggatagattgcaaaaattttctcccattctgtatgttgcctgttcactctgatgatagtttcttttgctgtgtagaagctctttagtttaattagatcccatttgtcagttttggcttttgttgccattgcttttggtgttttagtcatgaagtcttttcccatgcctatatcttgaatggtattgcctagattctcttctagggtttttatggttttaggtcttacgtttaaatcttttattcatcttgatttaatttttgtataaggtgtaaggaaggggtccagtttcagttttttgcatatggctagccagttttccgcatatggctagccagttttcccaacaccatttattaagtagggaatcctttccccactgcctgtttttgtcaggtttgtcaaaggtcagatggttgtagatgtgtggtgttatttcagaggcctctgttctgttccattggtctatatacctgttttggtaccagtaccgtgctattttggttactgtagccttatattatagtttgaagtcaggtagcatgatggctgcagctttgttctttttgcttaggattgtcttggcaatgcaggctcttttttggttccatatgaaatttaaagtagttttttctaattctatgaagaaagtcagtggtagcttcatgggactagcattgaatctgtaaattattttggactgtatggctattttcatgatattgattcttcctgtgtatgattaatgtttttccatttgtttatgtcctctctttttttttttttttctttttcttttttgagacagagtcttgctgcccaggctggagtgcagtggcacgcacgatctcggctcactgcaagctccgcctcccgggttcacgccactctcctgcctcagcctcccaagtagctgggactacaggtgcccaccaccacgcccggctaattttttgtatttttttttagtagagaaggggtttcaccatgttagctaggatggtcttgatctcctgacctcatggtccgcctgcctcggcatcccaaagtgctgggattacaggtgtgagccactgcgcctggcctgtttgtgtcctctcttatttccttcagcagtggtttgtagttctccttgaagaggtccttcacatcccttgtaagttgtattcctaggtcaaaatacatatttttccccagtaaatttttattatagagtagagcaatgaatgagaactctagacttaagagtgttttgtaagctatggaaaacattacacttgtgtatttgatggagagttggagctatggttagtattctctgtatggctgttatgaggttctcattctatggtatcactcatagctatcaaagtgttctttctactggttaataccagtaggcagaatcctgactaattttgctgagaacaagtcttgggaattctgttgaggacactgtatctacttgtatatttgccattatataagttgtaattactttgaagctaaaaatttcagcaaaattcaattctactaatatttgttaagactgttttttggtcttaacactacctgctcccattttcttctgtcacccctgaggaccattatccagccctcttgcagactgtcttacctttgatcaagtgtcagccttgcttggtataggtagcttttattccattaatagctgaaatttagaaatagttctcttctctggctagggaggtgaagtttctgaaggctaataagtttatagtctattatcttataactttactcaacaaatatttatgaggcatcgggtatatgtgaggtacttttttctctccctccctccttccttctgctagatttatgtggtagggatggggactgtcttataccaaaggcagtcagctggatccctgtatgttaagagacccaacagcctaaggtttgtatccttcatcctagtttttctttcttttttttttttttttttttgagacagagtcttgctctgtcgcccaggctggaatgcagtggcgtaatctcaactcactgcaaactccgcctcccgggttcacgccattcattctcctgcctcagcctctccagtagctgggactacaggcgcccgccactatgcctggctactttttttgtatttttagtagagacggggtttcaccgtgttagccaggatggtctcgatctcctgacctcgtgatccgcccgtctcggcctcccaaagtgctagaattacaggcgtgagccaccgtgccctgccg

SEQ ID NO: 8020 - DNA, 104 bp, Homo sapiens
aaccctgaagaagttgtgacttaccaaagtcacagtcaacagacacgtggtcagaaacccagcctgctagccccttgtgatttccaaatgtcctgggtttgatg

SEQ ID NO: 8021 - DNA, 559 bp, Homo sapiens
gtaattaagttactaatcatttgactttagtttaaaaaggagacctaggtgtgcctattctaattacatgagctgttttaaaaacataaagttttctctggctcaaagcagaactgcaagtcagagcaatttgaaagatgagaaggacttttcctgttgctggcttgaagatggacggggccatgtgagaagaaatgtgagaggtcttgagctaagagaggcttgtggttaacaacccatcagaaacggggacctcagtcctataccttaagggaactgaattctgccaacaaccaaacgagcctgtaagcagattcttttccagacaagaacccagcctggctggcaccttgattttggccttgagagatcagaccccaagcagagaacccagtcagctccacctaaacttctgacctacagaactgaaaaattttaaataaatgttgttttttagcctctaagttggtagtggtttgttatatggcaatagaaaattgatatgcaaggccacttggcaaccatgtgaataaatgctatggaagaaatggaaatctca

SEQ ID NO: 8022 - DNA, 10500 bp, Homo sapiens
agctagcctgcgaatttcagcatgagtgtactgctgaggtcaggtttggggccgttgtgtgccgtggcgcgcgcaggtaagcgtcagtcccctcgaagcccggttgccgtggaagccgcgtggggcgccttcctcagctcttcagttgagggtaccgggggatcaagggctcgggggctcacttccaccttgaaggtaccctgggctggaaacgggtccggtacaaacgcaatagggctgcgtagtcgtgggcaagtgggtgctgtctctgcgccccgtgggcgtgctaagcacagtagcccgcggtctgcggtggggcgaggttaagggttcacgaagctgttttgaaaacgctcaggcggcttgcgctcgtgaatggtcagatttatcatggggtctgtttaatttgtgtttttcgcagccattccttttatttggagagggaaatacttcagctccgggaatgagcctgcagaaaacccggtgacgccgatgctgcggcatcttatgtacaaaataaagtctactggtcccatcactgtggccgagtacatgaaggaggtgttgactaatccagccaaggtatgggtcgggtagcccgaggactaggccctctctagccgatttgcgaggtgcaagccaggagggagaagcccgaaggttctcagcccaggcagtgggggtgcctgccaggggaagagccatttctgaggacctggggacagataatttgtcagttggtcagggctggctcacgtcagaggcagtgccagtaaagaggagaggacacggtccaagggtgtttaggagacagaatgtagctgattggatttatgatgcgggaaggatgactttcctacttggctgatggtgggtggtgtggattcattgctttgggagaaggaatacgggaggaaggatggagagttcaggctggtatatgaatttgaagtgtgtgggactcttaggtagaaatctccaacaggcagctggaaataggaattactgcctggaaagtcgtctgtgttggaatggcttcagctggcattggagacatgtgctgggttttctcacatgtgcagttgagaatgcagtctgggtcgtcttcactgttctaggattaggcacagtcacagctttctgacccacgtttccttgtctgttctacagagccatttggtgaaagcctatagtcctttattttagaatatttcatcttttgctgggttgaaatatgacctctgtggaattctggggttagattggccattgttgttggatatggtagtgtgactctagtgtcgaggtttacccaaggccggtatctttctttcgatgccggttaggcagggctgcaagataggtggcttagactagtgtggtggtactagaaatagaagagggtgatttagaaagggactgacaggatttgccgatggattgagtgatggaacggaggaatcaaggctgattcgtacttttagcttgagcagttgggtgatgatggtaccttttattgagattaagacagacaggaccaggtttggaggagtactagggagagggcctacaccaggagctgcattttatacatattttgttagcagtgacatgcaggtggagatagaaagtaggcaattcgctgtaagagtctggcgttcagggccggacgtggcggctcacgcctgtaatcccagcactttgggaggccaaggcgggtggatcacgaggtcaggagtttgagaccagcctgaccaacttggtgaaaccccgtctctattaaaaatacaaaaattagccgggcgtggtggcttgtgcctgtaatcccagctagtcaggaggcaggagaatcgcttgaacccgggacgcagaggttgcagtgagcctagatttcgccattgcactccagcctgggcaacagagcgagactctgtctcaaaaaaaaaaaaaaaaaaagtgagcctggtgttcagaagaaagactgggcaggcatatatacatttgctcgtcatcagcatataggtcatatttaaagccaaggaaccagggagaacatactgagagaaaggaaggtttcccagcattgagagtaggggtaactctaaaatgtagaggctcttaacctagggaccctttaatagaaatcaggggtttcatgaagctggatggaaaaaatattatacctttattttcactaactttcaactgaaatttagcatttcttcaattatgaacatacgcagcaactagtagcatcagcaatacctgtgactttgtcatctgtggaaatcattggtatttccttatcacaatacagtgatcacaggcatctcaggatttcatcgtgctcatccttacttcaaaattttgttaattattgggtctttggcttgattatgggcttttttgtttgttggctttttgagatagagtctcattctgtcacccaggctggagtgcagtagtgcaatcttggctcactgcaacctccaccttcaaggttcaaaggattcttgtgcctcagcctcccgagtagttgggattacaggtgtatgtttccatgcccagctaggttttttgtattttcaatggagatcgggttttgccttgttggccaggctggtcttgaactcctggcctcatatgatccgcctgtctcagcctcctaaagtgttgggattacaggtgtgagccactgtgcgcggcctaattatatttttttaatacactagtaaagaagtgtatatatcacattttttagaacatttgatacacatttttcagttatttctttgtggttctgtgcatttaaaaacactctgtgaaggggtctataggcatcactgggctaccacagtggttcataacacaaaaaagcgtaaataccccaataatgtttccttatgaacggaactagaaagcctagaagaagagatgtgtggattgaaaaaatgttctcaaaaatgggagtgacttgatttattttgaatgctgaagggggaaagttgaagctggaagagagaaggggacagctaaaaggactcaggggagttgtatgaggaatggtccagagcacaggcggagggattaggtttggatgagaggagaaggggaaggcatttcattcttggagtccccagattaggttagaggccaggtggggatgggaagctgaggaattcgtattttataacattctttaattctggagtgagactggggcccatgtcacctgtagtaaggtggtagaataggagcttgagaagcataagaaatatttaactcaattcttgagtgtttcttgaaggttaggcatcgtgctaaaacttgggatatgaagataaataaggcatgatcttctgcaaacaactatactttgtggtgaagaacagagacaaattagctcagaaaaggtggcactggatttggccttaggttggagggctggaggaggtcagctaggtggcatttgagcagattcggaggttgagtataagactgccagggaaagttgaaaagggagaagggtgaggatttgcagtggcatggatgtctggacaagcaaggctaataagaaaaaaaaaaacaaccctttttctggagatataatattcatatagaaaagttcataaaccacaagtttacagctcaatgaattttcacaaagcaaatgctcccatgtaaccagcacccaaatcaagaaacagaacatcaccagcaggcagggcccatatgtgaggcagaaagtgttagaatttggagaggaggctggaggagtaggcagggtcttgctgtgttgggtgtgggagctgggaggggaggaagggtctggcgtgcagagatggacgttacatgacttctgcctttacggtcaaggtgtaattgtttttctaccggttttgtaaaatgactgttactttgtaaaatttgggtaaagacaccatatttcccttgcttatttatttatttatttatttatttattttttgagatggagtctcactttgtcacctaggctggagtgcagtggcgcgatctcggcttactgcaagctctgcctccgaggttcacgccattttcctgcctcagcctcccaaatagctgggactacgggcaccctccaccatgcccggctaatttttttgtattgtttttagtagagatggggtttcaccatgttaggcaggatggtctcaatctcctgacttcgtgatccacccgtctcggcctcccaaagtgctgggattacaggcatgagccaccacacctggctccccttgcttatttagaggagagaactttcttactaaataattatttcacttttacattatttaagattttggaggggtatttttaaaaggcttatttgaaaattaattttgtttctctattttctctttttactcagggttattatgtgtaccgtgacatgctaggcgaaaaaggagatttcattacttcacctgaaataagtcaaatctttggggaggtaatatactatgtaaagtatgaatgaagctaatataaacatttgagagcagatcaaattgtattattctgtagtagtgttctacagctttttttgtgattcatcaaaagttttaactttatagtagtttatgtactgagggaatagagaggcagtagaggggagtaaaatggtagagagaatatttgaaaagtttatactccactgtaggaagggaaatggagagataagagggacaaagagaaagagaaggaaaggagggggtcataaagaggacagaaaaaggagaatcagatgaaggaagagaatggaagaaggggccaggcgtagtggctcacacctgtaatcccagcactttgggaggccgaggcaggcggatcacaaggtcaggagatcaagaccgtcctggctaacacggtgaaacgcagtctctactaaaaaaaaaatacaaaaaattagccgagcgtggtggcggtcgcctgtagtcccagctacttgggaggctgaggcaggagaatggcgtgaacccgggaggcggagcttgcagtgagccaagatggcgccactgcactccagcctcggcgactgagcaaaactccgtctcaaaaaaaaaaaaagagaatggaagaaggaagagagacaaaaggaaaggcgaggaaagaggtagagtgcccaggagagtgcccgggaaggaagagagaaaagataaagagcattgaagaattagtggaattaagagaagctctaaagctcccagtcatgattttagccgtacttacagtaaaagtcttcttttatttatctattttttgagccagggttttgctcttattgcccaggctggagtgtagtggcgcaatctcggctcactgtaacctctgcttcccgggttcaagcgattctcctgcctcagcctcccgagtagctgggattacaggcatgtgccaccactcctggctaattttgtatttttagtagagacagagtttctccatgttggtcaggctggtcttgaactcccgacctcaggtggtccacccgcctcagcctcccaaagtgctgggattataggcgtgagccaccacgcccagccaagtcttcctttaataaacagaattctaattcatttccactaagtaccttctatgaatttagaaataggaaatagtgtatacgaggaagtagaatgtgcgtatcgaaaaacattagttattataagaatcatgtaattgtttaaatcatatgaatatgaagaaatggcataatcacatttcatatgtttatttgctttcaaatactaatacctttctgctagtgatatcctcttatctatgtcatgggaccttttatagcagaggctgccttattttttcctattaatcttcctaaatggtgtatgttatgatgtagtcccaggaagttcctatgtgaacatgtacgtatgtattgaacaacatacatatggctgtacacattttgctttttggcatatagtgcatatttatgtgaaattttatattgtggtatacttttatactttataatactttaatatgtgttttttttttcccttttcacagctactaggtatatggttcattagtgaatggatggccactggaaaaagcacagctttccagctggtggaactgggcccaggtaggggaaccctcgtgggagatattttgagggtaggtaataaaagaatgtcttctagtctcatataagtgaattttagtacttctgagtgtgcaaaccatgttgatttcattggttttcagttccttaatttcatatttctcagctaaaatataatgtcagaataatgtaatcagtcattacttactgttgtctgtaaacttaaaaattggaggggagggggagaatatgaaagctaaaaataggaaacatttagaagacattatgggagagtgtatttgtttcctcaggaaggaaagttgttaattatattaaaagtttaggccaggcatggtggctcaatcctagcactttgagaggccaaggtgggcagatcacaaggtcaggagttcgagaccagcctgaccaacatagtgaaaccccgtctctagtaaaaatacaaaaattagctgggcatggtggtgtgcatctgtaatccagctactcaggaggctgaggcagggaatcgcttgaacccaggaggcagaggttgcagtgattgctgcagtgattgattgcagagctgagattgcgccattgcactccagcctggtgacagagcgagactccgtctcaaaaaaaaaaaaaagtttaggctgggcaaagtggctcatgcctgtaatcgtagcactttggggggccaaggtgggaggattgcttgaggccaagagttcaagaccaacctggccaacaaagcaagacctcgtctctttttatattaaaaaaaaaaaaagcagaaggcataaagcaaaagattaatatttcatttcttacattaaaattaaaaacttcttgctctacaaataaactagcagctttttgttcttcagagaccccattaagagagtgattagacaagccacagagtgggagaagttatttgtaacacgtaaccaacagagaactagtagttagaattatttaaataactcctttaggtcagtaagaagacagataacttgagaaaaatcaggccaaagatgtgaacaagtccattcataaaagaggaaaatacaaacggctaaaaaagcaaaaaaaaaaaaaaaaagattagtcacattggtagtcaggaagatgaaaattaaaatcacaatgagatactactgtaacccttgccagattagaaaaaaaagctaaaagtctgtcaacaccaagtattggtgaagatgtggatttgtggatcaatggcaactctcatatactgcttgtaaaactataatttagtacatccttttttctttctcttttttttttttttttttgagacacagtctcactttgtcactcaggctggagtgcagtggtacgatcttggctcactgcaacctctgcctcccaggttcaggcgattcttgtccctcagcctcttgagtagcagggataataggcgtggatcactacacccggctaatttttttatttttagtagagaaggggttttaccatgctggccaggctgatcttgaactcttggcttgaagtggtccgcctgcctcggcctcccagagtgctgggattacaggcatgagcccccgtacccagccttgtacaacctttttgaaaagctattggccattatctattaacatcaaagtttcttatattgtatgacccagcaattttactgctagtgatataccctagagaaactagtgtatatgtgtaccaggagacacatacaagaagatagcagcattgtataaaatagcggaaaataacagcacaaatgcccatcggggggtaaatgaatcagttaattgtggtatagtcatacagtggaatacgaagtactgcaagaatgcgtgaaatcacagtggaatataacagtgttcaacatgaaacaagatgtgtgaaagtagcagtttgcaagagttcgtatcatatgattgtatttatataaaatccaaaaaatagtcaacattaaacaatatgtatttggtgataaaaatatatttagtaacatttataaagaaaagtcagggtgttattaactcaagattcagaatggtggtgacttccaagggtagagggagtccacaggggctttggagataaggtcatgtcccatttatggtagatattctctcttgtatcattgtttctatcagtctacgtactattttatgaaaacattaaaaaggaggacagttgtttatagtacctgataagtaatagtatttattaaacttttgtagtttttagtattttggaactcattagtgtttttgagtttattttatatgtacttgacaattcaatgtaaaaaacaaacatggctgggcgcagtggcccatgcctgtaatcgcagcactttgggagttcgaggctcccaaagttcaagatcagcttgggcaatacggtgaaactccatctctacaaaaaatacaaaaattacccagtcgtggtagcatgcgtctgtggtcgaagctagttgaggggctgagatgggaggattgcttgagcccaggaggttgaggctgcagtgagctgtgattatgcctctgagtaacaaagtgagaccctgtctcaaaaaaaaaaccaaaaaacaccaacacatactcaatataaatttaaatttcttgatgctttatggtttttgctttaaattagaaattaaaggatttaaaaaatatataaaatatataaacatatgacaaataagaatcttgattatttgggtgaagaaagaaaacaaaatcacgaatttaaatttccagggctctattttatgtttttcagcaaggtcatttgaatataaaatatttaataaggacctcaaatcatattctcttgttcaagtactttaaaagttgattccagagcccttaaaatgtatgaaggatgcttttccagactgagtcataagaagtcctaaaagccaaagaatttaaagggttgtaaagcaaatagccagagaagtgtcagacctgttttatttttgatgttaccttctgaaggaatttctcctgggaagtttttccatttgtatttcgatctcaaaactaaatttggaaaaatcatcttgttcatattatcagtctggatgtgcatattcatatctcaaaagtattaattggaggcagatcaccagtagaaattaaattcaaatgaaaaataatgttgatacactttatgcttttgctattgattttttagccttaaaagattggtaaaatattagtattttcctttttcccttgcatgtttacaacagtgaaaaaatgtgtagctaaatatagattgaaaatgtggcagacccccgagttaagcagtcaggttttcagtaccattcagatttggttctttgaggttagagttctcatcatctcaaagatgagattacttcctagacctagagatgttatcaaatcaaggctgtgtacattttatttccttggtctttttttagactccataatctgaatcattgtttttatcagatgccaaatcttttattttcatttgttaatcataatttatcattaggaaaccaaattgtgcattgttcatttcttatttagattatgcttaataactagtaggttaggattcttatagactgctggagagtggcttgggtaaggaacacatctctctgaaatattacctctattgtgacatgactaaatcattgatgtaaatgattaggaaacttaaaacctacttaacacattgtatttttttttcttcttttggtatttaggtgttcactcaacttggatctgtgctgaaaaattgtgacatttcagtacatctggtagaggtaagccaaaaattaagtgagattcaagcattgacactgactaaagagaaggtcccgttagagcgaaatgctggatccccagtgtatatgaaaggtgtcactaagtctgggattccaatttcctggtaccgagatctgcacgatgttccaaaaggtaattacctttatgtggattaatgaaagaattttgatcacaaccctcacagtattgatgggactgtaactttttacagcaatataatagattgagttactgctgccaagtcccttatccatagagagtagcctacttttttctagaaaagagcatcttaatagaaaataaagttgcctgacattaagtagtagtttatttcatgaagctttgtaaaatcccaaacaaaatgtaaatctcctttgtacttttgagtatttccctatagctagggttgtaccgatgacggagcagcccaaggcagctggggctgatggaagcagtgttagtaggtgggtttagttcagttatagagtcttttaaaaaatccttacttgcctaaagacaagcaag

SEQ ID NO: 8023 - DNA, 803 bp, Homo sapiens
tccctgtactagtcaggaatactgactagtattgactagtttgagtcttgactcaaagccaaagtgggggtacgatcttgggtaagggatctcaagccattcctgcctcagccttctcaggctgagaagcccgattttatgaaatcaaattcccttccagctaacaactctgacttctaatttctttcaagccttgtgatgaataaaagctttaactgctatttcaggtatttccattttctgaccccatttatgtgtaaaataagaatagtaataattgttctatgttctgcagtgtaagttttccatgaagaggtagataattctgtggtagtgatgattatggaggaagtaggcattttttttacagttaatattcaaaagaattaattcctgtgaaatgtggaaacattaattgttttcctctttttaaatagggtacagcttttatcttgcacatgaattttttgatgttcttcctgtgcataaatttcaggtattgaggggggaaaaaagtcatgtctataattgaatacaaaaggcattgtgttgccaatgtttatggtatttattcagtatacaaattttacttgttgaggttatttttaactattatttggaattttggtacacaaataattcaaaagcaaaaaatgaaatattaatgagaattgttagttctcctgggataattattaagaattcttaattcttctgatttgaagaagtaagggaatgaaaaatggtaagatggtaactggctgtggtgcaatgaaggatttacttaagcaaaaaaaaaattt

SEQ ID NO: 8024 - DNA, 32249 bp, Homo sapiens
ttagattatttcttaactcccagtgcagctaaaaaattatcttccccattctgttttcctacacaattaaataattttagttccgtaaattgttctttttacaacgctttcttgcattttctctctttcctgtgctttatccaattttgtctttggttcatcatgcccctcaggcatggagtttgaaaactaggtagataggatgtctaaaccaaaaaagtataccatagtattggtcttactcccatacagagaagccattcaaactgtgggaatgaatttgagttattagagaaatgataatagtagtttaagtatgttcattcaggtttacacatatctgttgttaaatttaggatggcccgtactttggaaccactagcaaagaagatctttaaaggagttttggtagccgaacttgtaggcgtttttggagcatattttttgtttagcaagatgcacacaagccaaggtaatcataattcagaagttaatgctttctaaaggggtatagttttgctaatccattttatgtgttaaatggcaatggcatgtttggagaaattggttcttcagattcaagatattagacatttttaggggcagaacaggaatcaaagtattcattattgtggactagatcactctcacttctcccttaaaaatgttgtttgtgggctaaggaaaaaatttcatacctccatggattttactattgtggaggatatagcaagtgtccttggtctggcttagtttgggagcacagatggaggaaacttagcctgcccattatacttcattgtttggtagactaagaaagtaactggtattgctgttttctgagtaaccagttttctcaggctatagtattcttcctgggcatcaacagtgggcactaagactttcacatgctatggccgaaagtgctttaacatttttcttggggaaattttatattagagctctcaactttttaaattaggaagtgatttttccctaaaacagggaatagacctggcatgatagccatctttgaaacttgccacagtcttcctcagcatacttggttggaacgctgtaccaagatgctactggatactcaaaaaatcccttttcttttaaactctaaggaagggtattaaaaaaacatcccaacagtatttaaaaacaaattaaagcttgggatcagttttaaaaagtgtcatggctgggtgtgatggcttgcacttgtaattccagcacttcgggaggccaaggtggaaggactgcttgagctcagtctgggctaaacataacaagacactgtatcttaagaaaaaaaaaaaaagtgctgggcatgatggtgtgctcctgtagtcccagctactcgggaggttgaggtaggaggctcccctgagccccatcccagctacttgaccttggctgacgtaggaggctcgcttgagcccagcccaggggggtctaggcagtggtggattgtgactgtgccactgtactgcagcctgggcaacagggagagagatcctgactcaaaaaaacaaaaggagatcgttcctggattaccagaaagaccttcaaacaaatttctaatctatatggttcccatcatatggaccctaaagctagcattaaattgtggctgtgttaatataatgaatttctgttcatatctaatttcaagacatccttttttccatcagatttcaggcaaacaatgagcaagaaatatcccttcatcttggaaggtatgtttttccttaagtaaaaataagtataaaacaacttcttcaggtaacctataaattatgtagtaatttctttacaaggaatttctaacaatactattcacatgtattttagttcttctgagactaaattctcatctattctagtgagaggagaattaggtaatgggctggattctgaattcttctagtggttaagaatgtaaactctggaatcattcatatatgaggtgatagaatcaaaccacagtttaaacctttggttttaaaagatcagtttcatctcaggtttgctaacttcttggagctgtctctttctctgtcaagtagataaagactgaacaagatgacatcatgtagttagacgaaatagtgctcattacaatgatcagagatgccaggacttatatgtgaagtctgtaatcctactgtcctctttttcattttgttatgtagcaatatggaaaaaagaagttgtttttttcaatacatttaattttaacaatgcttccacatgactttataaatgagagctatttttatttatagtttattacaaatccactgagaagtctggaatgtatggaatcagagagctagatcaaaaaacatggttgaacagcaaaaattagatgtaagtagaattttaatctataatttacattaataactcatttcctttgttttttagttttttgagtggttttaatcctcttctttttaaaatgtttctttttcttgatgatactttttgcatctctgttgtgtagccagtcatcacgttcagcctcccatctaagctgtttgagacctttgagagaagaagaaaagatgagtgtactaccacactgtagactcttggtggtcccacagaacatgctgctgagtcacaggaacttctagcctgccttggcctgtggtttcccacccactatacaaacccactgcttgtttgttgcttttcttctcatatttattgtcaaagataaatgtttcaaaaagaaatgactaaggaaggaaaagaaacaaatgctctaaagattttctctccccaagcacttttactggtgaaataaaaaccagtaacaatcaatatgtaaaaacggcccacttccctaaaaaaaagtaatttttgtagtctgcaaggttttttttttttttgctttagtctaaatacttgttaatcttacatgttctcctgagagaagaaaaagccattcctttcaggttgtaaagtaccatgaaaaggtctttcaaaaatattcctatcagccaggcatggtggctcacaccagtaatctcagcactttgggaggccgaggcaggcgggtcacttgaggtcaggagttcgagaccagcctggccaacatggtgaaaccctgtttctactaaaaatacaaaaattagctgggcgtggtggtgcatgcctgtaatcccagctacttgggaggctaaggtaggagaattacttgaacatgggagatggaggttgcagtgagccaagatcatgccactgcattccaacctgggcaagggagtgagacgctgtctcaaaaaaaaaaaaaaaaaaaaaaaaaaaaaaaaaaaaaaaaaaaaaaaagaataaataaaataacgaaaatttcctatcttctgaagttccaagccaaagctatttttaaaacatcaataaaaaaatttaagttacttacttgcattatctttgttagccatggcattcatgccaatgttatcaaacttggatcccatattttcatccaatagatggccaaacttttaaacaaaaacgataaatttattagaaaactaaaaataatgtagaatagctagcttgttaaaacagtacattagccttacctcttcagcagatacaaataggctggaatcatttaagtttcttttcttttttcttggccctaaaaaaaattgtaagtctacattattcaattataaatctaatgattttagaaaaatgcaatgcaacatgattttattttaaaaattatacttgggtaaaaacaattgcaataatcttctggcaccattgggtagctggcatttaaatataatttaagagttagtatataatattttcaaaaagctaacaacatcctaatagaactgttcagatgacaagagtgtcttcttgcttttcagatttggccactgatcgaagttttacccataagggaaataacatagtatcaagcaatagtaaaattatcagtttgacatggatgggttttgaaatacttaagacacaacataaaatttagttcaggggtctttagattgtaaagaaattgactgaaagtatgtttattatgctataaatgaagttgtttataacagcgaaaaaggttctcctttaaaaaaaaaacttatctgtagtactgaatatataaacttttcctgaaacaattattcaaactctgcatctttgatatcaatgtctctagcagtagtagagccatattttaaaaagagctttactaaatacagatcataacattcagctgttttaagtgtattaacgcattttggtaaatttacagacttgttcaaccacaaccacagtctgattttagaacatttccatcaacttcaaagatccctggtgccatttgtagtcctccaacccatctccgatctatcttgtttctatgacttgccttttctggctatttcatataaatgggatcatatgacatgtggtttcctatatctgacttttttcatttagcataacgtttttgaggctcatccatgttgtagtactccatgccatgttgtgggctacataatattccattgtatggatataccacattttgcttatcagttaatggacatttaggttttgtctactttttggcattaatagtgctgctgtgaacaatcatgtacaagtctttgtatcagagccacttttgataaaatagtttctaaaacatttcatcttgatttttattaaggtgatatgtatgttacttaacagctgtataatacacatttgcatgcattaggaagttttttttgggttttattcatcctgtagtgatgtatctgtgacctcaacgagtaggcacttctgtactgtactggtttcttaaagtttcttttatcccgcccccacccccaacctcagcctcaagtatgtaacaccatgcctggctaatttttgatttttttttttttttttttgagacagagtctcgctttgtcgccaggctggagtacaggggcgtgatctcggctcactgcaacctctgccttctgggttcaagcgattctcctgcctcagcctcccaagtagctgggcctacaagtgcatgccaccacgccaagctaatttttgtatttttagtagagatggggtttcatcatgttggccaggatggtcttgatctcttgaccttgtgatctacctgccttggcctcccaaagtgctgggattacaggcgtgagccactgcgcccagccatttttgattttttgtagagatggggtctcattgtgttgcccaggctgattaaagtttctataaggtatgtttattcttaaggatatctactctaacacctgtaaatgtagggtgatcaattagtaaattaataaatctgaatcaattaataaatctgtttaaaattccttgcctctttttgtttcagtcaattctgttgggtattctttaatctgcatccaaaactattatcaattgagatctgaaatcctttcaggctaatgtcttctgaaacagtactttactatttgaaacaagctcagagcatcttttttaacattaaaaaatttttttcttctcctcaaattccttttaccagcatcttttaataaaaggctcagtagaacttgaagtaaagcaacacttttctgtgggatgcttttgagaaaaactgcctatatctcatcttatgctaatactaaaacatgatcttagatactcaagggaagacaaaatctggaagataacgtgttataatttaaatatgtatcagttaaatcatagttattacaggactaagaaattgacagcagtatttgaaagagctgataaaattttgtaggcgtgaggctctgaaagactactaccaatatgtaaatgaaactttttgtcaggcctctgagcccaagctaagccatcatatcccctgtgacctgcacgcacacatccagatggtcggttcctgccttaactgatgacattccaccacaaaagaagtgaaaatggcctgttcctgccttaactgatgacattatcttgtgaaattccttctcctggctcatcctggctcaaaagctcccctactgagcaccttgtgacccccactcctgccaggcagagaacaaccccctttgactgcaattttccttttttctacccaaatcctataaaatggccccacccctatctcccttcactgactctcttttcggactcagcccgcctgcacccaggtgaaataagcagccttgttgctcatgcaaagcctgtttggtggtctcttcatacagacgcgcatgaaactttttaaaacattattattatttaactttgcagatctatttttagtcatcagtatttagcagtaagcagaagccagagaggcactggaggcaaagtatgtacagtgctttctacatttttatcaaaaatcttaagactgtcacctgatacagcacttttttcttttattagcaccttgtgttacactgtgaagcagaatcttgtaagataatacttttaaaaatgttaaaaaacaattagcagaaagaagagttcgtatcataataaaggagcatggattattgcaagggtcaaatggcaaataatggttgagaaaagaaaaagataacaggtgtctgaaaaatgcaaggcttttataattgaatggtttaaaaatgaatgagcagagattagcatgtgaatctctggactaggtaaggaagatctgcattcaaatgtgagtgggcaccatccaatctgctggggccctggagagaacaaaacaaagaggcaaacatgttgatctgctgtgctgaggaggaaaatggcggataaggggacaggactaacgtgcagctcccacatggatggacagaacagcgtgtggcaacgtgtttagtctccttaaaaggtatccaacaaaactaagcttcctaaatgaaggagagatatctatgctgagaattcaccactaccaagccagcactataagaaatgctgaaaggagttctaaatctttgttttttgtttctttttttgagatggaatcttgctctgtcgcccaggcgggaaggcagtggtgtgatcttggctcactgcgacctctgcctaatgggttcaagtgatttttgtacctcagcctcctcagtagctgggattataggggcttaccaacatgcccagctaatttttgtattttttgtagagatagggttttgccatgttggccaggctggtcttgaactcctgacttcaggtgatgcccgcctgggcctcccgaagtgctgggattacaggtgtgagccactacactcagcctaggaattctaaatcttgaaacaaaaccttgaagtacaccaaaatagagccttcttaaaacctaaatcttacagggcctatacaataacacaatgaaaaaacaacaaaatcaaagtattcaagcaacaactagcatgatgaatagaatagtacctcacatctcaaatactacgttggatgtaaatggcctaaatgctcctcttaaaagatacatttggaccaccaaccaagaatctgctgtgttcaggagactcacgtaacacataaggactcacataaacttaaggtaaaggggtgggaaaagatattccatgcaaatggaaaccaaaagcaagcaggactagctattcttatatcagacaaaacagactttaaagcaacaacagttaaaaaagacaaagagggacattacatactagtaaaatgattagtccaacaagaaatgtcataatccaaaatatatatgcacctaccaccagagcttccaaatttataaaaccattactactagacctaagaaattagacagatggcaacacaataatagtgggtgacttcaatactccactgacagccctagacgggtcatcaagacagaaagtcaacaaagaaacaatggacttaaactataccttagaacaaatggacttaacagatacctacggaacattctacccaaaaactgcagaatatacattattttcaccagcacacggagcattctcaaggatagaccatatggtaggccacaaaacaagtctcaataaacttaagaaaactgaaattgtatcaagtaccctctcacaccacagtggaatacaattggaaattaactccaaaaggaaccctcaaaactatatacaaatacatggaaatttaataatctgctcttgaatgatctttgtgtcaacaatgaaatcaagatggaaattaaaattttttgaactgaacaatagtgacacaacccatcaaaacctctgggatacagcaaaagcggcactacatttagtaagttcacagcattaaatgtctacatcaaaaagtctgaaagagcataaacagacaatctaagctcacacctcaaggaactagagaaacaagaacaaatcaaactcaaacccagcagaagaaaagaaataacaaatatcagagcagaactaaataaaactgaagcaaacactacaaaagataaatgaaacaaaaagctggttctgtggaaaaataaagaaaatcggtagaccattagcaagattaaccaaaaaaagaagagagaagatctgaataagctcaattagagacgaaatgggagatactacaaccgataccacagaaatacaaaagatcattcaaggctactatgaacacctttatgcacaaaaactagaaaacctagagaaaaatggataaattcctggaaatatacaacccttctagattaaaccagaaagaaatggaaactctgaacagaccaataacaagtagcacgactgaaacagtaataaaaaaactgccaacaaaacaaagtccaggaccagatggattcacagctgaattctatcagacattcaaagaactggtaccaatcctactgaaactattccaaaagatagggaaagagggaatcctccctaaatcattcaatgaagccaatatcgccctaattccaaaatcaggaaatgacataacaaaagaaaactagagaccaatattcctcatgcacacagatgcaaaaaccctcaacaaaatactagctaaccaactccaacagcatatcaaaaagataatacaccatgatcaagtgggtttcttgccagggatatagggctggtttaacatacgcaagtcaataaatatgatataccacataaacaattaaaaacaaaaatcatatgatcatctcaatagacgcagaaaaagcatttgacaaaatcaagcatcctttatgatttaaaccctcagcaaaactggcatacaagggacgtaccttaaaagtaatgaaagccatctatgataaacccatagccaacattatactgaacagggaaaagttgaaagcattccccctgagaactggaacaagacaaggatgcccactttcaccacttctattcaacatagtactggaaatcctagccagtgcaactggacaagagaaagaaagggcattcaaatcagtaaagaggaagtcaaactgtcactattcaccgatgatatgatagcatacctagaaaaccctaaagactcatccaaaaagatcctagatctgataaataaatccagcaaagtttcaggatacaaaatcaatgtgcgcaaaccagtagcattgctatacaccaacagcaaccaagctgagaatcaaatcaattactctaccccccttacaacacctgccaaaaaaaaaaaaaataataatacttaggaatacacctaatcaaggaggtgaaagatctctaaaaggaaaactacaaaacactgctgaaagaaaccacagacacacacaaatggaaacgcatcccatgttcatggatgggtagaatcgatattgtgaaaatgaccatactgccaaaagcaatctataaatttaatgtaattcccatcaaaatgccatcatcattcttcacagaactaggaaaaaaaatcctgaaattcatatggaacaaaataagagcctgcatagccaagcaagactaaacaaaaagaacaaatctagaggcatctcattacctgacttcaaactatactactaggctattgttaccaaaatagcatggtacttgtacaaaaacaggcacgtagaccaatggaacagaatagagaacccagaaataaagccaaatacttacaaccatctgatctttgacaaagtaaacaaaaacaaagtggggaaaggacaccctattgaaccattggtgctgggataactggcaagccacatgtaggagaattaaactggatcctcatttctcaccttatgcagaaaactcaagatggatcgaagacttaaagataagacctgaaactgtaaaaattctagaatataacattggaaaaactcttctagacattggcttaagtagagttcatgaccaagaacctaaatgcaaatgcaacaaaaacaaatagatgggacttaattaagctaaaaagcgtctgcatagcaaaataaataatcagcagagtaaatagacaacccatagagtgggagaaaatcttcgtaaactatgcatctgagaaaggactaatgtccagaatctataaggaactcaaaaaagtcagcaagaaaaaaacaatcccatcaaaaagtgtgttaaggatatgaacagacaattctcaaaagatatacaaatggtcaagaaacatatgaagaaatgctcaacatccctgattatcagggaaatgcaaatcaaagccacagtgcaataccaccttactcctgcaagaatggccgtaatttaaaaataaaaaaaatttcagatgttggcatggatgtggtaataagggaacacttctacattgctggtgggaatgtaaactagtacaaccactatggtaaacagtatggagagtccttaaagaactgaaagtagaactatcatttgatctagcaatcccaccactgggtactacccagaggaaaataagtcattatataaaaaagacaaacacacagatttatagtagcacaatctgcaattgcaaaaatatggaaccaacctaaatgcccatcaactaatgagtggataaagaaaatgtggtatacatataccatggaatgctactcatccataaaaaggagagaaataatggcattcgcagcaacctgaatacagctggagaccattattctaagcgaagtaattcaggaatggaaaaccaaacattctatgttctcagttataaatgggagctaagcaatgaggatgcaaaggcttaagaatgatataatggactctggggacttggggggaagagtgggaggcagtgggggataagagtacacattgggtgcagtgtactgcttgagtgatgggtgcaccaaaatctcagaaatcactactaaagaacttacctatgtaaccaaacaccctacctgttccccaaaaacaactgaaataatgataacaaatttttaaaaagtgaatgaaaagatgatccagagatatctgaatgcgagaaacaattcaaaatgtggaaaataatttccacttaacatctttcttaaaaagaaccccccccacccctgaattttattaatcaaatttaggagagttcatttcccaaaatgataatgacacctttcacatggacactgcttttaaaagatattaaatgtattttcttaccttgaaatgagccagcaaagtcaaaatcatctgtaccttttctcttgcttttcttagtactgactttggagtggacttcaagttctgttacacgaaaaaatttgctaataagcaatttaaaaacaataagactggaaaatattactccaagatatgctaaaatctttattctgatggtaaggcactatactgctattccatgtgggttttgtaattccactagcataggcttgaggacagactgagaaaaagactctaagaattggcacagttctaatattttgtgcaagtacaaaattttctaaatagcttcattaataagaccaaataatataaaaccccttaaaacaagaaacttctgctgtggttcagaataagtaagaagaatgttgggcaggcatgtgcatgctggaggtatgtgaaaggacagaaaggtcagacaacagtctagagacaattctgggtgttccttgctaatttacaagataaaatattcaccttcatctatgctgggctatgatgaatactgattaacttttataaactgctaattactatcaaaaaatggcagcatttcagctcaacatgtattgtacagagaagctagctgctggttaaagtaaaagtccaaagctcaaaaagctgcttaaaagaaaacacacataacacacaataaaaacccttcagctccaaacgagaagggaaaaggtccttttaagtttctggctgacatgagtattaatttgaatacagggctatattaaaaacctttagcagaaaaacaaacttaaggctaaggaagtgaggaagacacagtttatgtcttattttaaaaaatgcttacctggaacgctctcactttcatcatctaacacatccatgaatgttcctccatcttcatcaacttcagcaaattcttcatcatccatacttcctaaagaaacttcatcgtcatccaggttaccaagttcatcatcactaccttctgaatcttcatctaatgtgttatccttagctccttttgttctctttttcacgtttctggaaaaaaacacaacttgtaatacaagaggaggcagtattttctaaagtagtgttttgctgactactagggcagtaggctattaaatgactcagaaggagaaagctttgcagactgctcagagtaaataataacgtgctttataaatgtcaaagatgaaagtactgtatccacttcccaaacttacttgactacatttcccctttatcatatagttctgtggtctactgttctgagggacaacaatttgggaaatgctagaaaaataggaaggagaagatagaagtatgttacccagcaaaatccatatcatcctttccagagctgaaacagttatcatcttcaaatgtgtctgccagacaatacagaaatgtgagatacaacaaagaatgacaagcttgacatatatcttgtatctgaatcaattattctaagtcatgattctgctgtttatgacaagtgaacaccaaaacaatgtaaatgttactgttgctagtgtgccttaataatgtatacaaacctgtgaaatactgatcttagttaaatcccaaaactaaagaaggatccagttaatttcggctctttctacagttcttttatggaaagaggataaatatcaaataaaatgatatttagcaattgtcgtcctttttactctattagaactacttaagtgctcatttttaataggtgtgatacaatatgtaacatctcatgcttgtaattccagcactttgggaggccgaggtggagtgatcatcagcctgggcaacacggcaagaccctatctctattaaaaaaaaaaaaaaaacaaaaacaacaacaacaaaaaaaaaaacaaaaaaaaaacgagccggacatcatggcatgtacctgtagtcccagctacccgtggggctgaggcaggaaaatcgcctgagcccagaaggtctaggctgcagggctgcagtgagttgggattgtgccactgcactccagcctgggagacagagagagcctgtctcaaaacaaacaaacaaaccccccaaaaaacaacaacaaaaaaatatgtaacgtgaaatcagtgtaagtctttccaatttaccatgttttttgtttaagtctattaagtttcaatcaaaatttctgtagctctgtggattaaagataaaaaagatcaaacagtagactattgctatcaattagtactgatatactataatagattatgaatagtaaaaaggatttctttttcacatgagatttggctgtaacaattgaatagacttaagcaaatataaatgttttcttatatagactatccaaagcacaaatcatgtatttttctggtgcaaatgtgggtgaattaccatatatcataaaaatatttgtttcttttgttttttttttgagacaggatttcactctgtcacccaggctagagtgcagtgccgtaatcttggctcacggcaacctctgactcctggattcaagcgattctcgtgcctctgcttctcgagtagctgggactacaggtgcgtgccaccatgcccagctcattttttggggtttttagtagagacagggtttcaccatattggccaggctggtctcgaactcctgacctcaaacaatcttcctgcctcggcctgccaaagtgctgggattacaggtgtgagccacagcgcctggccccaaatatttcttaatcttccactgtgatttgcatgatattcttagctaagtgattttttaaaactaaggccacttctcccactaatgttccatggtctattaacacatagtagtagattattttacaaagagtcaacaaaacaaattaccaatcagctcttcaaattcttcatcatccacgtcttctatactttcttcatctgcatcccgtttttgtttctctttaacagcaacttttttataatacctataatattcatgttatatatttgacaattttattaaaggtctaatcttactatatatcatcaaagcacctatgaccagtggcaaaccacaactgtaaaatcttaagtatactcaattggaaataaatgactgaaatttgtatctaatatacaaaaaatagtttaactcaataaaaagtagctggaatcttttaagtgtaatacatttcaaagataatattttatcagccctattcttatattagaatacagcaaaacttagccatttacagatgtaatcaaaccctcaaaattattcattctaaatgattttaaaaaacaagccaaatcaaacctaattaaccagtcaaccagatgagataagaggtactttactaccctaaggcattaggttatgatactagttggtttaggacttatttctataacagtgcactgaatccattctaagggccatggtctggataaattacccatgagttatcactatattaaacttaaagtattatattaaaatctatattaaaggtagattttaagcctataaagaaaattattataaaaggaaattaaaggctaaattccaaaaagaagcataaaacaaaatttatatgctaaattaacaaaactcccaaatttactttagttttactaagatatattaagattagcaaaatgacggatttgtaaattttcttaacaaacacagacatatcctttgatcttttcaaaatatgctgattagatttcataaaatgaagcatttaaaactaaggccacttctcccactaatgttccatggtctatttacacacagtagtagattattgaagtagattatttcataaaatgaagcattttatgaaatctaaaaatttaaattttagcagtttccccaaatgaaactatattatgtatagtacctgtggaaaaacacttcatccactggtatttggctttcttcttttgcaaggaactccttactgttcactacaaaaataaatttaaacattttaacttcatatagcaatcccctttatgttactcaagctcttaagacaaaatacagcataatctgtaattctaaaaatctcagaattgtgtgggaaggtagacagaagggactctggagtgcaagggacaatctctgaaaaagtctgtgtgaagacccccccaacatttgaaacttcactggctacagcataaagtaggcagtacatagctgtcagtgccgttacagtgaaacaacagggttctcttactgttcttcatttgcatccaggacccaactttcaagagaaataaaaaattcaaagagttattttaataaataatcactttaaacttgtcattttcagctcaaaaaatgacaagcttgccattaatgcgtgccattctgggaataaacaggaagttaacagagttttcctttatactgaggaaaactaagaaataaggaactacaagaaatcagttttacctcttcagaataaaaattgctgactcatcctgagtaaaaggagatttggcttttaattctaacttactaactgtgggtaagtccttttacatctctggacctctgtgaagtaagtcactggaaattaaatgatctataaggtctaatttaatcctggtctctgaacaaaagggagatgagatctggtatgcaaagaaatgtctgctttgaatacaacaacagactcagatccagaagatggctagcaaatatagaagtaggttattaagtttaaaatgatgctctgtgacaaaaccagctgtgggtttttgtgctgctaagctgatattagagagctttaagatggtctgaattgtaagcaataataattatatacataggggttgtggatgaagctacggatgataaaatggtgacaactgtcaaagctgggtgatggtaatggggagggggttcatcatactattttgtttattttggatatgtttcaaatttgctgtaataaagttaaaaaaaaaaaaaaaaaggcccagtcagatacagtagatttaagaatacctattcttgggaaaaaagatggataatgtctttgatgctcaggttttattctgataaattagaacaaagaataatacaatttatgcatctttgtcttatattgtcttttcagtttcaactgtctaaggtttatacttaccaggaagatgacgaatatccttaataaaatgttttcttttcggctgcatcacaacactatctgtgttttctgaaatgtaaaattatgacagtataatgcaaaacctagttataagctcatattgtttattatgtattaaaaatgaaagccaaataattcactaaatagaagcatacctttgcctttatggggctttggatttcggtatacaaatcgatccaaaaatctcattagagtgaaatcctgcagtgggtcccctgaatactgaatatagtttccctgaaaagtggagcggggatttaaaaacttaattcaaattatgtctatgaatccaagtaagaaaaaggaagaaaaagataatttctattacactgtattgaagatacaaatatgcaataaatgactcttcaaatatctctctcatgcacattatacttaaaaaattaaacacacagatacatatacatacatattctaggatgtaatgttgatttgatggatagactaatattaataatgcaggccatctaaccattaatcaggaaccaaaccctgaagtggcaaacacagcaaatgggaaagtgaggcagtatttctccaggagaggagctagaaggtaataaataaataactgcgtggctttcaatgtcttattgcttccactcatctcagagtgggaaaagttatctgctactctgtatgaaacaagtcactgcttctttatacgagcagtaaaatgtacaagattctctctgttagagaaaacactgtatgaccaattattgattatctaaaatgatactttttttcttatttctcatctttggatttattttagactcacctgaaggatggtctttgcaaaaagggccacggagggatgaaaatgcacagataactaaaaagaaaaatgtgaataatatcaatatttctaaggtcgactcttagtacatttatagcttatttaagaaaatcgggctgggtgtggtggctcacacctgtaattccagcactttgggaggctcaggcaggcagattgcttgagcccagaagttgagactggcctgggcaatatggcgaaaccccatgtctacaaaaagtacaaaaatagtcagggtgtgatggtgcgcgcgtgcctgtactcccagctactcaggaggctaaagtgggaggactgcctgggcccaggaggtcgaggctgcagtgagctgacatggcaccactgcactccagcctgggtgacagagtgagaccctatttcaacaacaacaaaaatgaaaatgcaaaaatttgaaatttaagccaatacattaaaaaagtgattctcaaaacatattggtctcaggaccatttcctacacttaaaaaccaaaaattccatcagtttctattcaacaggtttatatctacagacacctatgttataaaaataaacagaaaaattgtaaatacttataggtccattaaaaataacaataaagcggccaggcgcggtggctcatgcctgtaatcccagcaccttgggaggctgaggtgggcggatcacgaggtcaggagatcgagaccatcctggctaacatggtgaaaccccatctctactaaaaatacaaaaaattagccgggcgtggtggcgggtgcctgtagtcccagctactcgggaggctgaggcaggagaatggtgtgaacctgggaggcggaacttggagtgagccgagatcgcgccactgcactctggcctaggcaacagagcaagactctgtctcaaaaaaaaaaaacaaaaaacaaaaacaaaaaccataaagctactacatactagtaagtagcatatttatgaaaaataattatgcagccaggcgaggtggctcatgcctgtaatcccagcattttgggaggccgaggcgggcggatcacgaggtcaggagatcgagaccatcctggctaacacggtgaaaccccgtctctactaaaaatacaaaaaattagccaggcgtggcggtgtgcgcctgtagtctcagctactcgggaggctgaggcaggaggatggtgtgaacccgggaggcggagcttgcagtgagctgagatcgcaccaccgcactccagcctgggcgacagagcaagactctgcctcaaaaaaaaaaagaaaaaagaaaaaaagaaaaataattatgcttcaggacgaaatatatagcgagtagtattactttacagttttgcaaatctctttaatgtctggcttaacagaagagagtggattatttcatctgcttctgtattccacgttgaaacatacaatctggcctcatgtgtagaaaatagtctttcacatagctgtgaattttcttctttagtactataccaaaaccaaagattagttgtaatatggaatctgaaacccatattcaattggcttttggtacttgctacttaaaattatttggtctactttgaatcaatcatttattcactcaagaatttgtaacattcaggtggcacagtggctcatgcctgtaatcccagcactttgggaggctgaggtaggtggatcacctgaagtcaggagttcgagaccagcctggacaacatggcaaaacactgtctgtgctaaaaataaaaaaattagctgggcatggtggcatgctcctgtaatcccagctactcaggaggtagaggttgcagtgagccgagatcgcgccactgcattccagtatgggtgacagaaccttctcgtttcaaaaaaaagaatttgtaacattgtgcattggtcattggaaaaataccatatgcagtccttccaaacactggcacatttcgttatactttaccacaacaatcacattgttagaaccactgatttcatcagaaaagttttacaaattgagaaactgtcaagctcaaggtggtggttacaagatttttaaaactttaatctttgctcgaaagctttatttttgaattttattgctgacaacaaatactgccagcttttttgtttcattcattttcaagaaaatatctcccaaatacctaagcctgaataaccagtttgtcagtctttcatgaaagagcagctagatgagcttgcaacaactggtaagcacttgtccttgagacacgtgacaaccttcatgctttaggtaggcagcacaggtatgttacgcatacttgctatgtatgcacacgaaatactaaaaagacatgttactttaaggtcaagacactaaaatcagtaattctccctgtgtcatcattcttaagtcatactggcttttttttttttaactgcacatatgtggcagtgatgaatataatggcttctgatgcagcttggtgctgtctttattcaggataagctgcagcagttttacctatcatttcttttatagtatcagtgccaccgtcaacacagtgatgaaaacaaataatgtactggtattactatggaaagagctgtgacctggccgactcactaaaaaggtatcaggaactcttagtggtctggccgcactttgagaatagctgcataagatacttactggctttacacaaaaagtcacagaaaggttattaaaaatatgaattcctcttacaaattcagaaaagtaactttacttgcaaaaaattttatcataaaacttttcagaggtatctaataaataaagcaaaatttatccattttctcaactctatatgcaataatctacctacaaaaagcaacagtcataacccatgcatgacatccttattttacgtgcacacttaagattttctacaaaatgaacacttcacatagtatcttcccccaaatgtggacttttaatgtttattaatgcttataattatcataaaaaaacaaaaacttcaaggcattacatcctcaagggcaaaaatatacagcataggccgggcgcagtggctcatgcctgtaatcccagcactttgggaggctgaggcaggcggatcacaaggtcaggagatcaagaccatcctggccaacatggtgaaaccccgtctctactaaaaatacaaaaattagctgggcgtggtggtgggcgcctgtaatcccagctacttgggaggctgagccaggagaatggcttgaacccggaaggcggacgttacagtgagccacaatcatgccactgcactccagcctggtgacagaggaagactctgtctcaaaaaaaaaaaaaatatatatatatatatatagcataaatgaataaaagacaatttgaaattattttacctttttgagttcccaaagacttgtattttcagctccacagaacagagggtttctactgaatggatcgtatttatttaactgtttcccacctaggaataacaaaaaaaatacgatttctcaaatgctttcttcctagcccaagaggtcattaaaagcaccaccattaatattctcaacagatatctccaacattcttacttagccaagcaacctagattaaaaactctgagctccctcaagaatttgtcttggtacttaagctagcatctgctcttgaataaagcagagaacatgtttatcccaaacaccaaaagctttcttcaaggccaggtgcagtggctcacacctgtaatcacagcacttagggaggctgaggcgagtggatcatttgagttcaggagttcgagaccagcctgggcaaaatggtgaaaccccatctcttacaaaaaatacaacaaaaaaactagccaggtgtggtggtgtgtgcctgtagtcccagctattcgggagactgaggtgggaggatcacttgagcccaggagatgggagttgcagtgaaccaagatcgtgccattgtgatccagccttcctgacagagcaagaccctgactcaaaaataagtaagtaaaagctcccttcaaaacttctcctttggctgggcacaatggctcatgcctataatcccagcactttgggaggccaaggtggaaaggctgcttgagaccaagagctcgagaccagccggtgcacagagtgggatttcgtctctacaaaaaacacaactagccatacctggtggcacgagcctgtagtcccggctacctgggaggctgaggtgggaggatcgcttgagttcaggagtttgaggctgcagtgagccataatggcccactgtactccagcctggcctgggtgacatagtgagaccctgtctcaaaaaaaacaaaaaccaaaccaaaaaaccccaaacttctccctttcctaaatggcaacaaaaggtgcccattttggggccaaagaggtggaaacgttaagatggaaataatctgaagatgaactaggtctaaagtcttttggagctttagagtgcttcaaatatttgtcatgaaagtatgcccagaaataattctcacttggaacaggtctgacattatcttcatgtttttagaaactcaggattaaaaaaatttaaaacaaagatttttcagaacaaactaggaactgactaccttccaacacacaagctcttcatccttctaaaggattattctcagtttagtcttcaggggaactgatggattcttctcaaacttttctggcagctatcagacttctcttttgtacttcacaaactgaaatttgtagatgaattaatttgactgtgagtcccaaagcaagctgaagaaatgggtctggcaccacatttctcgaacctcaaggctggtgttttcttcacagcctcaaatgaaggggctgcatttctaagatttttttttgactctaacattctattaatagacttttaatttagtttggtgtgtgtatagaaaaccacttaacgtttctatcttgaacagaaagttttctatccctaaaacattactttaagaaactgtgggccaggtacagtggctcacgcctgtaatcccagcactttgggaggctgaggcaggcagatcacctgaggtcaggagtttgagaccagcctggcgaacatggtgaaactccacctctactaaaaatacaaaaattagccaggtgtggtggcacatgcctgtaatcccagctacttgggaggttgaggcaggagaatcacttgaacctgggaggcggaggttgcagtgagccgagatcacgcctctgcattccagcctgggcaacagagtgagactctgtctaaataaataaataagtaaataaaatggtagaatgctattttctatgaaaatcaaagagaaacaaactccctagagaataaagatgaaaaaaactcacctttcaaattatcaaagtgcacccaggaagcaacctctggttttttggtttctacatcagtttcaggaactgtttcctctgtctcaagttttttcactatctctgtttctttgtctgcatcagtgaatttttccatgtcttcatcatcatttgcatcaataaaattttcttcatcatcagactcctaacaaaagtatagtttcataaatctacataaatcaactggaagttgcaataaagtctgtgctccattatgtgatgcagagttttacttattgcaactctggtgaaacgtgaaagttctaataaagtaaaatgatggctatcaatggtatttaaacaagagaggagattacatccttatttctaaacataacacagttaagttttgagctaagaacccctgagccttaaggactctaatacttgaaaacaattagccctcaagtaaatttctgacttgtaaataaccctatgaggtaggtactattatttccatttcattgttaaggaagaagacttaagaggtctactaagttttatagtcttccaaatctcatataatggtagcttctagtatagtacagtttattgcaagtagaagagttgagcaacatgcccacctagtaaactgtacagctggtactaaaatctaggtttgtcctattccagaactcacactcatatgctccagagaactaggttactgtcatttgaagcaaagaaaaacaaaacaaaaaccaatatatttcagcacccactcaatttaaaaagcagttgtaaaatataccggatgatcatctagttggcttcttaaacctggttttgctttaaggatctcagacacaagatataaagctccacatataaatggtggcatctgttgacaagtaacttgaagtaacctcttcacaaaagccttcacccggcgcaacacaatgtcagctttcagagatttgtagacaaggttaagaaacatagcttgcttggaacacgtcatcaaccctggatccaacatcttcctgcaaaacaaaaccaaggtcaaatatttatgtataaaaccatctccacaaccaatggtcacatattagaaatagctactaacctcatcttagttagggataactttgctgcttattttagaacaagagaccctgccctaagaggtaagatggaagtcaatgaccagaaaaggatgatgatggcaccaggaaaaaccaacagcaacagacacaggaataggcatttttgagtgtgtggttttcttgtcttttccaagtgtttttctgttttctatatcaacagggcacagccctaacagtatttacagaaccccaccagaaaagctaatctaaaaccagatagtgaaaactgacccatgaaagcagaacattagaagatttgggtttttgtccttgtataactacctactagcagggggaccagaggccgcctcttcatgattttagtgaagaccatcgatgaacagcagaaaattaaattctaaggacttcagagaatctctagtccaatgtactagctgtgtaacattcctctcatacacgctattttcactgcccagagtgcttctctccaactctctgcatgtccacagtatccaaaattggttcttctattagtctctcagtcccatgtttgtgttcttcatagtttcacaaacttgattttcctgcctttccctcttctctaaaggtccaatgaaatagggattatgcctgttattcactgttgtaaccccagtgcctggcagttaatacctttacatgacagttttccaaatacttgaacctatttagctattatgtgcttgtctctccctaatgtctgtcttctgtaggctgctctactttgatctcatgatactttaaaaattctctatcctaggtgctgaatcctacacatgtccccaaccggtctagacctgcagatattaggacacccagaattaacacaatcctccagattagctctattaacacctggaatcattacttcctttgttttaagcatttccattaattttttcctactaacactagaaatgaaaaatacttaagcttgtgaagcactttcctattgctctgaatactctgggaaatatcacccttttggtaatattctgggatattctggattattcaattttctctctttacatttaaattttccctctttacatttaaattttccaacatttccatccattttgcaatttattattaggcataaattacatctcacatcaacagaaacatctgagaagaatttagagacatgtctctatcatttcatgaaatattttcctaatgttttgataaatatttttgtaaaccaaatcatgtcatttcttttatccctcaattaactaggggttttcttaatgtgaaggattcctaataaaaccaagagcaaacaaacactttaagaaggcctaaaggcctgttaagaaactccatctgtgagcgcttttggcaaatagtaatttcaaaaacttaaaaatccacccttcctcagagatgttagactatgatgttaaatagagacagaaaaatgttttctaatagatttcaaacactttctaaaaatcaaaaattcctatgaccatcaaaagttcaaaataatgaaaccaccccccttcaaaacaaacaaacaaacaaacaaacaaacaaactaacaaaaacaaaactcaagatcccgaaacctctacattttcagccttggaactcttttcaaattaacagtgttaagttatctattacttcaaagagttgtggaaaggcttctgagtctttttagtggaccagagcaatcagtgctatgaaatgtcatgaaatctacagcaagtggacctggacttgccacctaacttggtctcttaatatctgtgtgaccttgcccaaattattgtatctcacagtgtggggaaaaggaagagagatcagattgttactgtgtctgtgtagaaagaagtagacataggagactccattttgttatgtactaagaaaaattcttctgccttgagattctgttaatctataaccttacccccaaccccgtgctctctgaaacatgtgctgtgtccactcagagttgaatggattaagggcggtgcaagatgtgctttgttaaacagatgcttgaaggcagcatgctccttaagagtcatcaccactccctaatctcaagtacccagggacacaaaaactgcggaaggccgcagggacctctgcctaggaaagccaggtattgtccaaggtttctccccatgtgatagtctgaaatatggcctcgtgggaagggaaagacctgaccgtcccccagcccgacacccgtaaagggtctgtgctgaggaggattagtaaaagaggaaggaatgcctcttgcagttgagacaagaggaaggcatctgtctcctgcctgtccctgggcaatggaatgtctcggtataaaacccgattgtatgctccatctactgagatagggaaaaaccgccttagggctggaggtgggacctgtgggcagcaatactgctttgtaaagcattgagatgtttatgtgtatgcatatctaaaagcacagcacttaatcctttacattgtctatgatgcaaagacctttgttcacgtgtttgtctgctgaccctctccccacaattgtcttgtgaccctgacacatccccctcttcgagaaacaccgacagatgatcaataaatactaagggaactcagaggctggcgggatcctccatatgctgaacgctggttccccggttccccttatttctttctctatactttgtctctgtgtctttttcttttccaaatctctcgtcccaccttacgagaaacacccacaggtgtgtaggggcaacccacccctacatcacagactggagagctgttaagaggattaaactaaagaaacatggatgactatcagtaataaggatagccgccaacatttcacatagcactaagtgttaggcactgttaagcacttaatatacatagaaagattacatgggttaacacacataacctcccaaccttcattaaagccccagttctgtcatttacaagctgtagaaccttgtgcaagtttcaaaatcttcataataatcatatgagatagctgcttttctctccatcctacagacaaatccacttaagcatgataacatgggatgaattatgtctaccaataggtttttagtggggatcaagtaatttgcccaaaattacacagaaaactaatggcagggactcaaacccaggcggcgtggcttaagtctaagatacgaaccactactccacattttctcacaagatatatctatgtaaaaatataaaaatgaatcagaaggaaatatattaatttcttgaacacagttgctatgttcgactgtctcttaaacagctccaaactgtttacacattgctgaaaatatgatgcctcaatgggtgagttgcaaaattcagtaaagaaaatcttcatctccattaaaaaacaacaacaaaaaaaaccctgcaccctgcatcccccaaaactctctacttaacatactttgtttaccaccgctcccctctctgccacctcctccaatatgaatgtgagcgcctccaggggtgggatttctgttcgctgtgcctcctgtgcacctagagcatggcaccatactgcaggcactcagaaaatacttgttgaatgagttactgtgtgaatgcattcaactgtgtgaaagacagcagggaaaagatagaggactgaggagaatgggaagacggaaactgcaattatatctgcaattttatttctttaatatcccaaaagatttaaaacaaatatagcaaaatgttaattctgaaatactaggtggtagatatgaatgaatcttttgggtatttttctgtattttacaacctctcaaaatgaaaaatgtattcaaagcatctaatataatttgtgcccatcagggaaacaaagattaagtgacttacttgaaggtggcgagtagcaagctgctgagggggcctaaaaccaaattttctaactctttttcttgccccacagagggcactgcttgtgctgtactacatcaagttattatttcatgtctcatattggaagggtatgttcttacctgtataatgctgtgtaatatcgatccgatattgtctgctgagaattcattacttggaaaagcaacattaaagcctggacactggtattaaaattcacaatatgcaacactttaaacagtgtgtcaatctgctcccttactttgtcatcaccagtctgggaataagggtatgccctattcacacctgttaaaagggcgctaagcatttttgattcaacatctttttttttgacacaagtccgaaaaaagcaaaagtaaacagttattaatttgttagccaattcactttcttcatgggacagagccatttgatttaaaaagcaaattgcataatattgagctttggagctgatatttgagcggaagagtagcctttctacttcaccagacacaactcctttcatattgggatgtttacaaagtaatgtctctaacagatgggatgcttttgtggcaattctgttctgaggatctcccagtttatttaccacttgcacaagaagagccttttcttcctcaggcttgttacaaagcagctcatgagccacggtaagggctcgagttttagtggttactaatgtatcatgacttaaagtttctaagacctgcacaaattcagccactaagtgtttcagctggtgttcaaaataccataatatcagtcttctatctcttgagtccttgttgccactggacaactgttccagtttgtcaaaaggacgctggctgaaaatcctcagcttccgattgtctggcaaaaggtctgtgataagcaactctttgaaagtatccaaggccataaggcactgctgtttgctgcccttctttttaacaaggttcacaagagtttctacaaactgaagtgtgtgaacggcatcatcctgaataagaagaatcatggctgccatcctgtcacctagtgtccccgatgacacaattgccttcatccaggtagaagaggctcccttttgactattcgtcttacttttgaataagttgatttcatgctgatacagcttctgagcaagggttttgtacttagatacaacatcctgaggctggggtttcaaagaatattcattgctgtactccagatcataccatttgcctccaggcctaagtaacaaagtctgtctctcaaaaaattcaaagatgttctgtttatctttctttactttcggtgtggtactgccattctcatcagaatgtggttctggcctattcttatttttcaccttattaactgatgtcctttgactttctgctgtatttttattatttattttaggtatttttacttcttttttgctggaattttctttttcagctggttcatcttcttcaactaaggaagcttttgtatacttcgccaaattaagattttgaataaatgcttccaattcaccttgctgaaggtcatcgattgctccttttttgcctccatctatcacttcctcattctcatccaaagtagccagcataaggtaatcttgctgcattaaaaacataagttaaaaatacattacaaatgtgaaaaataaaaccataaaataataggaaacacaacataattttaaaaataatttcggaactggaaaaatcctttcaaatttgacataaaactcagggtccacaaaggaaaggataagtaaatttctctttctctctctttcttttacacacacacacacgcacacacactttttatttcgatataggaaaaaaatataaattataaactggaaaaaaaatacaagcaattcctatcaaagtaattgggtttaatcccttaatataagtttctacacatcagtaagtgacaacccaaaagaaaaatgtgcaaaggacatgaacagttcatagaaaaaaagggttctttaagaatatgaaaagatgttcaacctcactgaggtttagacaaatccacattaaaaccacaatgatacatccatcttttaatttatcagatgagcaaagatacactgcaagatgagcaagatacaatgacaggtgatgctggggaaggggtggcggaaacggcactttcatacatggttgatgtgagtgtaaactgacacaacctccatggaggacaatttgtcaactccaatcacaactatttaatacaaggcacacatctgttggcccagcagcttcatttctaaaaattaactaactgattgagacatggtctcgctctgttgtccaggcttgagtacagtggcatgaccatggctgaactgcagcctcaacctcccaggctgaagtgatcctccaacctcagcctgtagctggcactacacgcccagctatttaaaaaaaaaatttttttttgagatgaggtctccttatgttgcccaggctggtctcaaactcctggactcaaggtatcctcccacctctgactcccaaagtgctgggattatgggtgtgagccactgtgcctggctcatttctacaaatttatactacatatacacttacaaaagtgggggaaaaacacgattaaggttattaactgtagtattatttaaaatagtgaaagactggcaataatttaaatattcacaataaatggctggttagataaattaagacagacaaaatgatttatgcagccatagcaatgacacagaacgttatgcactgatatagaaggatttctaagacagaaaagaaagcaaaatgtagagataggtgtatatatatggtaccatttatgtaaaaaagatacacccgtatttcatacacataaatgagtatgtatatgcttgaaaaggtatatagtatccctgaaagatataaaatgcagttgtaaaaataattgcttcctatcagggcaatggttatggctgagataaaagtggaaacaatttgacttcactatgtatcttttaaagtttgcaccacgtgtttcatgtgtatatattacctattcaaaacttaaatatacacaagcacagagcaaactgtgaatctgcctatctctaactaactcctccaccttgaaagtccagtctccaaacaaaataatattaaaaacaaagttaatttctgttccttatctgcttaaaatcttccagtggttttgcatcaaactcagagcaaaagcctgccctctgacccctcggccctcctttcttactattctccccttaactcactctgcctctgctacactggcattttggctgctcatggaataggttaggcactcttctgcctgtctttgcatttgctgttccaactgactggaatggcagctcactccttcctgtcctttaggattctgctcaaacatttccgtgatgtgtttgtcgatcatctcatttaatactaacgcgctcccactccttatcgtccttccttgttttattttcttttatagcactaccccgcgtctgctgtactatgtgtttaaaagtttgtttactgtttctctcccttaattaggatgctccaaaaaagagggcttctggggcatacagtgacacgtgcatgtactctatgagaacagaaatgaaaattccaataccactggtgttcaaaacactcataccacaaggtcaggaccaagaaaagccactctccgacctgatggtgtgatggttataccacgtcaataaaatcagaagatcgcctacatcctaagaatagccagagaatacaacgttcaattcgaaacttttcttttgtaaacagcagtggaaaccggcgtgggaagcgcaccgaacacatgcttcagaggctgggatctcggtcctggacgcccgcgctctacgcagcgcggaagcggcggggcagtcagcctagccaccttcggaactctccacgcctgatcccgttccccggagcccgcggccgttaccttggtgcctccgagccgtaacacttcctccagggagaacccattctcggcttcactagtattatcctcatcctcctcgtccggatcttctactgcctcctcggggcgccaaggccgcttggcatggaactccaaaggctccttgactgcggccatggcgggcaaagcatacgcgcgtgaaactc

SEQ ID NO: 8025 - DNA, 376 bp, Homo sapiens
tctcctttatcattgttgtccaattacatatatacgttttacatataaacatgcagtaattctatttacctccaaaactgcttgctgggaggatgtagtgggggcttgtgctaaactccctcctggctgggacacttgaacctgtcctcctacaccacccataggaactaaaagatttgattccacataaggctgcaccactgtgggaaagtacccaggtgtagccagtacttctgtcggcatgggaggggataggactgtagaatggatgcaaacagaagccacgttggaagagggagcaatatttgaatctcctgggtactgtggtggcagtcgaggtgggaagccctgtgacagaaatgaggaaggtgagtta

SEQ ID NO: 8026 - DNA, 3361 bp, Homo sapiens
tctcctttatcattgttgtccaattacatatatacgttttacatataaacatgcagtaattctatttacctccaaaactgcttgctgggaggatgtagtgggggcttgtgctaaactccctcctggctgggacacttgaacctgtcctcctacaccacccataggaactaaaagatttgattccacataaggctgcaccactgtgggaaagtacccaggtgtagccagtacttctgtcggcatgggaggggataggactgtagaatggatgcaaacagaagccacgttggaagagggagcaatatttgaatctcctgggtactgtggtggcagtcgaggtgggaagccctgtgacagaaatgaggaaggtgagttagagcaggttgggggtcaataaattagcaaaacagcaagacatgcaaaaaaaaaaaaaagaagcacacagcaaagaagaatagtagccaatctctttctaataatctaaagggcatataaagaccacattcttgaaatgaagtagtagactggttccaacagaagagacaggactctacaatactactttattgtcggttatcttcacctagagatgatttaaataggaggaacacaatttcttcctagccaatcttaaatggaaaaatgcaaaaattcttccacataacagtcatatcatgaaatgctaattttcccagtctaaaccccgaagctttttgttgataccatgttggctattctatttattctacccatatatgtaaaagttgccaggtgtactattaaccacatctagcattcaatcagcttacagtgaatactgagagaaccatttttctctgaagaagtgtcttgagaaaaatggatcaggaatcactgaacatcattatccaatcctttctcagaattttactattttgcttctctagttgacatgttattgctagttattctgacactcaactattagatttccatgttcctgatgatctactaggatcaaactctgtggtgccctcttttgctaactaacacaatacctggtacagaacatctccagaggaaagtggaacctcagcagcttgtccaaggttagctggtattcccatggactgaactgctggttgtaggagctgtgggtgaacctgacttggcagctgagtcacaggctgcagaagggttggaagctgactaggaaccacagttgatacccccgggatcgcagctgttgtagcagatgaagccaacgtgagcagaggctgagtaatgccagctgccattgtgatgggaagggatgagaaacctgtctgagccgtagacacatgaggagttgatatgggaatctgagagacagggtactgagggagcaagggagtagggagcggctgtcccactggaaggaaatgagcaccagagtggactggaacaaccgagggttgtgtcgcaactgggatctgaggttcgccttggatagttggtactggctgggaaactggaagctgggaaggtaaagaaaaacaaaacagacaggcttaaaaaaaaaaaaaaaaaaaaaaaagcaaggctgccaaaagcaagatttatgtattagccaaaaagaaggaaaaaacaaacaaaaaaaaaaacaccaaaccaacaaaaccctgcatacattagtgttaagttaatatgccacataagaatatggaaaggagagcaggagagaaagaggctaaatagactattactgttctacaccttttgtcatagaaatatttgctaatgcttcagcatttggcaatagaagaggacccttccatagacaaggggttggcttttttttttaacagctttattggaatatattttatataccataatgctatcactaaagttacgactgctgttacagtagttactgaaattcaaatgaattccttcccagtggaattaagatttcattcgtattatttctaaaattcttaagtccaacatggctcaataaaaattggtataattcacatatttcactcattctaggatgcaatcatccctctccactacctgatcattttaacatgtgagaaattgggatctactttataactgataatgtggtacataaaatatggtacattttaaagttgatagcatctcagatgtgatgaaatattagggtaacaatacactgtgcacatacatgcacaacagtactcaaaaataaagttgaaaaaaggtcattcagaaaagcataccttctacagggtacttctcaagtgattaggaggactacttaagaaaaaaaaacattccacacagtaaacagtgcagaaatctacatgaaaataaagcatagtttcaaacctagaatatcagacatagctgacacaattctagggaatgtcataggttcagttaccagagcacctttatttaacctgttatttctaatacctgttacatcaattttggactggtaagactagaagtgaaactttggattgtcactgctgtcagtaacgtacccatttacattaaataatgcatatgcaccaatgaggtgatcttcacttcatttctgcaatgagattaacctacttcaagggttggttacccttagaagaaaaggtagaagtctatccacatgaaaggacaagttacatggaaatcccttttagcaccctttcagaaattaagagtttacctgtttaaaaaaaaaaaaaaagtttacctgttttccagctgatacttgaggcaagacttgtggagcttgaggctgactcactggctgtgcagtagtggcctcactggaggttgatgtctgtgaaagtgaatactgcactgtctgttgaggaggggctgtctgctgtattccctgctgctaagaataaaatacaatgattcagttttatttcaaatcaataacagcatgtttctaaggaagcatgtttacctaaagccttcagtgtctgtaaataatgatgattttagtaatcaagacatgcacaaacccaaattcatcaatttccattatatatttgttttccctctgatgttctttgtgatggtgccaccaggaaaaattaaccaatcttttaatactcaagttaccattggctcttcacccaattatctccctcaccccaacaataggtctttacaaagacatttacataacatatccagacagttcctttccccatcccatccctgccattcccttttccctatctcttggcatcagctctctctttggcacctatatcagatagatccaatagcttcctttaatcttttttccttaccctattttatcaactgtataattaatatgcttgaagaatagctttgattatagctacaaaatagggaggaaagcactgga

SEQ ID NO: 8027 - DNA, 1068 bp, Homo sapiens
ttctaataatctaaagggcatataaagaccacattcttgaaatgaagtagtagactggttccaacagaagagacaggactctacaatactactttattgtcggttatcttcacctagagatgatttaaataggaggaacacaatttcttcctagccaatcttaaatggaaaaatgcaaaaattcttccacataacagtcatatcatgaaatgctaattttcccagtctaaaccccgaagctttttgttgataccatgttggctattctatttattctacccatatatgtaaaagttgccaggtgtactattaaccacatctagcattcaatcagcttacagtgaatactgagagaaccatttttctctgaagaagtgtcttgagaaaaatggatcaggaatcactgaacatcattatccaatcctttctcagaattttactattttgcttctctagttgacatgttattgctagttattctgacactcaactattagatttccatgttcctgatgatctactaggatcaaactctgtggtgccctcttttgctaactaacacaatacctggtacagaacatctccagaggaaagtggaacctcagcagcttgtccaaggttagctggtattcccatggactgaactgctggttgtaggagctgtgggtgaacctgacttggcagctgagtcacaggctgcagaagggttggaagctgactaggaaccacagttgatacccccgggatcgcagctgttgtagcagatgaagccaacgtgagcagaggctgagtaatgccagctgccattgtgatgggaagggatgagaaacctgtctgagccgtagacacatgaggagttgatatgggaatctgagagacagggtactgagggagcaagggagtagggagcggctgtcccactggaaggaaatgagcaccagagtggactggaacaaccgagggttgtgtcgcaactgggatctgaggttcgccttggatagttggtactggctgggaaactggaagctgggaaggtaaagaaaaacaaaacagacaggcttaaaaaaa

SEQ ID NO: 8028 - DNA, 19167 bp, Homo sapiens
tagagatggggtatcaccatgttgcccagggttggtctcgagctcctggcctcaagcaatcttcccgcctcggcctcccaaagtgctgggattacaggtgtacgccaccgtgtctggctgatttctctcatttctaatgctagggcagacagacagcactgactacgactgtggagttcagtcttcattattctaaatgacccagcaatctattgcctagataccatatccactctctgtcacagatccatgaagaagcacttctaccagaaagttacattgaaatttgtagataacttgttattttgacattttttatcataattaatgtgggggcccaaacttctgagggtaacagtaattcagccaagccactgagtagatgatatacaaaaagagacaaatgaaaatggactgcgtgaaacatcagatccaagcagcagaaacacaaggacaaggaaggagtaaaggtgttacacacaaagagccaagcagggcgtactcagaaatcgggtcctcctgccaccaggtttgaatgtcacctgttcagatgcacagttaaacttcgcacagcctgtgagaggggaaaaacagggtagaacagagagaggagaagagacagaacacaactacaagatgttagaaacttgaggctggagtggtgaaatgcactaagatggcacacagaagaacaagcttctggggggaaggtcagatatgtaagagatgaaatattaggtcttaattctacccatctgcaaaatgcggaagcttttcttagttcgaataatgctagctagtttgccctccttaccaatcaagtgcattcttcctgtgaagagactgatctctaatttctgtgaaactgtggcaaaggcacataagccagtacctatatttttttcattcttctcacccagatgcccaagtcttttcaattcttgttctaatatgactaaaagctctttcctctgtgggaattttttcagcaatcactaataaacagagctatatttggaaagtagattatggataaaaaactgaattgtaaggttattcattttagtatgccactcccatacttaaaagtaacaaaattctacaatggctaagaaaatgtattagcttcagaaactgctaaaacaccttagaatttcatccaggaaatctcagcctaatattaaagcctaagttccaaatcccaaatgagcaagtcatataggccacacagatgtaacttttcactgtaattccttgaaaaaaagtaatttcacctaatgggagcagtgagcccaccgattctcattatcactccacttcccttttcacccagattcttcagtgtacaacacacaggctgtgttctggtcagctagtctcccaacccgccttaacaggcttttgtcccaggtatggcaacatctccattttattgtttttggacgatgatggttgctttattaccttgacctggagcagaaaggcttggtactgaaatggcaccatcactggtgaaggctgaatagaggttgtcactggagggagatggcttaaggggctgtaacagctgattctgcccggactctgggatgttgccaggagggtggagggtctgctgggggtgcaagactgaagctgcactctgaccagacaggttacctgccaaaagataaagtggcatgaggaaacatgtccagctcttcccatgcactcatcaggcactgttcttatacatttggtttgttccactgagtgatgaatgatgggtcaaaagctacaaactgatgagaagaacaaagtcctcactaacgggagaagtgaggaatgacactaagactcaatagataggctgggtgttgtggctcacgcctataatatcccagcactttgggaggccaaggtgggcggatcacctgaggtcaggagttcgagaccagcctggccaacatgatgaaaccctgtctctactaaaaatataaaaattagccaggcgtggtggagggtgcctataatcccagctactcaggaggctgaggaaggagaattgcttgaacccagaggcagaggctgcagtgagccgacatcatgccactgcactcaaaaaaaaaaaaaaaaaaagaaaagaatccataggtaatagggccatatgtactattccagagctttttagctttagaaaacctagatgggccacatgtctgagcagcgtaagaagaccagagtacctagtggatacccagattccattctgcaattccatgattgcttttttttttaccctattagaaaatgtgttgaatcattatacaaaaaggtttgctaggcagtctctgcttagactttcctataaacgtgcatcagagcaaatacaaaagaggtgttcaaaaatgatggaggtcactacagagcaatgggtgtttaaaattatttttggtaggttgctttcaataggtcggttgtcctaaaattgactctctgctccccggttcccagttgaattcaagtccactcaaaaagtatgtcaaaattaggattagaatttgattaggatcatagctgggcatagtggctcatgcctgtaatccgcactttgggaggctgaggcgggcggatcacctgaggccagaagtttcagaccagtctggccaacatagtgcaactaaaaatacaaaaatacaaaaattagccaggtgttcttatacatttggtttgggattacatgcttgtaatcccagctacttgggaggctggggcatgagaattgcttgaacctgggagttggaggttgagccactgccgactctgcctcaaaaaaacaaaaacaaaaacaaaaaagatctgattgggatcagatcagaaattagctgatttctcttacaatcacatctctactaatgggctgcatgaactggccctaatgtgctacatttggatatctgtgaacctttccagagaatggaactgctaagaagtttgcaactgctttttaacatattttaaccttcttttacttttcaactaattgtgttaacactaccataatttcaccaaaggattagaaactctctatctatcccaattaaaatatagtccagggccgggcacggtgctcacgcctgtaatcccagcactttgggaggccaaggtgggtggatcacctgagccaggagtttgagaccagcctggccaacatagtgaaaccccatctctactaaaaatacaaaaattagccaggcatggtgacatgtgcctgtaatcccagctactatgcggggctgaggcaggaggatcacttgaaactgggaggcggagaatgcagtgagccgagatcgtgccactgcactccagcctgggcaacagagcgggattctgtctcaaaaaaaaaattcaaagttagcagggcatggtagtgtgtgcctgtaatcccagctacccaggaagctaaggtaggaggaccacctgagcctaggagtttgaggctgttgtgttgtgtgctatgatcacaccactgcactccagtctgggcaacagagtgaggccctgtctcttaaaataaataaatatatatatatactacattacaaaagagtatcacttaactatttctttgattttaatgactagcaagttcttctttttttttttttttttgagacagagtcttgctctgtcaccgaggctggagtgcagtggtgcaatctcagctcactgcaagctccgcctcccgggctcatgccattctcctgcctcagcctcctgagtagctgggactataggcgcctgccaccatgcccacctaatttttttatttttagtagagacagggtttcaccgtgttagtcaggatggtcttgatctcctgacctcgtgatctgcctgcctcagcctcccaaagttctgggattacaggcgtgagccaccgtgcctaaccaatgactagcaagttctttaacccaatataaatgaaataaaaaccttaatcaagaagttaccacttagacatacacacaaatatctatatgacgattacattcatctaagttgcaattatgactaagtcatccattaaaacaaagaatctacccaagttttactaaacagagaataatgtattttcttccaactgcccaagagtttggttaaatgtgagttatacgagttaacaggcaaagctaaatgtctatccttaagaataactataaataaagattaccagtagatagcaatatggattacaatggaataagccattgtattcactaagtctacttctatagactcaaaaagaggtacaataaatgtaagtacagcagtcaaggaagcaaaaatatcaggagagccaaattcctttgaaatttaacaaaaacaacaaatgttcagcaggtcacatacagctggagacagaaacaaaagataggacagctgtggctgacctagtccagggctttttacctgaaagctgggggcttttattccccaaggaactgcttcgactagatttgctgcctttgcttttagtgggtcgtcgtcttctccctgaaaggggagcagctgggggaataataacagcagggggcaccttgcccagtttggtatacaaagattcaatttcatgcttctggcgactctgcaggtcctgaatctctttgagatgtctgtgaaagataaccaaacataattcaaaataccataatcctcttcattcagacaagaattaacagcatattcctaaacctgctttcaagtatgtagtagttactaatgaaccttttccccaaatgtactaccacgagattctagtttgtcaactcaccttgctggcctgcattacccaagccatgttccaacaagctcctagccaacaacaaatggttgataatgttttaggagaaaaacatttcctgacttttgaggccacgcacacaatagctgaatttgctactctgacccaatctgccaaacaaaacgtgccaaataatcatacatcccagtgccagattcatttagtggactaataaataaagagcagttaatagtgatacaatatgctattaataaaaataataatacaatacagtaacaataatacagtaataatatagtaacaatgaagaagttctagaactagaaatgctatgggtctgtatgagtgcaagagaagctgcctgtgcctgtgagtcagtggttgggaatcgtgtgtgtgtgtgtgtgtgtgtgtgtgtgtgtgtgtgtgtgtgtgtgtgtgtggtggggaggtatggggtggggcttctgtggcactgtctctttaaaagaaatgagacattagcatattgtggcgaaaaatattattaatcttggccctgggatctaggtctgaaaaccttatctgacattctttcacaagagaaaatatacttacttatctcgtagtcgtcgcagctctaactttaagtcttcatcttcgatatctgactcattgtcgctactcatgtaagaggagttaaatgaattactaaggctttgacttagattctggctaggaaggctctttgagctcagctgatggggcgagtgtggactaccggaaccatcatccacatccctacttaaaaaagcggcctccgggtcagaagacggcccatttagatgtgaaggctctgacagttcaggcttctctttctttggtatcacagcaggaagaacagcttgttccaaatccataaaaggaggagatgccactggtccttctttctttgtgtcagtgatcttgtcctcagtttttgatacagagaaacgacccactttgtttgctgtagttgtcacctgaaaacgtccaaccttggtaggctgcccagtgtctgactttgcctctgaggcagtagttttgtgggcactctctggcacatctgaagagataccagggatggttatgccattcggctctggtttcaccaaggtactctctggactactacttgatagcactgaggactctgaggtgctggattcaaaatgaacagactttgcatcttctgacttatttttaccctctttctgggcaccgtctgctgcaacagaaacctgataaaaaaggacaaagattaaaaacttaagttctcaatatccaatttctatcacagacaatttaaaaaaggaaaaaaagaatcactttatttccctgtcaaagagtaggctgattgtctctttacatagcgcctccacttttgactaggaagaaaaattgaataccatcatagagaacacatgggtactgagatgcagattctgtgtggctggctacgcttataaagtaaataatttactttcgtatttgatgtcatacacagaattcagatttatgtcttagtcaacatatacataacaaaaggtcagggccaggcatagtggctcatgcctgtaagcccaccattttgggaggctgaagcaggtggatcacttgaggtcaggagtttcagatcagcctggccaacgtggtgaaaccctgtctctactaaaaatacaaaaattagccaggcatggtagcgtgtgcctgtaatcccagctacttgggaggctgaggcaggagaatcacttaaacccgggaggcagaggctgcagtgggctgagatcatgccactgcattccagcctgggtgacagagtgagactccgtctcaaaaataaataaatagataaaaataaaaaaataaaataaaagtaaataaataaaataaattagcaaggcattgtagaatttttagggttgcctgtgaataagaaaaactacaaggtaaatgttaaatgcctggtatgcctcaagaatcaacacaactaactggtaactaaaaaagaggatccagatccttgttctggtttgtccatgtatttacaaatacaaactcagcccacctataaaggttcaggacctgtttacaaatgagaaaaatatcacctactctccccagccagaaaatgctcacatgttggacaacctggtaaaataaagtgatatggtatcatgtgttttaatttaaagaattaatcttaggacaattattttaaacgtggaaaacatttttatacacaaagatgtttgctgttacttaacttattatgttggaaaaatgagaaatgatgatagagactggttaggtaaaccaattactggatgggaaaaaaagctgtaacatttggaacaggagaaatggtagttaattttagataaacacttgtacagaaaacaaggagtggaaggaaatacaccccaaaaagtaatcttgggaggtgggtggatagatagtacgactatctaccgtgtctctactgttctaagtatttctatattttatttagtatatattacttttattaggaaaatgctaaaaagagctataaagtactatgtgacagaaatcactagactggcaattgtgtcccaaataggtaggcagtaattttattatatagacaactcctccaaaggaaggaatcaaggcaacacaaagtgactgtcttacctgaaatcgtcccatcttaaaaacaccagctcctgaactagttgctaggacagggccttctttgacttgagaaactgaaacaaatacatggatgaggaaaacataagtgtctccttccagttaacttcttttccctttagctagaaatacagcaaaatcaaactacacatgaggaaagctgttagaggcaaagagaacttccttatctcctccctccatgaggctctgtccaacaggggaaaagagttattgtttgctctactactagataccaactacaacattaacatatactataaaaacaaaggttaacaggctttaaaaactcaattactcattctttaattcagatatataagtaagtgaaatgaaggatgagattttactgaggacattaaggacccatctttattttattgagatggagtttcgctctgttggccaggctggagtgcagtggtgcgatctcagctcattgcaacctccacctactgggttcaggtgatcctcctgcctcagcctcctgagtagctgggattacaggcgtgtgccaccacacccggctaatttttatatttttagtagagacggagtttcaccacgttgtccaggctggtcttgaactcctgacctcaggtaatatgcctgcctcagcctcccaaagtgctgggattacaggtgtgaatcaccatgtccagccaagatccattgttaaatgaaaaccagctaattttattttctcaatgtaacactggcaaattctagaataggatagtacagttctcagaattattattattattattattatttgagatggagtctcactctgttgcccaggttgcagtgcagtggtgcgatcttggctcactgcaagctacacctcccaggttcatgccattctcctgcctcagcctctcgagtagctgggaccacaggcgcccaccaccacacccgactaattttttgtatttttagtagagacggggtttcaccgtcttagtcaggatggtctcgatctcctgacctcgtgatctgcccgcctcagcctcccaaagtgctgggattacaggcgtgagccactgcacccagccctcagaattatttagttttgggcaatttaaaaacctttccggggaacaatgctttgagtttctttctagagatatatttattttatacagctagtagaacattgagcgatttttatgttttcatgtaattctatatctttgagatcattccatatcaatgcctcattctttttaatgattgcatagtgtcataccctatgtatataccatatatatatttcatatttaatcaggcttctactgatgggcatttaaattattcagaatttcttttcttttttccctgagacagggtctcactctgtcacccaggctggagtacagtgatgccatcacagctcaccacaatctcaacctcccaggctcaggtgatccttcctcctcagcctcctgagaagctagaacaacaggtgcacaccaccacatccggctaatttttaaaatttcttgcagagatgggggtctcactatattgcccaggctggtctcgaaatcctgggctcaagcaatccacctgctttggcctcccaaagtgctgggattagaggtgtgagccaccatgcccggcccagaatttcttgctattttagaaataaatattctcttatagatctgtacaataaatataccacaatgaaagtgctgaattatttccatttaagactgtagtagacatcactattataaactgatccccccagaggctgtaccaagtcactggtggctattagacccctgaatttaccaatgagaggtgggaattgctatcacttgtagccttactttgtgtttctatcattacggacattaaatattttcatgtctaagtttccttttctgttatcttttgattgttttttggttcatgttgaattttaggaactctttgtattagcaaaacgagttctttttgtgatatgactacacatacccctccccctcccacaaatatatatatttccccagtttttcatttatatttgcaatcggtggcacttttcttccatgaagaaaattttatatctattactacttgcttctggattagacattgaacttaacacctctattaaacttatctgagaactccaaactgatccatggaccaaattcagcctactgcctgtttttgtaaataaattctattgaaacacaaactcatttatttatgtattgtccattgctacttgtgagatctgagtaagttgcaagagactatatggtctagaaagcctaaaatttgtaccatctcgccctttacagaaaaagagtttgtgaaccctgctctagatagttgaaaaaaatccccttgggacgggggagggatggcattaggagatatacctaatgctaaatgacgagttaatgggtgcagcacaccaacatggcacatgtatacatatgtaacaaacctgcacgttgtgcacatgtaccctaaaacttaaaagtataataataataaaattaaaaaaaaaaaagatttccaagccacaaaaaaaaaaaaaagttagttataatgtgggatctgaaataatagtaataagatattcataactgtggccattaaaatccattgacctatacatttttttgttcatgcatgattttttttttgagacagggtctcactctgccacctaggatggagtgcagtggcaaaaccatagctcactgtagcctggaactcctgggctcaggcaatcctcgtctcagcctcccgattagctaggactacaggcatacaccaccacagctggctaaatttttgtctatagtgaaaaaggaaaataatgtcttagttttactgtaaaatagtgttgccctcataggcaccccaaaagggtcctcagcccacactccaagaactgatgccttaatactatgcaattctcaagttgttattactaataaattaaaaaactaaaaaaaaaaaaaaaaagaaaaaaaatccccttatgatttcatatagtactattttatgatataatatttcatctttggtccacttggactttacttatgtctaggctagtgatccacctttgcttttttccagatggctttcaagttgttctaaaccacttataaaaatattccatctttcagccaggcgcggtggctcacgcctgtaatcccagcactctgggaggccgaggcgggcagatcacctgaggtcaggagtttgcgaccagcctgaccaacagggagaaaccctgtctctactaaaaatacaaaattatccaggtgtggtggtgcatgcctgtaatcccagatacttgggaggctgaggcaggaaaatcgcttgaacctgggaggtggaggttgcaatgagtcgagatgatgccactgcactccagcctgggcaacaagagcaaactccacttcaaaaaaaaagaaatattccatcttccaatgatttgaaaagctacctttttcatattctacattctctttttattggtagtaatctttattattttcattgtacatacttgatactctacatattttgataatctacattcccctttcatttttccatttctagaccattctaatgatttgcaaatcacttttaaaatgagagccaattgagaatataattgccttgaaaataaaaatgtttaaattgattaactgaaatcttacatttgtatttcaatacaaatatatgtccagactattcaagcttctatccctatatatccagtgtcacaaaagctaagaggttatcagtaaatttacttttctaaatacagtatgctttaatttcctaatctctaatagcaaggatctggcatagctaataatgaagggtcttatcattacctcctgtataacctttcctctgacaaataataacggaacagatttattaatttgctaatctttcaagctttagatattactaccaatgctcctcagttatcaaatacgtggaaatgtgtctttgaaacggtaaacctcctgaatcaactacgggtagggctggaattagtaatataaaaggaggaaggatgtttctcaccacccttctgaggctgtgttcctgcttctgtgattgctgttggagccgccatggacacaggctgtaaaacacacacagacagacaccacaaatctttagcttcagtcactcaaacttttgcctcgttgcctttcctatggtctttgtaaaagggcagaaagacagtatatgtgatgaaacacttatgtctgagaacattttatcttctttcctttttcttttaaagtctaaaagtctgatgtaaagaaaggcaccttttagggccaggcatggtggctcacacctgtaatcccagcattttgggaggtcaaggtgggcagatcatttgaggtcaggagttcgagaccggcctggccaacatggcgaaaccccgcctctaataaaaacacaaaaattagccgggtgtggtggcgggcacctgtaatcccagctactcgggaggctgaggtagaagaatcacttgaacctgggaggtgatggttgcagtgagccaagatcgtgccactgcactacagcctgggtaacagcgcaagactcctgtctcaaaaaaaaaaaaaaaaaaggtacattttaaaagaatgaatttctactcttaattcttgattgctttcttaatttttctcataggatgcttaagggtataacttggatattcacagaaaaacagtttcaatcaaaacattattattatttttgagatggagtctcgctctgtcacacaggctggactgcagtggtgcaatctcggctcactgcaagctctgcctcctgggttttacgccattgtcctgcctcagcctcccgagtagctgggactacaggcgtgcaccaccacacctggataattttttgtatttttactagagatggggtttcaccgtgttagccaggacggtctcgatctcctgaccttgtgatccgcccgcctcggcctcccaaagtgctgggattacaggcgtgagccactgcacctagcccaaaacattattttatctgacaaaatttagcctcctctgaaacaaaaatacgaaatccatagaattgatctatggcacaatctgaccagacgtacaactaaaaaagcacctttcaaataaaatcttttccatagtgatactcctgagtcagcatgaatctttcattaatcagtctcatttcttttggctagaataagcaggaactctgaatacatgttaaaggtattaataatggtttaggttacagtttgtgtcccaggcatataatatattagggttatgaggagattttatcaagattttcaaaacttacaccaaccgcagaagtcactgtgatcatctctggactaagtgttcttctcaattgagcatcaagatcctctagaggttgctgggactgaatgaaaacaatcacagtaaatacagttccgtggcaccttcagagtcacgatatatagccaatttagataggacacactgttttatgctttatattggcacaacataacatttgtctttatggaacatacaaaactatactcaaatttagtgtactgctttgattattttgccagtttctcaagattgtatgtcagactctcaaggctcagagtagttcatgtttttgcagtttaagagaagtcttattacattctatgtttgatgttactcaaaacggtagaaagagttatttatttgtgcgacctttaaaatatattgtgaaaaatgtacaaagatctactggtagattcactgtatctcatgttccctcttttctttctcagttttatacatctttctgggaaggtgcccctatgaataaaagatggcattaacatattctgtcactatcacagggtattattttcctctttcttacatgtatacttcttccctacagatggtggcaaggaggtctgggtattccatcctgttaaccattccatccaccgcaagcacacagcttccttctacccttccacagtctaatcctacatctgtcttggcttctatcaatctattcttgcacagtctttgcttaggcctttccctctatctaggcactagctatttacccttacccctccacatgtctcacttgctattttttgtcacactttatactcccttagaaatctgaatccatgtttttaaatgagaaaataagtttaaaactaattttctaactcctgatttacggactttcacaatgcactttcccccaaatgtggtggctgatggagtgctttctctgttggggtttttacttcattgtggcaagttcctcaaatagtgttcccctgtacattgggaccaaagaaatagggataaattccaactcagcttctcaagtaagcaatttaccatgtttttcttatttcttatatatgattcaaaaataaattcctaatttagtttaaaagtttactggcttgtctcatgtcagaagatttttcctggtcacaacagattcacaattagtacttttcttatggaaattcaacaaatgtgttggcggtggactgcggtgggaaagagaaataataaatattacaggtaattctgtccaccactgcactcaagtgagcagaactgtgtgagatgggaatctcaagttcatgaggctggtctcagttcctccatgagtgatctcataatgttagcatctcactgagctcggtggcttttattttaaaagagacagcacacatagttttcatgaaacatcacccctatacctacctataagtaagctaattccttcattaggtggctagtgaaagaaatgatcaacattcaagaagagactggttgctctggactcgcggaaaaagtttctcagttgccatattgtgcttctcctttctagggcactctcaaagttaattttgattatatacgcaatttcgctattctacagaagtgtgagtgataaagggagctatatgggtctgacaaaatgtttgctttgctgttttcttccttcataagatataaaaaaaaaattagtatcaagtgtttttggataaccggaagcaacattacaaacaaaagagctatgaagcttcttacttaagtaggaactgggtcattggttataacattttaaaagaaaggtgttactaagtcaaagacaaataggcaaaagccaagaccacgtagtggagaacttcagcaagctttgtcaaagaaagtagggcacaggaagaaatttgtcaagtcttgaggcacctgggttagagaaggtcctggaaaaggtggcagctgctcgctgggtagagtacctgctggaagttcagtacccactggcagcacctacagacaacaaagggaaaatcaagtccgtgagacgctaaatataaagactgcgtactgaagagcaaatcaactaatttgaatgcacaaacataagaataaaatatatatagttaagacatgtttatcactgaggttactctctggtatctgtcttaaaaaaacggtgtgacaactaatgttgttattataggggttactacgatatacctataaaatgaatagtaaaatacagtaaaaagttgtcccctagggagaacagaacaaaggctatatgtacataagtggcagtgtccagatattcttgagctacttatttggtacagtatgtatcagactttcgccatgtaaaacaagattttctgagaaaagaaaacagtaactggttaagaaataaccaatgggcaggtctgataacaaaaggcatcagaaatctaatactattatcaagaatttctattttatctgagtgaagattctgcattatcctactataaaaagaacctcacatcaatggcaatgcagaaagaggctgaagcatacaatacagtagacgtaacacagccttgttatttggagaaggtggcagaacaagaggaaatccaccacagcataattagataataaattttagttacttcagtcctaggattagattatttatttctcctctgtatcaatttccttactaacttccaattttttataacccccaaactgtacaactgtggaatctacaacaaaaccaaaaatttgcttcattctcactgaaacaaagactatgaactgctattatttacgtacattttgctgacagatgcatttagctcccttttgggatacagacttcttcagtttgtaccaattcagaagaaatacctgtattttacccgataattataccatcttggaaaactgtgcagcataattaaccctaaaatcctgccacacttgaaaaaaaaatctcatgttcattgtagatataccctcaaactgctgtcaatttaataaatactataagccaggtacctttataaatatgtttctaacttacaaggctgaagtgaaaaatgtactcattagggagaaaaaaaactgatcatatttatctaattattttataacaataattttaccggagccttagttagaggtggcttggagggagcagttccaggtttcactcctgatgtagtagtgctgactggggtagaaacttgcccaggtgtgaccactggtgtaactggcaaagcaactgttcctagtggtaaattggttggtggtaagcaagtacttgtggtagaagtcaggagtttgcttggtgcaacagcagtagttgggatgcctggtgtgacagtgctctctatgactagtgaggtctccagtgagacagaggcatgctgagctccagatgagctgtgttcactgaacagagaccgcagcttttcttctagagtctttatgtcatcaattccaggagctttgggttgtgtatcagaatctacttcaggacaatgagtatggggctggttgggaagcaaagctggttgaggctgactatgaattagtgtctgctgtacagcaggcacattggcaacaggctgtaccaagggtgggatactaggtacttggggtaataaaggtgtagaagtaggtcctgctgcttggggaagaataggagtagaagctatcactgatggaatgaccaaaggatgcagcccaccaggctgagaaatataactagacactcctgctccaggagaggaagaggaagatggtgcagagagggagaaagccaatccagttgtactgctatgagatgtcttatctagtgagtgtgcgctaactaccacggtttcagctaaagtaggagtagaagtactgctgctaagctgaatgcacagctgtgaagctgtgcttgggaatgaagtggtggtagaaactgatgttaatgtggctcccacagtagtgctgcctgctgcctgctgagatactacagctggaggcttaggacctggggtagcagtactgccccctgcagaggctgaagttgctgaaactgttactgaaggatacagtgctgtactagaaacaacgatctcagatgtggatgtggggacttgaagtgacggggatgtagtagatattgagacaactgcaggtattgtgatacttgaaactacgctggaaagtactggtgattcagacacaggtggtatggggagaccacctgaagttaccacacctgtgctggtggcaactccagcaatcccctcttcagtgggcactgtaacctcagactgaattactgatgtggaaatgtcattaggagggctgcttgttgcagggactggtgctgtggctgctgctgtggttgggactccagcaatgctacttaagaaaggaggtactactggaaatgttggtcctgtatgactaaagtttggaggtgctgtgttgggtccttctgtcatttgggcacgtctaagttcagaaaaggcctgttgtagactaagggatgatgcagagtgagacaagttcattccagggctctgagctgtagaggcagcaactgcaaaggaatacaaaaagataagaatcagctgattttaaaaggatggattcaaaagattgtctgctagcctaagtcagctcctataaatatctgtttttgataaaaaatatggagtaatcttaaaacatagacaacagtactaagtgcagaaataaacacatactacaatatctattatacagactatatcttggtatggccgtgcttcttggctttttctgtaattctctgtattcttcatctatttccctctcccatatgtttatctgttggttataacttcagttttctattcttttttattatctgtgtcatcataaattactgctttatgattaagctttcaacatagcagaggcactgtagaatttacataacaatgtggcagaatcaatcccttacctgtatctgttatttcactggggaaaacttttgattctcgtaatcggctttctggcacaggactcactataaaccgccttcccgcagaatgaacaacttgagttaaagaactggtaggaatgcctggtcaaaaacaaacaaacaaacgtaacttaatagcattattattataaatattgttagacttcattattggcacatacaactgctttttttgaggcacggtctcattctctcacccaggctggagtgcagtggcgcgatctcagctcactgcaacctccgcctcctgggttcaagcgattctcgtgcctcggcctcctgagtagctgggactacagaagcctgccaccaccctcggctaatggcttcttaagtcaaaggtaaaaacaaggaaagaaaataaattcacctatttgctgtggcatggaagacgcaggaattggttgtttgaactctccttccaatttctacaacaaacaaaagtgattaaatacattctcaaatgcaatctcaatgactaggcaaagcaaactgccacatgtgaagagaacataaaagtttgttgtcggtcatgggtgtcaggtgatatcactggacattttgcatagcaaatttagaactatgaaaatattttaaatcaacaaagtttcactatgggagtggtgaacctacctgagaacctgaaaagccatagtcatcctttccttgtagactctccaatccctgatcaccctctggttccacactgacatcctcactgagcatttcatcagctttttcaataatttctcgcacttgatccacaaacgactctctctctattgctagaataaagtcattgttcacctgtaaaagaaatgtgatgtcagtctaattagtgtcatttctcaaactttatgtcacttttatgacttctgtcctatctgcatacttacctatatttttatttattttgtactcaagttagctcttctctttttaagaacttcaatatctagttagacatagcctagacaaaaacatcactaaatcacaggttgggtgtgatagttttattcacattgaagtaaatgcataactttaaaaaaacatggattataaaatatggcatatttgcctagagcaatggctattaagatcaagtactaaggaaaaacctagaactccaaatgcagacgtaccataattgttgctatctcctcggggttgtcaccatctaggtcaaatttgaatgtaaccattttcctattatgagtctctaattgacattctac

SEQ ID NO: 8029 - DNA, 264 bp, Homo sapiens
gacacggagtctcgctccgttgcccaggctggagtgcagtggcgcgatcttggctcactgcaagttccgcctcccaggttcatgccattctcctgcctcagcctcctgagcagctgggactacaggcgcctgccaccacgcccggctaattttttgtgtttttagtagagacgggttttcaccatgttagccaggatggtcttgatctcctgaccttgtgatccgtgcacctcggcctcccaaagtgctaggattacaggcgtg

SEQ ID NO: 8030 - DNA, 442 bp, Homo sapiens
ggagaggcctagaacctgcaggaacgggcgggccttgccaactctggcctggggtgttggctgttctggaagaagtagctgagaggctgaatttggctttggtggcatcactggcctgctgggtgtggggcctgccgggatatccatggcctgaaaggtgacatctggagtgagggtgacctggactctgacgcgccacacgatcggcacccagcctgctgatgtccaggaaaccttgaatctggatttttggggaccccgcactgccggccccaggtgcctggcaaaagaagtaagacggcccctttagaggaagacagcgtcagcgaggcctcgggtcatttctacaaatcaccatctggtgcgtgggtccatcacatgcaaacagaggtaaccaggcagtcaaggagatgcgcaaaacgcagaagccagggaagcagtg

SEQ ID NO: 8031 - DNA, 443 bp, Homo sapiens
ggagaggcctataacctgcaggaacgggcgggccttgccaactctggcctggggtgttggctgttctggaagaagtagctgagaggctgaatttggctttggtggcatcactggcctgctgggtgtggggccctgccgggatatccatggcctgaaaggtgacatctggagtgagggtgacctggactctgacgcgccacacgatcggcacccagcctgctgatgtccaggaaaccttgaatctggatttttggggaccccgcactgccggccccaggtgcctggcaaaagaagtaagacggcccctttagaggaagacagcgtcagccgaggcctcgggtcatttctacaaatcaccatctggtgcggggtccatcacatgcaaacagaggtaaccaggcagtcaaggagatgcgcaaaacgcagaagccagggaagcagtg

SEQ ID NO: 8032 - DNA, 538 bp, Homo sapiens
cggtttggacagtgccctttgttaggtacggttttctcattgggaagctggatttgtattaaagatgcacacgtaagaataaaaaagaggctcgtagaaaacttttggtgtcgtaaacaatactcaaacagttttgccaacaaattggaaagctaaggcaaaacagatgtttttctaaaattgcagtaatcccaaactgccttgacaggttcatataaaatgcagatcagtggttggggtggggccggcgtgggccctggcatgagacagacttcctgctccccacccaggctgcacagcccagggcagagaaaggacaacataaatacacagaaaactgccccaggggatgcagctggattcttggaagagacgagagtgttgggaaccgtcctggcatcctggaggggcctgaagcagcccctaaccagaagcagagccggcgccacagaaaggagcccccaagaactaggagagcttgaaattaaaaacatgagtgaaaatctcataaaaacaggaagctcaaagacacagggac

SEQ ID NO: 8033 - DNA, 538 bp, Homo sapiens; identical to SEQ ID NO: 8032

SEQ ID NO: 8034 - DNA, 27062 bp, Homo sapiens
gccggcggtcgcgccagcgggatccgcctggctcagctgacagctcccgagaacggaagaggcggcgcgccggttgagcagggcgtctctaggcctggtcggctggcggcggtgagtgggccccaggcaagggcggagggcggaactttggggttcggcactgccgggcggccggaaggtacggtggggatagctctctgggcgcgcgaggcagagaaggggaccgggctgggactgtacactgggcctcagtccctcaaatccgggaccgggcgtccgcagctcggctggccgggactcccttcgggacgctgaggaggaaggggaaggtgtgggccctgctccttcgggacgccccaggctggccagcagctcacacatccgcattgcgccctctgatcccagcgttggggcggatagctagcgttgggcctgcccctgttttggggcagtcgcccaaacgacgccgcacgcctagtggcgagctgaacccagactaggacacccgaagaccaaatggatagagtgagaaggaaatgggggttagcaacctgaattgaggtactggattccaagtgacagcttcacaagctgaaatcttgtagggtaggtcatgaggaactgttgaaactgcttggagtagaagttcttagccctggctgcatattggaatcacctggagaacttggaaaactactgaggcctgaattaattgttctagggtgtggcctgggtattgagattttaaaaaacagctcctcagaagattctaatgtgcagtcagatggagaacactaacctaaaaccataaactgcatgaatgaatctctcatcccatttgcaaatgttttaacaggaagaaacaaaaagcttaattcaattagcaccatatactcccacctagtaaaataagacaatgtgaaaggacctaatacagtacatagtaggtgctcaattaatgtaaattgattctgaatctcattcttatctcatttgggagttacacatccgagaatctggtttttaattatggttttgtatatagtatttttgcatataattttagggtgttgataggattctccgtagcccatctatagaccacactcccttttcccctcaccccagtgaagaagcctagctctaaagcatttagaataaaacttaaaagtttgtgtttgtgtactcttgttttgtttaagtatttttctgttaccaaaattaaccttgagtgccactggcaggcttaattcatgaacaagagaggaaaaactggaggggagtggcaaatgaaggaatacaagaagcagaagaggaaaggagaaaaaaacaaaacaaaaaacaaactgaagagattgtttgttatggggcatggtgtcctgtactttcatatgaccttggtgttcctccttagctcctcccatagctgagggcagacagataaaaagtcctcagtcattgctggggacatgcaaatactcctttaaccacatggctcagttagcctgccctaggagagtaacatgcacttgtagattaggattggctatatgttaggatatgtttgacttaagcagtgatcatggaaattcagaattttaatttggagagggtcctaacaccatcttttgtatttcttttctgcagatggcaggattttcataatatatgtagtatgagttccacatcttggcctcttacccagcttcagcagtctcagctccaccagttagagaataaatgggatttgcatgaactccactctgagctgaaatacagactgcggtgttaatatccttttcttctgattgttattaacaggtactaactgacctcaagtagaacatgtaattgtgtcttagatagggatgcagcttaagcagagccatgaactaacatctcctagaaaaaaagtgttttttgaaaatgaaatcatttttaatttcatagtatgaccttttaaaatgtaaaaaatcctaactttttacttatgtacattttaattaaaaatattttagttgtgagggaggatatttgcaaatgcaattgtagttcaatattttaattgactggtagttttgttttattaaaatgatttttgtaaattctcattgcatatttttttcacatttaaattatctgaaattgctgtatctttcagttgatgctattttaaaaaacattgattcatactttattttttgagacaaggtcttgctctgtcccccaggctggagtgcagtggtgcaaacacggctcactgcagcctcagcatccaaggctcaagcgatcctcctgccacagtctcctgagtagctgggactacaggcacacaccaccacacctggctaattttttatagagacaggatcttgctatgttgccaaggctgatctcaaactgctggcctcaagtgatcctcctgccttggcctcccaaagtgctgggattacgggcatgagccaccatatccagccagttcatactttaattgtagctaatttctttttctttctttctttctttctttctttctttctttctttctttctttcctttctttcttctttctttctttccttttttttttttttttttttttggagacagagtctgtctctgtcacccaggctggaatgcagtggtgcaatctcagctcactgcaacctctgcctcctggattctagtgattctctagtctcgtgcctcagccaccgagtagctgggattacatgcgtgtaccacaatgcccggctaatttttttatttttagtagagatggggttttgctgtgttggccaggctagtcttgaactcttggcctcaagtgatctgcctgccttggtctcccaaagtgctgggattaaagacttgagccactgtgcctgggccttgtagctaaattcttagtattacctaaaataatggtaaatctttcttaaaattattatcttttaaatattcttgagtcataatggtgaatctttaaattggtgactgcttggatttgacaaaatctattatttcaaaaatttaatattattttgctgcttgctcagttatctaattttcttccataatatctatgcctgtaacattctcaagcactgttttctcacctgggagcaattttgcctccaacccccatcctgccccaggacctggcgctatttggagatatttttttttttgagacagggtcccactttgtcactcaggctggagtgcagtggtgctatcatggctcactgcagcctcgacctcccaggctcaagtgatcctcccatgtcagctccccaagtagctgggaccacaggcaagcaccaccacacctggctagatattttcagttgtcacagctcttgtgggtggaagcgggccactattgggtatctagtgggtaaaagccaggggatgctgttaagattctataatgcacaacacagctctccaacaacaattatttacttcaaaatgtcaatagagctgaagctaagaaaacttgccctaaagattcctgtggatttaaaaaatttacttttttgtttttttgagacagagtctgactctgtcgcccaggctggagtgcaatggtgcaatctcagctcactgcaacctctgcctcccacgttcaagcagttctcctgcctcaacctcccgagtagctgggattacaggggtgagccaccacacccagctaatttttgtatttttagtagagatggggtttcaccacgttggccaggctggtctcgaactcctgactgcaggtgatttgcccgcctcggcctaccaaagtgttgggattacaggcacgagccaccgcgcctggcaaattaacttaagaaaggagtgtaatatactttgaccacttttgcgaaccaggcacattgctaggttcagtggacaagtcaaagtaaatttgtgatttgtccttttcaaagaaaattttcaaattgtgctttttttcctctaattcagtcataaaatatctaactgataagatcaggaattagaagtaccacaaccatcccttttgaaaaagactgttaatattgcaaaactaatggaatgccagatatggctgtcatttttggtttaggagaaaagtgataatatcgattaattctttgcagttgttttttgtgccattaagctttttccacctctgtgcattttcttttcttttttttttttttgaaacggagtttcactcttgtcgcccaggctggagtgcagtggcgtgatgttggctcactgcagtctccacctcccggttcaagcgattctcctgtctcagcctcccaagtagctgggattacaggcacctgccaccacgcctggctaatttttgtatttttagcagagatggggtttcaccatgttggccaggctagtcttgaactcctgacctcaggtgatccgcccgcctcggcctcccaaagtgttgggattacaggtgtgagccaccacacccggccagcctctgtgcattttctgttcttaactgattttaatgttttcaggtccttatgtcgtcagaagatcgagaagctcaggaggatgaattgctggccctggcaagtatttacgatggagatgaatttagaaaagcagagtctgtccaaggtggagaaaccaggatctatttggatttgccacagaatttcaagatatttgtgagcggttagttaataatttcttaaacagatttttctattattctttatttcttagtgtaccttaaactatttgtcattttgtgttttaggcattagtgataggtggtagtattacagaggtaatgcatgtttctgttttaaatgaaaattgcaatgaggggcaagcagttttcaatttgattctacctttttgatcactgaagagggatattatcctgcatatttcatacatcctggtctgctaactagcagtttatcagccatgagtcattggctgttacatagcagtaatcaaagagaaaatgaatgtatgtgaaaacgcttagaaattttcaagtacagtggtggtggttaatactatttggtttccagaatcatttcaactactataaacatatgacacatgctattactctgtgaccttttgcttcagaaaaaacaaaactgctgcttttgatacagacatttacagaagactttgatgcacactttctcaaaatgtttctactataaagggattgagtaaggaaagtaagtgtggtaatttaaatgaaactttgattgtgagagtgttgtgtgctatattatatcctcaaacctgagatcattgtgttggcacaaattttcccaactgattcatgggtagttgggacatgctggtctaagtgggacatgctggtctaagtaggtcatgctgttcaatggaaatgaacatcctttctctagattgtgtcttcaatcatccactgtaaaccaaaccacaacaaaacaaacattgtgtgttccttggtcattagtgttaggaattgtactcagaagtgtatacaagaataagttgtagtattttcattatacatttcatggtgctgtagatttttcaagggcttacaagatttttttttaaggtggtggctacgaagttaaaattaagaaatagaaagtgctttgggggagggtttttattccctcaactaaagcattaagtctttcttgagcgctgctcaacagtagtggacactcaagtgttgaccaactgatcctttctaatctttgtttttggttcaggcaattcaaatgagtgtctccagaatagtggctttgaatacaccatttgctttctgcctccacttgtgctgaactttgaactgccaccagattatccatcctcttccccaccttcattcacacttagtggcaaatggctgtcaccaactcaggttagacttgaaacttaatttttcctatccatttttagaaacttaaaaatcacctttaattgaagactatcttaaagatcttgaattcagtgcatgaaaaacaaatggctttggttttgtaatttttttcccttgccttggtgaatcctgatgttaagaaattgaaaatgtttggtgttttaaaaaggaatggcagtaattaaaacaatcatgaattgtagtaggagtaatttttaatcaagtatattatttcttttcttgtcttgctattttcctgtttaatctgtattataatggagactaagaggtcttcctcattttccttagacattgatactacttttctcttagtttcttatccattccttaaatgaaagattccattgtaattaggactaaaaattgagctaatgtagttataataagcaaattttctgagtgaatacaataactgattttctttgtaaaaatctgtattaataacaaataacagtcaactggtatcacgtagacataaatgcatacaagtagaaatgtgtatagttcctgtagatatctcagtaaggcttgaggccttatgttaagcacctcatttcctctgggttatatatacttttctagtaacaacctcaactcttgattgagacataaatatggcttgaagctaaatataaataatataaagcattctgggagagataatgaatcagcagctgcttttctagaagtcataatgaagatcaatagactaatgtgtattaagacaaaagctcagcctgtgcaacatggcgaaacccaatttctacaaaaaatacaaaaattagccaagtgtggtggtgcgtccctgtaatcccagatacttgggaggctgaggtgggaggatcacttgagcctgggtggcagagattgcagtgagccaagactgagccactgcactccagcctgggtgacagacagagaccctgtctcaaaaaaaaaaaaaaaagaaaaagacaaaagatgtcagagttgctgacctcaaggaatagctcattagtttttctctttggatcatacagttttcatttccccatccaccaatctaatcttttaagtgagagtactttcacaaactagagcttatggtttaaaagcaaaattaaaccttaaaaaggataacacaggtagaataaaaaggagtattactttacattctaatgtctgtgccagaggcaacagatgcaagacagttgatttgtccaggaatatcaagactgtttggcatttaggccactgatagttggcttaattatttagatcttcatagtcctatttcaccagagagcttttcatactttacatccacgcatgtgcgtgcatgcacgtgcatgcacacacacgcacaaaacagggacagattaactggatgcgtggttgtggtttcagattccagccaaccagcatctacttaatgctggatttgggggcggaggtgtgtgctggggaagagagttgttttatgtgttacagctaaaattacagtagaattcttaatcaaataaatgtttatgcatataattaacattttaattggtctcttatattccttcttggttcagttcttgtttgttgctgtaccctgattccttggcattatgactctcacctgttaatggtgaaattgacacatagagctgtcattccctgaattggggcgggtagacagagggaagtggttttagttttctaaaaccttattccttattcctcccccaatatacttacacagtctctttcccgtcccccttccatttacatgcattccagctgcctttctctctcttttttttttttttttttttttttttttttgagatggagtcttgctctgtcacccaggctggagcacaggggcacaatctcagctcactacaacctctgcctagtgggttcaagtggttgtcctgcctcagcctcccaagtagctgggaatacaggcgcccgccaccacacctggctaattttttgtattttttagtagagacagggtttcaccatgttggccaggctgatcaccaacccctgacctcaggtgatccacccgccttggcctcccagagttctgggattacaggcatgagccaccacgcccagccccagctgcctctcttgagaagggactggggtagaaaagaggttggagaatggcttcttcataggacttggtagctcacacagcactcatagcttcccttttagtatttatcacattttacagatgttagcagatttctcaaaagcatggttgatttataaggatatttatgcaaatgtgaaaaatcattagttgttcaatcttaactcatcaataagtatttaaggtagtacctatgcagggtttagtcagtggcactacacagagtgtaagaaacagaaaatctggtcccttttcatttgtcatttaaatttacaaaatttgtttgccatctggaaggcatatttttggatgtttacctaaaaaagaaaagctgcttataattcctgtgctctagttaaaaatattttatatttctaatggaaaattctccaacatttgcctttcaaattgaacagaccacttttaaagaggaaaattccaaataatttaattttggttgcttagcttaggaagtgtaagctttctctatggctgccaaaccttgctgagggcttgtgattaggaccagggtcaatatcaggcagcttccctccattaaccaggatctgatataagcccagattgcttacttaaaagcagcttgtaaatctgaacaaggactctgaggttgaattctgttagtgattgtttcagatgagttgactttttgataaaactgaaagaattaattttaaaacttggatagtatttttaaactattctttttctaaccattattctaggatacgaacagggctaggactcctaatggaagaaaaatagtttatttttagaactagatctctttgtcctacatgaggtatatggcagtactaaaagattaaagaacagaaaaaagtcttccatttcagtggctaaaatgtacagctatttctctaccttacggagtcttgctatttctcttcttctcgtggtacttcttgcttctgactttatgttctactctggctcatgttgccgaatagtttaagaagtgctccagtaagaatgtttgtactgttttgtatgtagcacagtgtatcacagcagtaaaaaatagtgttagaataagggcctaacttgcaagtggaaaagatttctagggaaaccaggagttggcagcagcatcatctttccaaactcaccaacatcttcatgtgttttctcctagctatctgctctatgcaagcacttagacaacctatgggaagaacaccgtggcagcgtggtcctgtttgcctggatgcaatttcttaaggaagagaccctagcatacttgaatattgtctctccttttgagctcaagattggttctcagaaaaaagtgcagagaaggacagctcaagcttctcccaacacagagctagattttggaggagctgctggatctgatgtagaccaagaggaaattgtggatgagagagcagtgcaggatgtggaatcactgtcaaatctgatccaggaaatcttggactttgatcaagctcagcagataaaatgctttaatagtaaattgttcctgtgcagtatctgtttctgtgagaagctgggtagtgaatgcatgtacttcttggagtgcaggcatgtgtactgcaaagcctgtctgaaggactactttgaaatccagatcagagatggccaggttcaatgcctcaactgcccagaaccaaagtgcccttcggtggccactcctggtcaggtaactgtttaccctgctgatggttgcctcctaattctcttccataaatggagatatcatctcaggaacttccttgatagggctcatggggcagtccgaggccttggagccagcccacaagttgttttgctgtatccattaaaaatgctatggtcttagtctactgcttaagcaaatggaatgcttcctttggccttgcagtgggcaaggatgagtgttaaagtagttattaagtaattgtgataatttactttgtatatctgctagtaggatcccataaaccttggggaatcactagcttattcttgtgtgaggttggcatctgaaggggacgtctcttagaatgattaaccaacttttttatagacttcagcagaagtacagcctacttaggtggtggtggtgttgttgttgttgttgttgttgttgttttgtttgagatggagtcttgctgtgtcacccaggatggagtgcaggggcatgatctcagctcacggcaacctctgcctccaaggttcaagtgatttcctgcctcagcctcccaagtagctgggattacaggcacccgccaccatgcccggctaattttttttgtatttttagtagagacggggtttcaccacgttggccaggctggtcttgaactcctgacctcaagtgatcctcccgctttggcctcccaaagtgttgggattacaggcgtgagccactgctcctggccagttttttgttttcttattaaagcataattttacttaaaataaactacacatttaaatcatacaaggctagcatggtagcttacacctataatcccagcactttgggaggccaagataggaggatcgcttgaggctaggggtttaaaaccagcctgtgcaaaatagcatgactccatgtcttaaaaaaaaaaaatcaggcatgatggcaagtgcctgttgccctagctacttgggaagctgaggtagagaatcatttgagcccaggagttcaaggctgcagtgagctatgattgcaccactgcactccagtctgtacgacagagtaagaccccatctctaaagaaataaaactaaaatataaaataaattggacactttgcttagttttaacaaatgtgtagacccctataattgtcatctcagtcaaaatgtacttggtttgattttgaagtgaaagagaggttttaatttatgtgcccatctggtttacactagcatcctaagaatcgcctcaggttcagaactggttgtggaatcatcaaacctatggtgttttgtatttccctccaggtcaaagagttagtggaagcagagttatttgcccgttatgaccgccttctcctccagtcctccttggacctgatggcagatgtggtgtactgcccccggccgtgctgccagctgcctgtgatgcaggaacctggctgcaccatgggtatctgctccagctgcaattttgccttctgtactttgtgcaggttgacctaccatggggtctccccatgtaaggtgactgcaggtatgttttaactgtgaacccaaacccccatccccagtctctccctcacatttcactctactaccagggccttatgacttcattcttcaatttggaagtattcatttagcagatatttctgtgtcagtgactatctcaggccttggggctgtagtagtgaccagaagagacaaaatgtctgccctcatggaactcacattctaccaggggagacaggaaaacaaaataaggatattaggtggtggtaagtgctgaagaggcagaagaaataaagcaaggacaggatatgaaatgttctgaaggggaggggacttgggattttagttagggaaaacaggggaggcctcaccggcaaaatggtttaagtaaggacttgaaggaggtaagaaaaaccgtgcagataccagggaggaacattccaggagaaggaatggcacaggaaattctatatacaaacatggaataatgtagatcctggatggccaatgcagggcatctaagctgccattcttgtctccatggcacatgtgtttgactagtcatcaaatgctttctccttgagcccagagaggcctcagaatcttcctcaacatggcacttcggaaagctaccctctgatgaagtagacacaggagtgaaatgtgtttgccgtttccagtctacgtaaggaatcataaatcaggcccttaacgtcgatttaattggactttggtggcttagtcttcttcagactaacagggataatgataacagctacctcacaaaattgcagctagagcagataacaataacttcacggggttattctaaggatgaagggaacgaatatcatgctattcaaaattgttatatttgttacactggtgtataatatatagaaattgagagggttagaaacttttatagtgatttcacataattttatgtcaaatctaataaaaatttagactttttttcatttttctaataattgattgttagctgactgtggtggtgcacacctgtagttctagctattcagaaggctacagcaggaggatcttttgagcctcagttgagactagcttgggcaacgtagtgagactctgcttctaaaaaaattaaatcaagcaaacctggttatatcttataaaagtgttgatctttgacgtatcagagaaaaaataaactgggcctttaccataaatagtttgagaaacagtgggctaatacatgtaaaatgcagaatggggctgggcatagtggctcacctctgtaatctcagcactttgggaggccaaggtgggcggattgcttgagtccaagagtttgacactatggcaaaaccccgtgtctacaaaaaaatacaaaaattaacgaggtgtggtggtgcacatctgtagtctcagccactcaggttgctgaggcgggaggatcgcttgaaactgggaggtagaggctgcagtgagccagattgcaccactgcactccagcctgggggacagagtgggaccctgtctcaaaaaaaaaaaaagaggaaaaagaaaaatagtaattattaatgctattattattgtagttattacttgctaatgttagcagactgtcattatttccaagaaagtaccatgagaggaaagagtgggtagataatttcagttgcctcaggcagcaccttgcagaaggtaaggccagatggaatggagaacttagcaatgtataatataagcctttactttagacttctgtaaccttttcattaaaagtcaacagtacatttcaagtgtttcacagcattcagggaagaaattgaagatagattcagggctttagcaaaattaggaatctctccctctctttgtatgtatatattatataaaatatgaaatacaattttattattttgggaagactaaagcaatataacctttgtccttaagatgcctaggaacacaaaaatgcattgaattattagagggatgagatttacattgcttcactgctacattgaagtagaggtgatgaagctgtgggaatgtactacacagagaaagaattcacaggtgaaagcaaagagtggagataggatataggattctataccagaagatgtcttttgctttaaaagggagatagacttccaaataatgtgaggaaagtaaactgataaaataactagaacattgttgagaaaactctttaattaattgtattgaaaaattaaggtaatacaactgtgaacaaaagccttttgtctgcaagtaaaacctttgggattggttacctgttccatttcagttaaatgatagagcagtagaagccagattgaagagtatcgagggaaaacttttcagcacctgtagcaaagcatagtacggggtgagacttgggtgctaagttttattcactgattttttttttttacacagaattgaagaggtagtctttgcccttaagccaaaagtgcctttgtatttggtaggcctcttcattatcaaacagtgaatggtgctgacttagtggaaaaatcaatgtctgtttcaacctttgtgtcttctagataagtcagtctttaactgcatacttctagatgcataaacataccaacattaagaaatcaaaatcaaaggaaaaaaatagcctatcttattctaccacttttagcagatacatcttttctagttgggggattcctttccatttattatcatttgtgcaagtataatttttactgggttataacataaatatactttttttctggattctgtgatgagtgttttaattgggttgtagcgaacctaattatgtttttaataattgaatattatgtcattaaatggctcttccaaacataattatttccttagaaatttaatttttttgccattgttatatgcatctccatgcatatgactttggattatttccttatgataaagttctaggaataacattattgaatagtcgaagattatagccatttttaatgatttttggtcagcattacaaagttatataaaagttaattttccatttcactttgtagagaaattaatggacttacgaaatgaatacctgcaagcggatgaggctaataaaagacttttggatcaaaggtatggtaagagagtgattcagaaggcactggaagagatggaaagtaaggagtggctagagaagaactcaaagagctgcccatgttgtggaactcccatagaggtaaatgttttgggacagacttggaggccatcagacttgcaaggatgttatgattaccttaagaagccttactagtcaattttatgacttacaaaacacatgctggtattattacaccttcttacgtggaaggtggaaatttcactattagatcttgttatcgaccttaaatgtttgtagacttcccttttcaaagtatttgcttacagtgaccattgttctcacattgtatccacctcaaaattgaatgggttgtaaggagggcatactagagctatggtcaactcttacctcatctatgtgattaaaaaaaatcaaatctgatctctcagaactatttatcctggaatgctgcacacctgtttaagatacactcaggaattaatttgagtcaaaataattagacagatatattgcttcttgacaaaaatcttaatatgttttaaaatcaaaatacatcttagcatttgattctattgttctaatctgttatgtctgaactgaacatagtgggctccagttaaggaaactaggactatatgtaatcacttttttttttttttttttgatactgagtctctcttgcccaggctggagtgcggtagtgcaatctcagctaactgcaatccccgcctcccaggttcaaggaattttcatgcctcagcctcccgagtagctgggattacaggcgccagccaccacacctggctaatttttgtatttttagtagagacagggtttcaccatgttggccaggctggtctcgaactcctgacctcaaatgactcgcccaccttggcttcccaaagtgctgggattacaggcatgagccaccacacctggccatataatcacttttgacataccttagccctatgacagagtggaggacttggtaccaaatatttacttagatttctgtaaaaattaaaaacccacacgttacatccaaacattttaatattaatctaactacattttccagttatacttgtgtgatttttatctactgcttgtcagaagagattgtgccaagtaactaattgtagtaacactagctattttctgtattttacttctaatgcaaaatagaaagaattacatagtcatcagtgtgttacattgatatctcaaccctgcataagaaaagggagaggaccaagacaatgttgtactgaatcattttggcatgtgctgtctcttctgcttttacagccttgatatttttctctttctatccttcccaccagaaattagacggatgtaacaagatgacatgtactggctgtatgcaatatttctgttggatttgcatgggttctctctctagagcaaacccttacaaacatttcaatgaccctggttcaccatgttttaaccggtatgtatacacagaattcctcaggctcaccagcaatttttggtacttgatttgcagaccacaaatccagtgttttatttaagtacttggacttatttagagaattctcttacatgttttcccctataaaggaattttcatattattttctcaaaaatgagttttataatgagacttatacaccatctggaagtttttatagtgaaagttttcaaacacagaaaatttgaaaggataggactatgaatagtaggatactttccacccaaattaacagttgatagtactttgccatatttgttcccttaacatttttactgaactacatgaagttggagttatgataatgcttcaactctaaatatttccacgtttctcctaagataaggaaatgcttctacataatgacagtacttttaaaaaacttaatgatagtggcatactattatctagtaaacaaacatatttgaaacttcctaattatttctgaaaatatcttttaaagctatttgattgaaccagaatctgaacaagttcagtcattgtatttggttctatctctttagtctcttaatacagaaaagctttggcccaccttttttttgtgtgtgttttgtgaacattcacttttttttttgttgagtcagagtctcgctctgtcgcccaggctggagtgcagtggtgccgtctcggctcactgcaagctccgcctcccgggttcatgccattctgcctcagcctcctgagtagctgggactacaggcgcctgccaccacgcccggctaatttttttgtatttttagtagagacggggtttcaccgtgttagccaggatggtctcgatctcctgacctcgtgagctgcccgcctcggcctcccaaagtgctgggattacaggcgtgagccaccacacccagcaaaacattcactttttgaagagtccaggtcagttatcttatataacgtcttaccttctagacttttatttgtccatggtgtcctttagcttgtttctcttatttgctataaactggaagttaggtctagactgaagcttgattcgatttagaataacattttttatgctgatacttcatgaggagtgatgtgtattccgtattggatcacatcaagaggtccatgatgtccctcattagtgtggtgctcatttctacagtttgctttattgtaaaggcaagttttccattttgttattaggaagtaatctgtggggtgattccttggcacaatgtgaatatcctgttctccaagagctctccactttcagcatcagttgatgatctttgttaagaggtgtctgttaagtaaacacattggtattgtgaaactgtaagagaaattgaagaaacaagccctgccatgaactattggaaatctagtgttggaaattgcataagttgtagataacataaggaaaggaagacaaattgacagctacaaaacattctacaaatggagggtgcaaggactgtgaagatagaatggagtgatgagcatgtagtagtaataatagtgtcttgaaagggttcagtttaaattgcctgacttccccagtcttgccttattccatgtattgtatacgctgagtatcagttttgtgatacctatccctcattattgtttatccttggccctggagaatttgtctggattctaaaaggactgttttgttcgtttgttttaatttggaaaggagagctttatttctcataaagagttgaagccggcaaggtggctgttatgacaggttgggaagcatagccttcagccagaagctggaaacagacactctaaggatgggaagaggaagacagggatttatgccctacaagatagccagatatacatattcagtaaggtataggaggagtcatgaatatttatgaaaggagaaaaacgctgcatgtgcagttgagcttcattacccttcaggggacccatgttcaaaaaatggtggcattagcatgatctctgggggagttctctgatatcaaaaggtgaagcagagaacacgaaaacctcagtccacatcctccatagactggctagaaccactccatggtcagtggtctattggcaggaagaaatgctggtcggtttttgtgccaaaactgcagaagggaggggcagcatcaggcagttggttgatatcagcggtggagcaagtcttcccaaagggttggtttgaacccttagggaaagaaagcctaatggtggtcagtgagggaggggggtatgaccaggtgtgtctggcctcccatcccatcatggccgggaactgttttcagggtttctctggggttcccttggccaggagagggtctgttcagttggttgtggggcttagggtatcatttttatttctcattttcccctttttggctgagatttgccagaggcagcattgatggtcaaacttattttgtcccatatcattgctggagtggtgtggctaacctgcctcgcctccatctaggccctcagtgggacccctatggccaagggacttaaggccaaaagacagccaattaaatcttctaggccagtgggaatggagctggacaagtactcatccaccttaaatgggccattcttaactaactttagggtagattgttcagagggacccatatttcagccctcctcagtgcaatgattaaaggagaagaaaagatgtacaaagatgttataagagtacaaaaaatatttttcagcggagaggcaatttatattgtttcgttcaagtgtataaaaatgtaccttttttaatgcttccaggctgttttatgctgtggatgttgacgacgatatttgggaagatgaggtagaagactagttaactactgctcaagatatggaagtggattgtttttccctaatcttccgtcaagtacacaaagtaactttgcgggatatttagggtactattcattcactcttcctgcgtagaagatatggaagaacgaggtttatattttcatgtggtactactgaagaaggtgcattgatacatttttaaatgtaagttgagaaaaatttataagccaaaggttcagaaaattaaactacagaatattaaatattataatgtgcccaaagctctgaatagttaaaaattaaatatttattttcttccccaagctttaggtaaggagaagaggggtcaagagttaaacttagagaccctttgtctctgagaagcatccttctaagacattctgttggagttccctcagtactattccttacaactggagtgggtagaagccttatgaaaattatactgagaacctgatctcgtttactccatgttaatcacattcctaccaacctaaatttctgccaagtcagttctctttggaggaagcccattactccgtaactgactggatggtccagtgtcattttgatctgcttttcagaatggaaatttataatataaatatatgttttaataccacaaacactgtggggcacttgatatttattagtggtgtatatggtccactggtttcaggccaaatctagaatttagtgatactggctcagaagaatttaagttctattcagccttcctgggtgttagaacctagattcaaaatggcttgtctttgctacttttgttccacattctctctctttacctttgccctaccttctgtttgtaaggatgattttaatattaattccaggaacacatgtttttatttcctctgctggaataggagaaagcttaatatattcccaagctgaatgttcttgaattatatctgcatttaccactgtatatgcatatagtgacagtataacctgtctatactacagtagttccagtcctaactttctgaattatttttaaagatcttctctaacaagctatgggaatttggcttcatactctttctttgcaacagcagtgttctgggtgataattttgaattgatacctgttcctttttctgggttttgttggctttttgaaaaattgtctttccttatcattggtgggaggcttggtagcaaagtaacattttttggaaaagaggacagaaaaattgaactacagcttgagaacgtattctttttttcctactttgttattgcaaattgaggaatcacttttaactgttttaggtgtgtgtgtccagagtgagcaaggattatgtttttggattgtcaaagaggatgcttagtcttaaaataaaaataaatttaaaaatcatcttataattagaacagagttgctgctatttgttctgtcaccaaggcaactaatcacattttaaaactgttcggcatataacatattcttaaagtaagaaaaaaaaggtcacagaatagcatctcttttacctgggcttgtgactgagcttaggttttagggcccatattttgtttaaaccagatagtttcatggtcttccattcaggacattttgtgtaaaaattgaggttaatttgctgggcacagtggctcacgcctgtaatcccagcactttgggaggcctaggcgggcggatcacgaggtcaggagttcgagaccatcatggctaacacggtgaaaccccgtctctactaaaaatacaaaaaattagctgggcatggtggcaggcgcctgtagtcccagctactcaggaggctgaggcaggagaatggcatgaacctgggaggtggagcttgcagtgagccgagatagcgccactgcactccagcctgagcgacagagcgagactccttctcaaaaaaaaaaaaaaaaaaaattgaggttaaagaataaattaaagataagaaatggaaattaaaatgatttgttctacagtatatacctgagaagagtgatttctgtgatcaaagagttcaattcagatttattcagaaagagctactcagaagctctatagttcgtgagctacttgatattttctagagatcattttatgttaagctgttatacattgttgatgatgtcatagaagtaggaaagaagcctttataatacagttttatgaaagaaatgggagccttttttcccatttatgatattaaaaacaacacaggtatttggtgtttagtctcaaaaatttgtttggtcaccttagtgattcttaggtacaaagtcttcatcactcaattttaacaaagaaaatagggcttataaagttatacttttgaagcatgagttatgagctaattttaagatgtatagttttggtagagtacttttgtctcagtaaaatgaaagatttgggtaactccccaaatgccctgtaaaacaaatgggtttgtggaaggttgtggtgtcagcaaaatatatgatagaataaagagttttgtacctaccttaatttcatgaaagcctttttttatgagtgggttgagatttgccataaattagtatgaatttcatgggccttttttctttttgagacagggtctcactgtcacccaggctggagtgcagtggtgcgatcatagctcacggcagccttgagatctggtctcaagcaatcctcccacctcagcctcctgagtagctgcgactgcaggcacatagcaccatgcccagctaattttttttttttctttttagtagaaataaggtctcgctatattgcccaggttgtgaactcctgagctcaagtaatgctcctgcctcagcctgccaaagtgttgggatttacaggcatgagccacagtgcctggcctcctgggtgtttttgggggagtttgaatagtcagtgtctcttcatttttatataaaaggtttgggtctagagctgataaatgaaaataagctatcaaataacttatttatttatttatttgagatggaatctccctctgttgcccagactggagtgcagtggcacaatctcagctcaccgcagcctccacctctcaggttcaagtgattctcctgcctcagcctcccaagtagccaggactacaggcatgctcaccgtgcccagctaatttttttgtatttttagtagagatggggtttcaccatgttggccaggctggtctcgaactcctgacctagtgatccacccgcctcagcctccgaaagtgctggggttacaggcatgagccaccacgcctggccataatttttttttttaaatcaaaatagctctgtgacattttaagcttgtgatcgaactaactttagggcctgcctttgtcagttgagatgcatcttgtttcatccatttttcttttagtttaaatttttattattataatttttatttttttagctaccctattaacagaccatccattttttaaaaagaaactttttattttagaatatagattgacagaaaaagtgccaagattgtacagcgttcctatgtacccctcacttggttttccttattaacatattagtgcagcacatttgtcatattaatgaagtagtattgatattattaagtagagttcatactttattcagattttcttagttttacctaatgtccttcttctgttccaggatcccttctaggacaccacgttattatatttagttatcatgtctccttagacccctctcagctgtcacagttgtctcatctgtttttattgttatataaacattaattataccttggtacatctggattgggcaggagccagaaaactttttgaagacagattacctaatcctagcaggctcagcaaatcagtgatttctttttgactgaggtcttttgtagctttaaatcagttacttctcaggatgcttcagtgctgtgtatgcagttttaggctgttcacctgttctggtaattttcctgctcggcttcttgaaaaacatcattaaacactgggcaagttgatcaagtcaggaagtcagctggacccattagactgtgccctggtgtgagaattagcctgccatcttggctaaatcccgaagtttgttgagtagatgtatcccttcctgttgacctgtggaggagctggtgaacgtaagaaaggctcagtatcagaagccatattcccagacagatttgtggtgttagtcagcagtcttttttttttttttttttgagacggagtcttgctctgtcacccaggctggagtgcagtggcttgatctcggctcactgcaaccttcgcctcccgggttcaagtgattctcctgcctcagcctcccaagtagctgggattacaggtgcccacgaccacacccagctaattttttattttttattttttttaatttttagtagagacggggtttcaccatgttggccagcctggtttcgaactcctgacttcaagtgatccacccatctcagcctcccaaagtgctaggattacaggtgtgagccaccgcacccagcccaaagtcatttgcccaaagtcatttttttagtagtagacagttctaatttacattagtaatctcttcatatactttgtatttattttttctgtcaagagcaatgagagttaattagaggagataataataaagttgttcacgtggctgtctgctttgaaagggaatttcagaattttgactggagtttggatctccctcctacctagtattaactttgccataagcatcaccagcaggtggcagcagttcccatgttctaaaaatatcgtcactagttaagacaggtatagagtatgttgttttgttacagaagtagatttaatttctggtatttaaattttcctcattatatttcattatagtctgttttatactttagtagacagaatggtatctaacagtactatcaaggcaggaacagcagtattatcagaaatttttaaatactcaaaagtgtatgtgaaccacagttgacatcttatgcaattgttacatagtagagtgtcactcctgatagtggcacttaaccttcaaccaccaaagtagggaaattaagttgtatataaagcccctaagtaggaccaaggaattgtaaccccatggtgccctctgatgctggtaagagtagccagcctgctccccaaaccttagcttaactaaaaaaatcaggccagactgagtgtggtcagaaatctggttatgggagctttaggggtattcttagccaatgtttatggtaataatcaactttcatcacccatcgtttagactgtacagtttctcaggttgtctgaagatttaccactccaaggactcccacatttctctgagccagaggatgctttggagaagattgtgtacattggaaacttagggagatttgatgctgaagttgctaagtacaaagttaacacagtcacttcttttccttgcttggatctccttttttcccttcattataaaaacaaaccaaaaaaggaaaagcagctaaactcacactaatacaacataaatacatgtaaattttaaaagcgattgtcttaccctcagtaccattctactttttgcaacctatagtatttcctagaataactcacttatttaacaaatactgatggaatacccagcaatgggccttactctttttcaaggtggtgagaatgtagcagtaaataaaacagacataatctccctgcccatgtggaacttaaattctggcggaaggaaagagacactaagtaaattatctggttcatcagaagataagtaccatgggtcgtgcgcagtggctccctcctgtaatcccagtgctttgagaggctgaggtgagtggatcacttgaagccaggagtttgagaccagtcggggcaacatagtaagactccgtctctcttaaaaaacaaaaaaacactaaaaatttgctgggtgcagtggtatgtgcctgttgtcccagctgacattcaagaggctgaggcaggaggatttcttgagctcaggcggtcaaggctgcagtgagccttgatcacaccactgcattccagcctgaatgacaaagcaagacctttgtctcaaagaaaaaaaaagaaaaaaaaaaaaccatagaagttggggagaagaaatagggagttaggggaggcagggcaatgttggaatcttaaagagtagagaagactccatcaagatagcacttgaacaaagtctcagcagtgtgggattgaaccttctggacacctgggaggagagaattccaggcagagacagcaagggcaaagcccttgggctatgagcatgtaagagggctccaggaacagtgtggtagccagtgagggctgaggcagacccaggaagagtgagagacgggatgtaagcatgtggtcctgtagactgtatagagccttgtgtgaactttggctgccactctgagagggggccattgagcagaggagtgatagggtcaggcgtgtgctttaggggattggtgagcaaaggtggaaacagaccagttaggaggccatttgcagtagctcaggtgagaagtgcaggtggcttgtaccagtgtgccagaagttagaattttgagaactggttagattctgtacttaccttgaaggtaaaattaataggatttgttgacaggctgactatatgagaaattaaggcatcagggttgatttctaggtatttttgtctgagcagttgagatgagaaacctgtaggtagcacaggtctgtggctgaagatcaggaatttggttgtggacaggtaagtttgagatgcctggtagttatcccaggggaaatgataaacaggcagttggatattctagtccggagttcaagggagcaactcagggtagagatagaattatgggagtcaacatgtaaatggcatttaaagtcatgagactagatgagattagaaagggagtgagttttatgtagagaaaggtccaaggactgagtcgtgggtcactccagatgctaagaagtcaaggagatgaggaaaaaccagcaaagacagacagtggccagtgaggtaggaaaaccagctgtgtgtggtgtcttggaagccaagtcaagtttgagggaaggagtaatcaactgtgtcatacgctgcaaaaaggtcaagtactgtgagctgtaacaattgaagcagtcagtattgaggtccttggggactttgacaagtgctgtttcagtggagggcagttgcaaatctagagtatgtttgagaaagaatggggtgtcctcataataagaaaaaggctaagcaaaccgataatcaacagcttttcttacatctgtcagagaattgaggtcacagggcaaaccttcaccgcaaaaacaggcaggaaaatggagatcggctcacctaaggcagaagctgttggagacagtaattgagatttaaacatattgctgtgggctaagtgtggactagcttgagggttcaaaaccgggagcttgtctaagggaaccccacactttggtgggttttacctcgaggagacccactaggttctcctgtaaagatggcaggaaaattcccttgtgctttggacacgggaagggggaaagtaatccttttgaaatacatccaggaagaaatcagccccagatcttctgttctccatggcagagaacagttttctcagggaaaactacttgcagaagccttctctagcttaggagaagggcagttggatggctcaacccccttctagccttcctgtctcacataggaggaggaaaaaacaagtctccactaaaaaaaaaaaaaaaaaaaaaaaaaaaagacagatttaatcataagaatatgcagtgcatcttctcaccaatacgataccatcagtagggctccaggataacagtggattacaactgagagctgcaagacatggactctattttaagaaggaatttctagggaaacccaaagacaacaggggagacaaggatattgaggaaaattggagcctctagcacctacagcgaacatcagatgcagcctgttagccagataaacatacaactcacattaaaggtctgtttacgtaagttcttgttacctaatatatcatgtctggcttcagtaaaaaagtacaaagcatgctaaaagggaaaaaagaagagacaaagcgagcatcagagccagactcagatatgtcagaaatttgagagttatcagactgggaatttaaaataactgattaatgtgccagatttctaatagaaaaaatgaacaacatgcaagaatagtcacgtagtataagcaacagatggaaacttagaatcaaaaagaaatgcaaa

SEQ ID NO: 8035 - DNA, 540 bp, Homo sapiens
catggagaaaccccatctctactaaaaatacaaaattagcctggcgtggtggtgcatgcctgtaatcccagctactcgagaggctgaggcaggagaatagcttgaatccgggaggcggaggttgcagtgagacaagatcgtgtcattgcactccagcctgggcaacaagagcgaaactctgtctcaaaaaaaaaaaaaaaaaagctagaaataaaacactgaaacagacatgaatgactttgatgggctcataagactgaacacagccagaaagaatcagtgaacttgaagatatgtcaatagaaacttcccaaattgaaattgaaagatttcaaaaaggaatggaaaatttttaaaaacagcagaatatccaagaactgtgggataatttttaaaagtgtaggttggatgtagtgtcttacacttgtaatcccagcactttgggaggctgaggtaggcgattgcttgaggccaggagtttgagtccagcctgggcaacatgacaaaacccagtgtctacaaaaaaaaaaaaaaaaaaaa

SEQ ID NO: 8036 - DNA, 398 bp, Homo sapiens
gtgatttgtgagattttggtgcactcatcactcgagtagtatacactgcaccctatttgtagtcttttatccttcgtccccctctcatccttccccctaagtccccaaagtccattgtatcattcttaagagcaggccacttctaaatctggggcccttctaagtgcagggccctatgtgactgcacgggttgctggcccatgaatctaatcctgcccgggaggcaatggtggtaaaagctttagaatcctgtaggcttgggttagagtcttagctctgcaagttactcttttggaggaagaaatatatgaaaaagcggacacaggagcttattagattgtgaggagcacattagtttgatgggtcccaggagaaggagccaacatttctgtattcca

SEQ ID NO: 8037 - DNA, 368 bp, Homo sapiens
ctttgaatgtgttgttccagatttaacataagtagtaaataacataaaataacataaaacagtatttttaggattcatgaatagttttgtaggagttatttagaacaggaaaaggtaaattggaaattttacctagaaatatacatcttgtgtataaaaattgataccttatgaacacattaatgaagactttattttcagtttttaggagatcagcgacaaatctttagtggaaggcagaaagtccataagtcctttctggatgtcttttttacttgtgttgtttcaagagttttagttaaataggaagtaggcaaatgtaactactgagtatctcttttgttttctgctgtaatgtaggagtgttt

SEQ ID NO: 8038 - DNA, 368 bp, Homo sapiens; identical to SEQ ID NO: 8037

SEQ ID NO: 8039 - DNA, 368 bp, Homo sapiens
gttttactctgcaatggtccttaaatttcttttttttaaattgccactgaggcaaccctagttcaagaactcattcttccttgcttgtactattaaactcttttctgagttctctcttctcttctgagccacccttcattgatcagaaatactatcttcctaaaactcttcccttcctaaaatgcttctagcccttcactcttcccagcctatcagtggtatccacatgtcagttcttagatattcagagactctcccctttacatgaccccctcttaggcttgttttactgccttctgtctttcttcccgcctctccaggttgacagccttctctgaacgacctctccattactctcatgctttgct

SEQ ID NO: 8040 - DNA, 4832 bp, Homo sapiens
gagatgtaactgatgagcatggggaaagaggatcttttgctgaaacagatgaacacacggggtaaagtgtttaagtcccttttgcctgtcagataaggtcttttaggaaaagtcagctttggatcatgtcatcactgttatgttctatgcagaacatttcacacaagacatttcttcccaacaaacaaggccttttgtgtagcattatgttaaaattgtgttgcaactttttgttacagggttgataccaaggagctagaagatattgcaggtatgttttacgagctatttgtggtttatgaaaattgttttcaaccatacaacccttacagtaggttatatgaattagtggatgacaagactgtcttaaatgccttcttctcatatatagcatttaatgtaatctgtttaataatttttcttacttacttttttaattgttgatgtggaatgtgagaatgcttctaataatggtgaagcaagaggggtggcttttctttcatacacgtggaaatttaattgtttgggggatattagaggacattggaggagaaacagctctattcgttcctttcagtgtacacacattaagtcatatatcaggtttttttttagcttttactttatgtttgggggtacatgtgcaggttcgttatatagataaattgcgtgtcacaggggtttggtatacagattattttgtcacccagattataagcatcgtacctgatgggtggttttccatcctcaccttcctcctaccctccaacctcaagtaggcccaggtgtgtgttgttcacctcttcctgtccgtatgtactcagtttttaatatgagtttttcatcttcctaatttagctattgtcacaactttctaattttgttttctttaaagtaccagagaaaattgaattctctaaaatgatgattttctattattattccagtaacaagctgtgtagtagaaaaggaaagacaacttttctacccagtgagaagcatacaattggatccaaaaactcataaactttatattgccatgtgaaatattagttgcactgttatgggaccatattttcaaaaaagtttgagaaaatttctgtagagattatgaagacaatactcttatttttaaaaagcttactttagttttcagctcttctatagcgataattcatataagcagtatatttggaaagctttgctctgcttggtggtgacaaagtgccggttttgtctaatacaatgagcattatagatggatactgtatgtaaaaaaatttgtattatggtgcagctcttttatgattgctcaaaactattctcagcaattgatggtagatctctcatgtgaaaccatgtttaggaaagcattccttgcagtattacagttttctgaaacactgcactgtggataaaaatgtcatataaaaagctctcagaaaatatttcaaatgtgttttgaatgtatttatctatttaaacctaaatgtttacacccatggacattgcttcttttattaaaatatagttaatagcatcaactattgattaaaaatactttctttattgtgtattaagttatttctacccttttgatggtcttattaaatcagatacttttttgtgctttacataatgagttgtgacagtatttcacggaaacatgtcctttgaattgtaggacattttataaatgtagaaattaaagtctgtggctgggcacggttgctcacacctgtaatcccagcactttgggaggccgaggtgggtggatcacgaggtcaggagatcaagaccatcctggctaacacggtgaaaccccgtctccactaaaaatataaaaattagccgggcgtggtggcgggcgcctgtagtcccagctactcgggaggctaaggcaggagaatggcgtgaacccgggaggcggaggctgcagtgagccaagatcgtgccacagcactccagcctgggtgacagagcgagactctgtctcaaaaaaaaaaaaaaagaaattaaagtctgtgtttgtaaccctttctgcacacttaaaaaatagaaacttttaattatttgctttttttcattatctgtcaattaagtgatttgctgttataccaactgaaattggaatactaatacctgaaaggttttacataaagtaagtaaatcttgctttttgaaatgatctttgcattttacattttaaatgtccttctgatattgctgaaccatcaagtcccatattgattttaatatatgcaaagaaactacttttcaacatgaacatttaatgcatattcatttactatctagctgacattaaagagcatcttgctgcaaagagaaaaaggattgaaaagattgcaaaagcttgcagcgaaataaagaacagaattaaaaatgttttgagaacaacacaactaaaaaggtatgattgttggcttttttgaataatgatatttatatcatttctttgtattcattggtgcaaataatttccagaactatcctgtacatattggtgtctctagggaacaacatattttacttgattgttccctaaacaggtaagtttctttagttttataacctcaatttaacagaattgagagatattacctagaagccaatgaagatgacctctttttgccttccagataaaaagtcttcctgtaaaattaatgtttatccatttctagaaatacggtaggtgaatataagataaatgtcttcaacgtttagtctgtagattcttaacaatattcaattatgtagaaagggataaccttgtgttgtaaataagttatttattttagttaaattgttttcactattccttttagatcattgtcgtgccaaagtggagaaatagttaagtgaagtatttctttcgggaaatcttacgggatgaatggctatgatattcttgcacctccttatgagaacgcatatgttatttagtaagaagaaatgaaaagtaaactgctcttggagaaaaagattgtttctgggaaatttatagtgcagtaaaccctcctttgtcttcagcaggtaaagaatgtaagatagctgctctagtagtcagttaggaagggatcctttcagaatgacagtaactcatttcaccttttcccaaaaagaagatttcagctgctattactcccttgctactttatagtacaaactatgtcaagtcagttttggtttgaataggattaatttttcatccctctatgacgtatgaccttgttacttattatgtgttacaggcagaaacgtgattatagaatttctctgaagttgccgaatgtccttgaagagttcatcacagatgagcagaaagatgaggaaggagatggagaaaaggaagaacaaattgttggtatcaggcttagctttatgattaacctattgtatcaatgtctcaggtagtaatagttcatgcagaaatccagcaaagaaggaagagagcatgagcccagagagggtcgcccattagtggactcatggactaggggaatataattgccatgcagcattaggggtccaactgaagtcagcatcatagcgatgaagaagttaaagtgaactcagttggcatatttgtgcaagagcagctgtagggttggaatttcctgggttggggtgtagccgagcatgttgatagagggagagttggacagggcatagaggcagggatggggttatgatgactggctgtggaatttcagctggggctgagttacctgagcacatgggggtggggcattgggcagtgaaaagtgctccattcaataggcgtcaggtccctacagactcctgagctgtagtactgaagtgagtgacctacagtggcaggaaggtagtggctgtatgttgggaagatggagaaacagatgagtgcagtggtcaagggctgcgactctggagccccactgcttgggatccaattccagtttgaccattgctagttcaggaaccatgggcatattatttatctctgtgctaaagttactttatatacgaaaggagacatggtgagggtacctatttcagagttgtttggaggattaaagggttcctgtgtaacaggtttatttaaatttttcaggatgcgatctgacccatggttgctgtttatcattgctattattaatattatgtagatactgcagtcactgggaatgacaaaatttaggggatgactgtgagtgccacgtagaggagaggagaacactattgttggagattaggtcaaggtgcagaaaggcaatcattaatggaaggtttatctatgtacatattgaaatgaccaagatttaacaggtgtttaaaatcttagtaagaaagaatgtttcttagttaatttctgtatagatcttacctatctgtggtcaacaaattataggaagggtcatcaaatactcttcatttgaaatcaagaattaagacgtatgtgttgaatatgtataagaaagaaaattctttactccatgactgatgaaaaaggttattgttttagcacatgagtggtgaacacaattgtttcaaattggtcataaacgttgtctaaaagaaagtgttcagaagtattgatttaaagagtatttctttaatgcagaatgttttataagtattaaaatttacccaattttaatcacttttttgttttgtgcctctagaaaatatttcaagagcaacaaaagaggtggcaacaagatgggaaaggaactgaaagagattgagccaccacacgagcaattcacaaaggtctgttctatttggtaacacaatacgttcttataaaatacaacacatgcataaaaata

SEQ ID NO: 8041 - DNA, 4832 bp, Homo sapiens; identical to SEQ ID NO: 8040

SEQ ID NO: 8042 - DNA, 368 bp, Homo sapiens; identical to SEQ ID NO: 8039

SEQ ID NO: 8043 - DNA, 20645 bp, Homo sapiens
aggctgggcgcggtggctcacgcctgtaatcccagcactttgggaggccgaggtgggcggatcacgaggtcaggagatcgagaccatcctggctaacatggtgaaaccccgtctctgctaaaaaatacaaaaaattagccgggcatggtggcgggcgcctgtagtcccagctactcgggaggctgaggcaggagaatggcgtgaacccgggaagcggagcttgcagtgagccgagattgtgccgctgcactccagcctgggcgagagtgcgagactccgtctcaaaaaaaaaaaaaaaaaaaaacacagggaacttaatccagataaatggtttatacaggtgttggcagagacaaaaagccaaacagaatagtcaaatagcccagacagagatgagtgacagcaagaagctactgccacccttacactagagggacaggacaacactgtgctaccagagctcagggtctaggatcaactactacaagttagatccaagtaggttgtaggagacagcctgatgttgaggggtggggagaggatggatactctggcttggaggtggtgtcagggtaggagatactctggctttttccttgatctctccaatctccagaaaatgcctccaattgatggagcccagcaattcagcttggaagtcaaccagtattggagtccagcccatgcagccttcatggagtcagtccaccactgacttttttttttttttatttgagtcggagtctcgctctgttgccaggctagagtgcagtggcatgatctcagctcactggaacctccacctcctgggttcaagccattctcctgcctcagcctcctgagtagctgggactacaggtgcacaccaccatgcccagctaatttttgtatttttagtacaaacgggttttcaccatgttggccaggatggtcttaatctcttgacctcgcgatctgtccgcctcggcctcccaaagtgttgggattacaggtgtgcgtgccaccatgcctgacctttttttttttttaatagtgatggagtctcgctccactgcccaggctggagtgccgtggccagaccatagctcactgtagcctccaacttctgggctcaagtgatccttctacctcagcctcctgagtagctgggattaccagtgtgagctactgaacccggcttccactgccattttgaaaagagcaggggaaaagtgaagaatagacttgaaagcaaaaaaaaaaggccagggtcagcacagagggaaatcaggaagaaatcaaaacattactgatgggccgagcatggtggctcatgcctgtaatcccatcactttgggaagttgaggctggcagatcatttgaggtcaggagttcgagaccagcctggccaacgtggtgaaaccctgtctctactaaaaatacaaaaaaatgagccgggcacggtggcacacaactgtaatcccagctactcgggaggctgaggcatgagaatctcttgaacccaggaagcggaggttgcagtgagccgagacagtgccactgcactccagcctgggtgacagagtgagaacgtatctcagaaaaaaacaaaaaccaaaacaaaataaacaacataactgatgaatccattcccttgaggaaaatcaactgaaggtacctggacaaaggtgggtttctggaaatgcaacatcaagacccaggcattttctgcaaaatgtcctttatagctggtttgtccaaactaggatctagatgtagatgatacactacatctggttgttatgtctcttaatatttaaatttagaaaaataccttttcctaaattagtgaaggaaagaggccagttgtccttacaacatcctactgccagaatttgtttgctgccttttgctttcctttagctgatcctatagactatcctgttaacttgattagatctaagttaaacattttttaaaaattatttttaatttttgtggctactaaacattttttataatatgtcatagttgttgggtatagaggctaactaacacatgtaatcccagaactttgggaggctgaggtgggaaattgcttgaagtcaggagtttgagaccctttttctgcaaaaaattaaaaaaattaacaagggtatggtgtcaggtgcctgtagtcccagctacttggaaggtgaagagggaggattgcttgatcccgggaggttgaggctgaagtgagctgtgatagaaccactgcattccagcctgggcaacagggcgagaccctctctcaaaaaaaaaaaaaaaaaagtcatagttgatggtagctacttaatattgtcatcccagcaggagacacataatatctggttgttctgccattatgttaagatttaccacggtgttatggtggtaagagccggggcacagttaacttaccccttaggaccaggaagtaatctttgtggtacttactctttctaaaggtcagtttcctcatctgaaatgtgaataaatagggttgttgaacggattaagtaaatcaatgcatttaaagaacctatgacatagtaaacattcaaataaactagcaattattattattatttggttgcaattctaccatcagagaacatagggtagaagaacaaaaacaaaaactccctctcctcaggtcccaacgcttgctaatatttcccttttctaaaaggaggaaggccattttggagtctgacagaccaggctggaagtttggccttattgctagaacaggtgatatctgtggacaagttacttctatcaattttctcctatgtaataattaccttttgtggaggggttagtgtgtatattgtattaaacacttacaaggatcttcacatgtaattcttccttgaatcctacaataattattacctgccgggcgcggtgggtcacgcctgtaatcccagcacttcgggaggccgaggcgggcagattacttgaggtcaggagttgaagaccatcctggttaacacggtgaaaccccgtctctactaaaaatacaaaaaaattagccgggcgtggtggcatgcgcctgtaatcccagctactcgggaggctgaagcaggagaatggcgtgaacccgggaggtggagcttgcagtgaaccgagatagcgccactgcactccagcctgagcgacagagtgagactccgtctcaaaaaacaaaacaaaacaaaaacaaaaataaatttaaaaaagacgagataacctttctctatcctctgtaaagttggactcccctcttccctgcttcactttgctccacctaacccactactataaatatttaccatttttttgagacagggtaccactctgtcacccagcctggagtgcagtggtgcgatcacgactcactatagccacgacctcctgggttcaagcgatcctcccatctcagtctcctgagtagctagctgagaccacaggtgggcgctatcacgtccaatttttttttttttttttgatacggagtctcgctctgtcgcccaggttggagtgcaatggtgcgatctcggctcaccgcaacctccgcctcccgggttcaagccattctcctgcttcagcctcccgagtagctgggattacaggggcccgccaccacgcccagctaacttttgtatttttagtagagaccgggtttcaccaggttggccgggcgtatctcgaactcctgacctcaggcgatccgcccgcctcggcctcccaaagtgctgggattacacgcgtgacccaccgcgccgggccaaagtctggctagtttttaaattttttgtagagacaagagtttcgctatgttgcccagggctggtgtccaactcctgggctcacgtgatcctcccgtctcagcgtcgggagtacctgacattccaggcgcgagccacggcgccggctcctgttggttttagtatctgtcttgttccactagaatctcaaccccacaaggacaagaatttttatctgttttgttcactgctgttttttcagcatttatagcagctccaggcgcgtagcagagaatcattaaatatttatagaaagattaaatacgctcttccggaagcaccgacaaacaagattaaatgagcttggattgaacctcgtagcggcccgtagtactcctccttcccgccatcctatagatgaaaggaagaaaaggaaaagccccgcccctcgctcggctgctggaggcgagggcttcggaagtcttcatgctagtctcgtggggttccgcggtgtcgtcgctggctgtgcgcgtcatttccgggcgtcacgtaacggagtggccaacggcctgcagagcaacatgcccaagtgagtggggccccgaaatctgagggtgatcgtagtcactagttgtggcccccatgcaggagcggagagcgggttctggtttctgaaacctcgagggatgggagagtatctgggccgggtggacggaggcagggagatggagagcgctagacaccccattttagagtgcagatggatcccgcttaaggcaacaaaaaaaagcctggtttatgtgtcgacgctttgatgcttttgagtcgtgaggcggtctggctttttgttttgtttgtttgttttgtttttatcttccatgaacagcgcttccgtggatgggcatctcagtggttgtcgtctttttctcttcctttcacctcttttcaggttttattgtgactactgcgatacatacctcacccatgactctgtaagtggcatatctattcatagtttcaaaaagccttatgtgtaataattaaatgagttttgtgttttttttaagttgcaagttgtgctttcccacctgctgaggtttaaggtctactccttgaagaaaataattggaggttattttcccacccttccagtaactttgattaaaaactgcttaacaagtcaggcatggtggtgtgcctgcagtcccagatacgcaagaggatgaggtgagagaattgcttgaggtccaggctgcagtgaggcatgatcaggcactgcactccagcctggacaacaaaacaaaaaaagctgcttgtcaaataataacaacagttaaagcagaatgttttgttagtacttttttttttttgaaacggagtttcgctcttgttgccctggctggagtgcagtggtgcaatctcggctcactgcaacctgctcctcccgggtttaagcgattctcctgcctcagcctcccgagtagctgggattacaggcatgggccaccacgcccggctaattttgaatttttaggagagatggggtttctccatgttggtcaggctggtctcgaactcccgacctcaggcgatctgtcctcctcggcctcccaaagtgctgagattacaggtgtgagccaccatgcccagccaaccccgtctcttaaaaaaaaatttagtggtctatcttaagagcacttgagtggatcttttaccatgcatgattttgtaatgtgcattggttatttggaaaatgttgattgacttgagttagtgccagggttcaaatgtagacacatttgattatgtaatgaaaacccttgggaggccgaggcgggcggatcacgaggtcaggagatcgagaccacggtgaaaccccgtctctactaaaaatacaaaaaattagctgggcgcggtggcgggcgggcgactctatagtcccagctactcgggaggctgaggcaggagaatggcgtgaacctcggaggcggagcttgcagtgagccgagatcccgccactgcactccagcctgggcgacagagcgagactccgtctcaaaaaaaaaaaaaaaaaaaaaaaaaagaaaagaaaacccacgttaattaatgtcacaatctaatcagaaccacctttaagtattgggaagctgtcaagcttatggtggcaaataatattttccaaaattctgatttttgcttaatagctcaaattctatcattggcaatactttccattgctctccttgaagtgacaggctcactccattcatttttgagaagtctgaatatacagtttgtgtctcagtcactctcaaataaaaatggtgttccatcaaagaggcagctgggctggatatggtggctcatgtctgtaatcccagcacttcgggaggccgaggaaggaggattgcttgagcccaggacttcaagagaggcagctagtagagctcacaatttgaacaattacatgcctgcttttccttgaaagagcatcatattttggcatgcaacacaagtggctttgtctatacttcccattttgtcactcagaatattaaaaagaattgaacttaagggtttttaataaaaattaataattttgttgcttcattaaggacactcagtggaactggcttttttttcccccatgagtacatacgttgaagaatacagtgatcactaatacagtaggttgccattgccttgattcattctaaagtaccaggagtttggcatcatcagtgaaaatgtcaatacagtgaaaaaggaaagtaatggcttagtagtattatgaaaacactttgaccttgcagacctcatgaaagagtctcagagacccttagatgtctgtctgtgaaccataccttgaacactgcagctctatgctttgctgtctctgtagaaatctgattaaatcataactctttttacagctgaggcctcactgtgtttcccaggctggtctaaattatgattcttgatcatcttgaatagtagctggaagaaactggccagtgatttttctattgtcaccttatttgaaattctttctaacatatggtcagatgtagtacagcattaatagagatgtggaacatttaagttgggtggttcctcttgaagacattattatagttctgtatattatctttttttttttttttttttgagatggagtcttgctttatttcctgggctggagtgcaatggcgcgatcttgtttcactgcagcctctgcgtcccaggctcaagcaattctcctgtctcagcttctccagtagctgggattacaggcctgcaccaccacacctggctagttttcttatttttagtacagacggggtttcaccatgaaaaaacggtcccgcctcagcctcccaaagtgctgggagtgagtcactgtgtccggccaagttctgtgtattatcatacattgtcctagaatagagtgctctgataaattggtatttttagtagctagtcagttcttccttataggtccctagtcctttttttacccctctctaggtaaaacccctcgacataattttctgaaattgttaatgagggggctgtgcctttctgcccttttttggcattatagtttaatatacctattattcaccttcttgctaatgccagaattcagagaactgagaagtatttctttatattataaatatcttttcatgagaaatgtcatgaacccttgttccttctaaaatgatgtcttgcaaaaatagaaaatgtctatggtgattgattttacagatccctgcagtggacttagaaatgtgtaaaatcagctgggtgtggtggcttacacctgtaatcccagcactaggaggccaaggtgggcagatcacgagatcaggagttaaaaccagcctggccaacatagtgaaaccccatctctactaaaaatacaaaaaaaaattagctgggtgtagtggcacgcgcctatagtcccaggtacttgggaggctgaagcaggagaatcacttgaacctgggagggagaggttgcagtaagctgagatcttgccactgcactccagcctgggtgacagagtgagactccgtctcaaaaaaaaccaaaaaaaaaaacaacaaaaaagaaatgtgtaaaaacattcagtagtgctgtaatttttggactttggttgatttttagtcatgtttttgtctttttttttgagatggagtctcactgtgttgcccaggctggagtgcagtagcatgatctcagttcactgcaacctccacctcctagattcaagtgattctcctgcctcagcctcccgagtagctgggattacaggcgcgtgccatcatgcccaactaatttttgtatttttagtagagacagtttcgccttgtaggccagggtggtcttgaactcctgacatcaggtgatccgcacactttggcctcccaaagtgctgggattataggtgtgagccaccgcgactggctgctagtcatgattttgttattaggcttaaggcatcattgtattaatgtaagcagtggttgggaagacaaggaacaatttttttttttttttttttttttttgtgacggagtatctctgtgtcgcccaggttggagtgcaatggcatgatcttggctcactgcaagctccgcctcctgggttcacgccattctcctgcctcagcttcctgagtagctaggactacaggtgcccgccaccatacttttttgtatttttagcagagacgaggtttcaccatgttagccaggatggtctcgatctgaccttgtgatccacccacctcggcctcccaaagtgctgggattacaggcttgagctactgcgcccagccaggaacaattttttttattttggagataggattttgctttgtcacccaggctggagtgtagtggagtgatcttggctcactgtagccttgatctcctgggctcaaacgtgcttcccattttagcctcccaagtagctgcaaccaccacctttgctgcagttactcaactgttccttgtagagagaagctgtagccaatatataaataaatgtgctgggctctgtggctcacacctgtaatctcacagcactttgggaggccaagatgagaggatcacttgagcctaggggtttgagaccagaatgggcaacattgtgagacgtcatctctacaaaaaattaaaaagttggctggtcatagtggcttgtgtctctagtcccagcaactcaggaggctgaggtgggatgattgcttgagcccggatggttgaggctgcagtgagccgagatcgtgctattgtattccagcctgggcaacagagcaggaccctgttagaaaaaaaaaaaaagatagatagagataaatgtggttgtgttccaatactttttttttaaaacacaaaagccagtggctggccaatggggcatagtttgctgacctctggtctagataatatagtaaaaaaattaccacagtgtgttgctggataatgtttttaagtaatactgtagcagccagctaatgctgctgatactagacacgctacttatataaaggtaaaactttattaaatttttagtgttggacatttgtttctacgtctgatatgatctttttattttacagccatctgtgagaaagacacactgcagtggaaggaaacacaaagagaatgtgaaagactattatcagaaatggatggaagagcaggctcagagcctgattgacaaaacaagtatgtttcaatctcttgttctgctgtggtaaaatggtcctattctttcttatccctgtctctggtgtttttcacagaggcaactcattctgaatgataaataggagcatttggatgtgtcgaatgaaagaagcagaaggtcattggtttcccaaggatataagaacacattaatatttattattgaggatagagcagtcagagacagcaataaggttagatggggaagtgaggcagagaagagtggaggtgcttaatatttatctattggcacagacgagattttgtagcaaatttctataaagcccctttgtagtaatccacaggttttagaagtatgttcctattctaataggagcaggtgaggagtgggtttgtggttttccccaaatagtttgagactatatttagatttcttatttgtagtcctgatagagtactagtcaaaaagagactacctgatgtaacaaaatagtctggatatgttttggacccctgttgtacctcccatgctctttttgttaggaacattttgttctggcttattgggtccgggacactaacagaaggagatattgcatttttactttagatcatcctggtatatttgaatcacggcctttcttaatcattcattgtactccaagctggcaagcaaatatgggctttgtgatgtgcctttttaaaaaagcagtaggccaggtgcagtggctgatgcctgtaatcccagtactttgggaggccgaggctggcagatcacttgaggccaggagttggagaccatcctggccaaatggtgaaaccccatctctactaaaaatataaaaattagcggggcgtggtggtgcctgcttctaatcccagctactcaggaggctaaggcaggagaatcgcttgaacccagaaggtggaggttgcagtgagctgagattgcactactgcactccagcctgggtgagagagtgagactgtctcaaaaaaaaaaaaaattaaaaatttgtattttttatttatttttatttatttatttatttgagacagtctcactctgtcgccaggctggagtgcagtggtgtgatcttggctcactgcaagctccacctcccaggttcaagcgattctcctgcctcagcctcctaagtagctgggattacaggcatgcaccaccacgcccagctaattttgtatttttagtagagacggggtttctccatgttgaggctggtttcgaactcctgacttcaggtgatccacccgcctcagcctcccaaagtgctgggattacaggcgtgagccaccatgcccagccaaaaatttttttaaaaattaaaaaacaataaaaaggcaaaactgtccgggcacagtggcttacttacgcctgtaatctcagcactttgggaggaggaggtgggcagatcctctgaggtcaggagttcgagaccagcttggccaacatggcaaaaccccatctctactaaaaatacaaaaaattggccgggcgtggtggctcacgcctgtaatcctagcactttgggaggctgaggcgggtggatcacctgaagtcaggagttcgaaaccagcctcaacatggagaaaccccgtctctactaaaaatacaaaattagctgggcgtggtggtgcatgcctgtaatcccagctacttgggaggctgaggcaggagaattgcttgaacctgggaggcggaggttgggttgagccgagatcgcgccattgcattccagcctgggcaacaagagggaaactccgtctcaaaaacaaacaaaaaaaaacaacaaaaaacaaaaaattcagacgggcatggtggtgcgtgcctgtagccccagctacttgggagactgaggcaggagaatcgctcaaacccaggaagcggaggttgcagtgagctaagattgcgccactgcactccaacctgggtgacagagtgagactccatctcaaaaaaataataataattaataaataataaaaaggcaaaactattgtggaaattttcaaataaaatagagaagcgggggcctggcatggtggctcatgcctgtaatcccagcactttgggaggccgaggtgggtggatcacctgagatcagcagtttgagaccagcctgaccaacatcgagaaaccgtgtctctagtaaaaatacaaaattacctgggtgtggtggcacatgcctgtaatcccagctacttgggaggctgaggcaggagaatcgcttgaacccgggaggtggaggttgcagtgaacagagatctcgccactgcattccagcctgggcaacagagcgagactctgtctgaaaaaaaaaactagacaagcttaatgaacctcccattctgaatttcctcacccttcatttctcattgctcagctgtagcactcttgttccatttattctaagtttctcaacctcgatactgttggcatttaaggctggataatcttttgctgtgagggtctttctgtgcatttcaggatgtttgacagcatccctggcatatgccaactagatgcccgtaccaacctccagttgtgactactaaaaatatctccaggcattgtgcagtgcccctgggaagcaaaattgtttctggccgagacagccactgaatattgtcatctactccctttctccttcctggattattatggagcaaacctcagacattgtcccagtttttaaaatttatcttatatatttatttatttatttatttattttatttatttattgagattgagtcttgctccattgcccaggttggagtgcagtggcacgatctcagctcactgcagcctctgcctcctgggttcaagcgagtctcctgcctcagcctcccgagtagctgggactacaggtgcatgccaccacacctggctaatttttttgtatttttggtagaaatgaggtttcaccatgttggccaggctggtcttgaactcgtgacctcaagtattcacctgcttcagcctcccaaagtgctgggattacaggccaggcatgagccaccatgcccagtcacaattttttttttagaactgagtctcactctgttgcccagactggagtgctgtggtgccattaaagctcactgcagcctcaaatttctgggctcaggtgatcctccggtcttggcctcctgagtaggtagggctacaggtgcacaccactatgccaggttaattttgtaaaattttttatagagatggtgtctcactttgttgcccaggctggtcttgaactcctggcctcaagcaatcctcctgcctcggcctccagaagtgttgggattataggcatgagccaccacacctgccccattgtcccatttcatatgaaaaaataaaccatgatgtaatcttgtctccttatttgaaaagatgttagaaatttcttggcattaaaagatttacagtatattctgtagttactttccatatgcagcaaaataatttaggatgaataaactttttttatttaaattttaatttttttagagatagagtcttactctgtcacccaggctggagtgcagtggcctgatcatagctcactgtagccttgaactcctgggctcaagcattcctcctgcctcagcctcccaagtagctgggactacaggtgcacaccaccatgctcagctaatctttattttttgtagagacgggatctcactatgttgcccaagctagtctttaactctggagctcaagagatcctcctgcctcagcctcccaaagtgctaggattacaggcaggagccactgcactcggcttgaatacacgtttttgtttttgttttaaggctagtcagaataaacatttttagtggaggactttttgagaatgggggggagcccctcagggacacacctatgaaatccatgattatattgacatagagcctgctactaagtcagtgactttgcttcccccacttcaggctttacaagctgtcctcttacaaaggatgtgagagaggcctttttgattgaaaaagtccatattggggtgtaatccctgagatcgcacaggctttattcagaggcatatggataataagctattcatgaatctccacttaggtcactttttttggatctgatcccatgaattatcaataattgatgagtaatttgacttcctttgcattggtgggagtggagtgggatgggctgtagacagcttatgtcaggaatagactttatgagtgtgtattttaatatttatttgtgattcttttctaacactaaatatagatgatcttcagtttctcttgttttctcttgtgcttcatctgaaaaaaaaatttttaaattgattgcattagactttcttaaaaatcataatctcttttggggcaggcttatagtttgaaatctttgtatgttttaaatatcctagtttagtgcatcgatttccaaactggtaaaccaacatggtgtattattttgacctaggacagcatacataggaaggatagaaattttataaagcctagctttttgggcacgtattacactttttcaaacaaaactatgaatggcttgaattggttataaactacatctatagattaaagatgactgttcctctttggtaaaagacattgatagggccaggcatggcggctcacgcctataatcctagcactctggtaagctgaggtgagtggattgcgtggactcaggagtttgagaccagcccgggcaatatggtgaaacccggtctctataaaaaataaaaagttagccaggtgtggtgccatgcacctgtagctactcgggaggatgaattgagagggtcacctgagcccgggaggtcgaagctgctgtgagctgcggttgtgtccctgcactccaacatgggtgacagtgagactctgtctcaaaaagaagacattgataagcaggaaatttttgctccagtctcccatatttaatttagccatagaaatgctaagtagaaaacataaatcaataaaccaattaactgcacttttagccggtgaatacctaaaaatgattttaaaactgtagaaccatgatgtaataattttagatgacaactagcaagagtaaagtaattggaaccgttgaagacttaaagaaagtggttattttagttactggattgttgaattcttattcatctttttttttttttttttcctcaccctccaaagcggctgcatttcaacaaggaaagatacctcctactccattctctgctcctcctcctgcaggggcgatgataccacctccccccagccttcgtaagtttaaacttttaatcttaaggggtgtgacggggcaggctatcctttgattaggttagattatctcaccgttggctttcaaatgctgttgcatttgtatgtagatagtaatataaatgtataaatatataaatgttgaatatagatgcaggtagtaatagaaaacaactttagtggtataatttctaaaataactttagagttaacttttgattgcattgtcactaagatactgtatttgtggaatcccaagtgtggatctaagacagatttaaatggaaagaaagctcagaatgaacctgtgattagatgagctaatacatgaataggagttgctaggtacattaaattatttactgctatgagcccagcactggaggattaaaatagctgataaactccttagtcttttgccctattttctaacccacctaacaccaaaatctataccttagaaagataagaattaggctgggcgtggtggttcacacctgtaatcccagcactttgggaggctgaggtgggtggatcacctgaggtcaggagttcgagaccagcctggctaacatcgtgaaaccccatccctactaaaaatacaaaagttagccaggcatggtggtgcacgtctgtagtcccagctactcaggaggctgaggcaggagagttgcttgaacccgggtggtgggggttgcagtgagctgagatcacctcactgtgtactccagcctgggcaatacagcaagactttgtctcaaaaaaaaaaaaaaaaagaaaagaaaagaaggaaaggtaagaattagatcattgaaagtggagtggatcatgggcccagctttctgggaaagtttgttgtttctgtgtgacagacaagaggagactgagtgctgtactgggtcgtactgtactgtagctctcctgggaggggtcagactgaaatcacattcaggacctagactcaatcttgcacacaatcacgggtataaacccagggaagtagactgtttgtaatagttgcacactaatgtaggtggaccactaatgccctggcaaaccttttctgggcacctgccatcctaggacctggtcaggcctcagcccatagcaactccaaggttacttctctctccttctctaccttgactggctggcactcaactccattatttttgatagcggaatagtctatggtatgaatttaccataatttacctcactattttctttctttcttttttttttttttttttgagacagagtctcactctgttgcccaggctggagtgcagtggcacgatctcagctcactgcaacctccgcctcctgggttccctggattcaagtgattctcctgcccagctaattttgtatttttagtagagatggggttttgccatgttggccaggctggttccgaactcctgacctcctgtgatctgcccgcctcggcctcccaaagtgctgggattacaggcttgagccaccacccccagcctacctcactattttcttattaagttgttccaaattttaggtattgtaaatgatactgtcagaaatatccctgcatataagtctttgcattttcaaagaatcttttaaaaccatgttttcattttttacaaagggatcttaaattagatacttgtggcttaagttcatcagctttttgtcaggagctctatagaaggtacaacctctccacccccttgttttgtttttttaaattaaaatctcaattttttcttaacctagggaatctgactttattttattctcctgtctaggcaggcttgttcttgctttttattcatagattaatgtgttatggcctgtgatttttgtggatctgctattataaaaagagaccataagagggttgttgtttcagaatttgaaggagttcatgagatccttttagtttgattaagaagagaaaatgttgctgggcgcagtggctcacgcctgtaatcctagcactttgggaggtcgacgtgggcagatcacctgaggttgggagttcaggaccagcctgaccaacatggagaaaccctgtctctactagaaatacaaaattagctgggcgtggtggcacatgcctgtaatctcagctacttgggaggctgaggcaggagaattgcttgaacctgggaggcagaggttgtggtgagccgagattgtgccattgcactccggcctgggcaacaagaacgaaactccgtctcaaaaaaaaagaagagaaaatgttaatatgtgagcacaccttaaccacaggctccattctttatttcagcgggtcctcctcgccctggtatgatgccagcaccccatatggggggccctcccatgatgccaatgatgggccctcctcctcctgggatgatgccagtgggacctggtaagtttgaatgtctgtctttctagtttgttccatttagtttagttactatgcatagctgacacttaatggaaggaagtcagtatgtgtagccaaagcttgaaaatggggagttgtgctccacctctgagggtggaatatttacataaattatctaattagctgtctaaatgtactattgtaacaaattaaatttggtcaattattaatgataaagaaaaagaaatacttggtttatcattataattggatggtgtccagtgacctcgtgctactaaaagcaggataggttgcttctgtttttcttttcctctcttctgtttccttgcctcatcctggcttttggccatttatactgaagagaagggtagatgagcttgttccattttgtgggaagggggaaggttatagatacattttctcagttttgatttggagcagagccacttcttgttgcttgtttaatcttgcagtttaacttggccacatcattatattaaaaaggctttcagcctggtagttgtttttttatttagggaggcgtaaaaaacttacacttcaaacattttattttaatgtaaatttaaacatacattaatttgcaaatctttctgatacatgagcaggacctttgctttgagagtgtgtctaggccaggcgcggtggctcatgcctgtaatcccagcactttgggaggccaaggcaggcagatcacgaggtcaagagatcaagaccatcttggctaacacaatgaaaccccatctctacttaaaaatacaaaaaattagccaggtgtggtggcacgcgcctgttgtctcagctactcaggaggctgaggcaggagaatcacttgaacccaggaggcagaggttgcagtgagctgatattgtgccactgcactccagcctgggtgacagagtgagactgtgtctcaaaaaaaaaaaaaaaaaaaaagtgtgtctaatgattggaacactgtatatttattgcataaaccagcaagccataactatagcacatcctccaccaactttagtttcatttctttgaagtggtctgagaccttgtgatataatctagttccaatcttttatgattactttgcctaccaaattgttgagcattttttggtgatagtttatctgagtcttcctaagtattaagttagttttcatagaagctattctcttttcacactcatttaattggtttgcagaaaaattatatatatataattggagtaataactacaactgacataatcaggtttgggaacagatgtgaccaacacctacaactcttctggaaaaacaagctgcaaagttactagagtagcttcctaggcagaagtatcagtatgtgtgctgcaggtatcacttagaggagggggagagtgtagataaagagaattcctgccttactgacttgtgagcccaaaacacaatcaaatgacttcaatggctttagcatccttaaaccaggctcacaaattcaaattcttagaggttttagggatgtggtgaactggggaatgcatgattcatctaaagaagtcttctagaactcagcttcagcctatggttgacatttgagaatacaggcttggtgttgccttttctcctgagtttgctttttgttttctgttttttcaaaccaggataaaatgataagattgtgggatttgtgttaaaataattgagtaattagagggtggacggggataggaatgggtggggagtatagataaagttgtccatgagtggataattgttgaagctggatgatggatacatggatgttcattatactcttctttactattcttgtgtatgtttgaacatttccataataaaaagtttaaaagaaaaaaggaatctagacttttgtatgaaatcccaatgttgtcaactgattcaaagtaaattcactatggagactaaagaaaacgagtttccagtttttagtctttggtctatgtccatccatttcctctaagaaattcttcaatataggttaagcatgggcttttatgtcgtatttagaagttagtagtattctctgttcctgtttaaattggtcttaaattctgtacctgttggattttgtgtctttgcatattcttgtgtttcaccatttgtgataaggctatattcaagtttgaatatggttttctcttgaaccctttgctgcaaacctttaatcaaaattatttagttaaaaataaattggtaagatttgatatttaaaaagaatatagataacgtgaaattatgtggcgtaatagtaaaattaatatccatgaacccaccacccagctgagaagtagaacattatcaattccattgaaactacctgtgttcctcccctacccctctgcctgccctcccctccctggctcatttatttggctggtttattgatgggacacttaaaaaaattcattaatagtttctgaaatgcattagaaaaatcagatttttgtgtgcgctaattgttataaatcacgttattgcctattatttttcttgacttgagctaagtatggttactaacaggttctcagcatgggcctcctgctcacctttcctacaactccgaacaaacgcttagtggtaagattgtcctctgtgcctgtgtacattcatgaaatagctcctggttatatggtggataacactgattaaaagagctgactgaaaaacatgtgacttagttgtgaatttccctgagtgagaaaaaaaggtcagtttagggaactagtgtccctggcgatttctggaaagcagtctattaatagtttcccccttactatcattagatcatgattcccatatggttcttgtgttgacctttttgttttttgtttgagaatgtctaagtaatttacagatgtgataaatttgttgcatttcttctgtcacgtgtgtcttttttccagcattttgcaaggggggctacgttttttgtttttaattgaagtcccatcaaactctccctaaatcgtattttctgactccctttttctccctcttctttgttttgtcctgcagctcctggaatgaggccgcccatgggaggccatatgccaatgatgcctgggcccccaatgatgagacctcctgcccgtcccatgatggtgcccactcggcccggaatgactcgaccagacagataaggatagaggggaggccttattgtatcggttttatattacctgttctgcttcaccaggagatcatgctgctgtgatactgagttttctaaacagcataaggaagacttgctcccctgtcctatgaaagagaatagttttggaggggagaagtgggacaaaaaagatgcagttttcctttgtattgggaaatgtgaaaataaaattgtcaactctttcagttaaaagtgtgttccctttttcctcctctctgtgttctctgtgtattataaaagaaatgaaacattcca

SEQ ID NO: 8044 - DNA, 121 bp, Homo sapiens
tagtcccagctactggggaggctgaggcaggagaatcacttgaacccgggaggtggaggttgcagtgatccaagagcacaccattgcactccagcctgggctacagagtgagactctgtct

SEQ ID NO: 8045 - DNA, 4860 bp, Homo sapiens
ggcagcgttctggttttctggatggcagcagaggacagggagatgatggaagcccggggtgcgggagaaagttgcccgaccttccccaagatggtgcctggtgactccaagtctgaagggaagccaagggcttatctggtaagggggctgctgtgtctcaccacccccgcctattccgtcagggggagcaagaatactgtaggaacacatgctttgagcttccagacaactgccaagaacatcaggtgacatgtaccccagccctgtaactggcaccagctgtcaccagggaccaggtagccctccataagattgtgaagtcatatgaagctgggtttggtctcctctatctacctccccacttggggtcctttccttgctgggtggataggacctggctccccaccatagccctcttcctggtccccaaatatttaggttctctcaattcagaccctgggtttctttctccctctgtaacttcctgaagacctggcatctaactgacctcaaagtcaggtagagttgaggatgggcccggaagttgcctctttggtgatcagaaaaatcactagaaaaatggacatcaatctactcaactcccagtgcctccacttgcaactttagggcactattactttgtgctagtttgccctctccttgacccgcaggtcctgacaactcccggtaagagcacttctaataagaattcagcctagatctttacaattcaaacaccccagtccactgcggcctggggtgcgggagttccatggggtcaggggcagccccatcctgactcttcaaggtacctcccctccctgcttcccctacgccaggaggcagagtcccagaagccagactcctcctatgactacttggaagagatggaagcttgtgaggacggaggctgccaagggccgcttaaatcgctgtcccccaagtcctgccgtgctaccaaaggccaggctggcgacggacccaaacccgcagagctgcccccgacccctgggactgagcgcaatcccgagatggagctggagaaggtgcgcatggagttcgagctcacgcggctcaagtacctgcatgagaagaaccagcggcagcggcagcacgaggtggtgatggagcagctgcagcgggagcggcagcacgaggtggtgatggagcagctgcagcaagaggcggcgccccgcctggtgggtgacaaggaacggggcactgggaggagggaggcctggagctgaagtcccatggggcctggagcaggcgcccaccttccctgctttgcgcggcaccccaccctgcagatcctggatctcggctgaaaggggctgagcatccactcgggcggtctccagccctctccgccttggctcacttccagagatgtctgctcactgccttaaagctcgctaccctacctggccagctctgttaaacagagcttccacgggaagctgagatgtgactctctaaggagagctgaggccgggagggtccccagaaccacatcgcccacccgacagcctttttggtagcttcaaggaaaagtcttcaacatttcctccctcttccaccgctcacaagtcctctctgcatctcttaaaatttgatgcctggagactagacccagaatccccactgcaccctggccagtggattttgatagaaccatcacctccccgatcagggctatgtttattctgttggatcatactgccttctagtcaactgaaacagccatcttttcacaagaagtacaccactgttccctaatctgtattaaatgggggataagaatgcctacttgagattaaatgggatgtgaagagcttagcacagtggctaggctatcataagcattcaatagtggaagatgttgtttaaagcagtgtttcctgcactttaaagtcagaaagtcctggattaaaatgccagttataaactccctgacattgggcaaattactaatttcctttgagctttggcttgctcatccatgaagtagtacctacctcacagggttgttgtcaggaatcaatgagagaacacacgcaaagcactttgcaattagcccagcacattaggtaagcactcaataaacgttagctactaccatttttatgtactcatgcaattcacttcttgacccaaatgcaacaacatacatttatcacttttcagttttattgggatatgatgtattagctgtgcttcccagctctgagtcatcctcagttctgagaaccatgccttctgcctttatccaaatcattgctgtaattgttgaggaggaaatgacctaaagtaaataccactaaatgtctctgtataggttggcaatgttccattaatcatcacccttgagttacattttatcctgctcacatttctccaccttatccaaaaaacggagacgcactgtcaaatggtttcccaaaattaagatattacattacctatagcatttccccaattgactggtccagttttgtttctgtttttttaagaaagtaaggttggttttgcatcatttgttctcaatgagcacgtgctggcttcttaaacaattatctttttttctgttcacaaaatacctgcttcattataaacatgaaatgatttcactgaactcagtcaagcttactgaacttggatttccagaatcttcccctgcccccacaccctttttgaaaagtctagaaaacatttgcctattgcttagactttagcacacttcctaatatttttgaattctaagttccatttgcaaacttgtgacttttctcagtagcctgggataaaatctgtcacaaagtggaacctgaaactatttaaagcagatatgatattgtaactatgcctttggcctgtgtctcctcctaaccatatttattttacccccttttcagtttgaaaatctttctccttgctggatgagatggaaatctttggtatatagtcctctctctatttctctcttctgctcaagaattagaacattgaaagtattttgaaaagtctaaagggtttcacaagcactttcttttttaatgaaagtcataatgatcactcatcagcatttcagactgaaacacgtgcagactgcagacaggtggcaaagtccaggggtccagagccatactgagcctgcagagaaccgtcgggtcagccccgtcctccactcccattagaacactggattgcttcctctggtctccaaccttcctagctattcattttagaggcagcatcatcaggtcattttctgtcccctcagtttggtctagttgccctcacattttatgcagctgtttcaacagtgatgtgtccccatcctccagcctttggtgatagtttacaaaagtgcttactttttgtgcatttactaaaaattggggagttgacttgatgttgtaccttcctctcttctctttttctgggagggtgaatagatggacggacagagagagtgtattgaattgaaaatacctctttgagtgtgtttctagctagtttagggcatctcggtccctgccacctggtgctttccaaaaatatgccatgatttttacaaatattttaaaaaataatgcatgggttatgccctcttaactatggatcaaaataatatcagcttttgccttacttatacattgatactttctacagttaaaatgaagactgttgggccccagttatatagattcaagaaaagagcaacccacagacagaattagccagacaactcaagctgctttcccccagcccaaatactctgagggtttagggagaccccatcacctatctctcagcacctgcctccaagagacaccaaaccctggactgaaggaccatgggctgacccacgtgatatgtgtcaggacccagggagtgagaaacagtcatttatatgcaagggacaccatgtcattgggccactgtccaggaaactaggttgaatgtcagggcactgtgagagaacactcccaagacccaacatccacatgtggggctcttggagtcagagggagaagacccacgtgtgtggctccaatgggccgtacagaccataaagagaaaggaaggtggtggcctggcgccccagtcaggagggataagagcagctcaaaaagtaaaaaatgatgagttccttctatgtgctagttacctgactaggaatgttcattatctcacttttcctccttgtgatcttttgttttgttttatttttttaagaaacaggatcttgctgtctcacccaggctgaagttagtggcatgagcatagctcaccataaccccgaactcttgggctcaagtgatccttccacctcagcctcccaatagatgggactataggcacacgccaccagatttggctaatttttaaatttttttttatagagataggggtctcactacattgcccaggctggtctcaaactcctggcttcaagcaatcctcccaccttggcctccccaagtactgggattataggtatgagccaccttgcccagccctcatgattttggaaatgggcactattaccctttctttaggtgaagatgatgacttgaggtcacatacaggcagggtcagagcaggactgaacctagatctgcctggcgccaacaatggcatcatcatctccactgtcttctctcccccacagttttcaggaggcctccagaacttcctgctgccccagaaccagtttgccatgttcctgtactgcttcatcttcattcacatcatctatgtcaccaaggagatggtcttctttctcttcgccaagcactacctattctgcattgcagccattttgctctgtttgattaaaactttctggtcata

SEQ ID NO: 8046 - DNA, 4861 bp, Homo sapiens
ggcagcgttctggttttctggatggcagcagaggacagggagatgatggaagcccggggtgcgggagaaagttgcccgaccttccccaagatggtgcctggtgactccaagtctgaagggaagccaagggcttatctggtaagggggctgctgtgtctcaccacccccgcctattccgtcagggggagcaagaatactgtaggaacacatgctttgagcttccagacaactgccaagaacatcaggtgacatgtaccccagccctgtaactggcaccagctgtcaccagggaccaggtagccctccataagattgtgaagtcatatgaagctgggtttggtctcctctatctacctccccacttggggtcctttccttgctgggtggataggacctggctccccaccatagccctcttcctggtccccaaatatttaggttctctcaattcagaccctgggtttctttctccctctgtaacttcctgaagacctggcatctaactgacctcaaagtcaggtagagttgaggatgggcccggaagttgcctctttggtgatcagaaaaatcactagaaaaatggacatcaatctactcaactcccagtgcctccacttgcaactttagggcactattactttgtgctagtttgccctctccttgacccgcaggtcctgacaactcccggtaagagcacttctaataagaattcagcctagatctttacaattcaaacaccccagtccactgcggcctggggctgcgggagttccatggggtcaggggcagccccatcctgactcttcaaggtacctcccctccctgcttcccctacgccaggaggcagagtcccagaagccagactcctcctatgactacttggaagagatggaagcttgtgaggacggaggctgccaagggccgcttaaatcgctgtcccccaagtcctgccgtgctaccaaaggccaggctggcgacggacccaaacccgcagagctgcccccgacccctgggactgagcgcaatcccgagatggagctggagaaggtgcgcatggagttcgagctcacgcggctcaagtacctgcatgagaagaaccagcggcagcggcagcacgaggtggtgatggagcagctgcagcgggagcggcagcacgaggtggtgatggagcagctgcagcaagaggcggcgccccgcctggtgggtgacaaggaacggggcactgggaggagggaggcctggagctgaagtcccatggggcctggagcaggcgcccaccttccctgctttgcgcggcaccccaccctgcagatcctggatctcggctgaaaggggctgagcatccactcgggcggtctccagccctctccgccttggctcacttccagagatgtctgctcactgccttaaagctcgctaccctacctggccagctctgttaaacagagcttccacgggaagctgagatgtgactctctaaggagagctgaggccgggagggtccccagaaccacatcgcccacccgacagcctttttggtagcttcaaggaaaagtcttcaacatttcctccctcttccaccgctcacaagtcctctctgcatctcttaaaatttgatgcctggagactagacccagaatccccactgcaccctggccagtggattttgatagaaccatcacctccccgatcagggctatgtttattctgttggatcatactgccttctagtcaactgaaacagccatcttttcacaagaagtacaccactgttccctaatctgtattaaatgggggataagaatgcctacttgagattaaatgggatgtgaagagcttagcacagtggctaggctatcataagcattcaatagtggaagatgttgtttaaagcagtgtttcctgcactttaaagtcagaaagtcctggattaaaatgccagttataaactccctgacattgggcaaattactaatttcctttgagctttggcttgctcatccatgaagtagtacctacctcacagggttgttgtcaggaatcaatgagagaacacacgcaaagcactttgcaattagcccagcacattaggtaagcactcaataaacgttagctactaccatttttatgtactcatgcaattcacttcttgacccaaatgcaacaacatacatttatcacttttcagttttattgggatatgatgtattagctgtgcttcccagctctgagtcatcctcagttctgagaaccatgccttctgcctttatccaaatcattgctgtaattgttgaggaggaaatgacctaaagtaaataccactaaatgtctctgtataggttggcaatgttccattaatcatcacccttgagttacattttatcctgctcacatttctccaccttatccaaaaaacggagacgcactgtcaaatggtttcccaaaattaagatattacattacctatagcatttccccaattgactggtccagttttgtttctgtttttttaagaaagtaaggttggttttgcatcatttgttctcaatgagcacgtgctggcttcttaaacaattatctttttttctgttcacaaaatacctgcttcattataaacatgaaatgatttcactgaactcagtcaagcttactgaacttggatttccagaatcttcccctgcccccacaccctttttgaaaagtctagaaaacatttgcctattgcttagactttagcacacttcctaatatttttgaattctaagttccatttgcaaacttgtgacttttctcagtagcctgggataaaatctgtcacaaagtggaacctgaaactatttaaagcagatatgatattgtaactatgcctttggcctgtgtctcctcctaaccatatttattttacccccttttcagtttgaaaatctttctccttgctggatgagatggaaatctttggtatatagtcctctctctatttctctcttctgctcaagaattagaacattgaaagtattttgaaaagtctaaagggtttcacaagcactttcttttttaatgaaagtcataatgatcactcatcagcatttcagactgaaacacgtgcagactgcagacaggtggcaaagtccaggggtccagagccatactgagcctgcagagaaccgtcgggtcagccccgtcctccactcccattagaacactggattgcttcctctggtctccaaccttcctagctattcattttagaggcagcatcatcaggtcattttctgtcccctcagtttggtctagttgccctcacattttatgcagctgtttcaacagtgatgtgtccccatcctccagcctttggtgatagtttacaaaagtgcttactttttgtgcatttactaaaaattggggagttgacttgatgttgtaccttcctctcttctctttttctgggagggtgaatagatggacggacagagagagtgtattgaattgaaaatacctctttgagtgtgtttctagctagtttagggcatctcggtccctgccacctggtgctttccaaaaatatgccatgatttttacaaatattttaaaaaataatgcatgggttatgccctcttaactatggatcaaaataatatcagcttttgccttacttatacattgatactttctacagttaaaatgaagactgttgggccccagttatatagattcaagaaaagagcaacccacagacagaattagccagacaactcaagctgctttcccccagcccaaatactctgagggtttagggagaccccatcacctatctctcagcacctgcctccaagagacaccaaaccctggactgaaggaccatgggctgacccacgtgatatgtgtcaggacccagggagtgagaaacagtcatttatatgcaagggacaccatgtcattgggccactgtccaggaaactaggttgaatgtcagggcactgtgagagaacactcccaagacccaacatccacatgtggggctcttggagtcagagggagaagacccacgtgtgtggctccaatgggccgtacagaccataaagagaaaggaaggtggtggcctggcgccccagtcaggagggataagagcagctcaaaaagtaaaaaatgatgagttccttctatgtgctagttacctgactaggaatgttcattatctcacttttcctccttgtgatcttttgttttgttttatttttttaagaaacaggatcttgctgtctcacccaggctgaagttagtggcatgagcatagctcaccataaccccgaactcttgggctcaagtgatccttccacctcagcctcccaatagatgggactataggcacacgccaccagatttggctaatttttaaatttttttttatagagataggggtctcactacattgcccaggctggtctcaaactcctggcttcaagcaatcctcccaccttggcctccccaagtactgggattataggtatgagccaccttgcccagccctcatgattttggaaatgggcactattaccctttctttaggtgaagatgatgacttgaggtcacatacaggcagggtcagagcaggactgaacctagatctgcctggcgccaacaatggcatcatcatctccactgtcttctctcccccacagttttcaggaggcctccagaacttcctgctgccccagaaccagtttgccatgttcctgtactgcttcatcttcattcacatcatctatgtcaccaaggagatggtcttctttctcttcgccaagcactacctattctgcattgcagccattttgctctgtttgattaaaactttctggtcata

SEQ ID NO: 8047 - DNA, 16062 bp, Homo sapiens
gaaagccagtggaagcaccctccgggggtgcacggaggaaaggacgctcagcctgacctccctggggctgtccatgccagcggatccatgtgagggaggggcccgctcctgcttggtgacagagtcagcacgcggtggcctgcaggtaatgtttctgtctgggtatgtgtctttttatttggccgttctcggattgctataaagaaatacctgagaccaggtattttataaagaaaagagggttggctcacggttccatagactgtacaggaagcatggtgctggcatctgtttagcttctggggaggcctcgggaaacagagtcacggtgaaggcagagtgggagcaggcgcctcatatggccacagcaggaacaaggggcagggggaggtaccacacactcatttattttttttgagatggatcctcgctctgtcatccaggctggagcacagtggcctgatcttggctcactgcaacctccgcctccccagttcaagtgattctcctgcctcagcctcgcaagtagctgggattacaggcgcccaccaccacgcctggctaatttttgtatttttggtagagacagggtttcaccatgttggccaggctggtcttgaactcctgacctcaggtgatctgcctgcctcagcctcccaaaatgctgagagtacaggtgtgagccaccacgcctggccaccacacacttttaaacaaccagatatcatgagaactcactcactgtcatgctaaaccagccatgagggttctgcccccatgatccagcagtcacctcccaccaggtcccacctctaactttggagattgcacttcaacatgagatttggtggggacacagattcaaaccaaatcagtcccagttcctgcccctgcctgctcatcatccttacattgacccttatggtgtctgatctgatggggattcaggcgaaggctgtagcgggaccagaatcactctagtggaggatctgagacccccacgttgtctgcactgctgccaaacaggccaggaaatgtgtgtcttctgtgtgctaggatgatttagtgagcacatctcatgggaatgcatccgtcagctctaggtttggtcagtaaaaccaatggcagtgcgctcttggctgatgttgccattacagagggtgttgagaaaaggagtccctgggggtgcttctggagtgtcaacagctcctggctgcttagcgtgtcctctcccccttctgctgcttctgcaactcctgataaagtaggtgtgagtcgctatgaatttgcattatcacatcaaaaaatttttttctaaaatattttattgagccgggtgcagtggctcacacctgtaatcccagcactttgggaggccgaggtgggcggatcacctcaggtgacgagttcgagaccagcctggccaacatggtgaaaccccatctctattaaaaatacaaaataagctgggtatggtagcacatgcctgtaatcccaactacttgagaggctgaggcaggagatttgcttgaacttgtgaggtggaggttgcagtgagccgagatcatgccattgcactccagcctgggcaacaagagtgaaactccatctcaaaaaaaaaaaaaaaaaaaatatatatatatatatatatatatatatatatatatatatatatatgtatacacacacacacatatagtagtaaaaaaacacatagcatgacatgtaccatcttaaccatatttaagtgtgtggttcaggggtattaaacacattcacagtgttgtgcagccatcacccccacacatctccagaactcttttcatcttctaaaactaaaactccgagcttcacgttgggctaagtgaaaaagaaacaaaaaaactaaaactctgtccctgtaaacaccaactctccattcccttttcccccaaccttcgactttctgtcttctatgatcttgactactctaatttccgtatagaagtggagtcacagggtatttgtctttctgtggctggcttatttcactttgcacgatatccaaggtttatgttgtagtaagtgtcagaatgtcctccctctgtaagactgagtaatatctcactgtgtgtacatatcacacgttgcttgttcatctgtcagtggacacttgggttgctttcaccttctggctattgtgaacgatgctgctatgaacacagatgttcaattacatctttgagaccctgctttcttctttttttttttttttgagatggagtcttgctctgtcgccaggctggagtgcagtggcgcgatctcagttcactgcaacctctacctcccgggttcaagtcgttctcctgcctcagcctcccgagtagctgggactacaggcacgagccaccacgcccagctaagtttttgtatttttagtagagatggggtttcaccatgttagccaagatggtctcgatcgcttgaccttgtgatccaccgccttggccacccaaagtgctgggattacaggcgtgagccaccacgcccggcccaatttctttgggtatatatccagaagtggaattgctagattttaagtggaattattttctttattttcttttcaaattgttcattgctagtgtttagaaatgcagctgattttgtgtatttatttatttatttattttttcagtctgactctgttgcccaggctggagtgcagtggtgtgatctcagctcactgcaacctctgccccctcgtttcaagcaattctcctgcctcagcctttttagtcgctggaattacaggcgtgtgctaccatgcctggctaatttttgtacttttagtagagacggggtttcgccatattcgccaggctggtgtccaatttctggcctcaagtgatctgcccacctcagcctcccaaaatgctgggattataggcatgagccactgcaccttgcctcatttattaattctaatatttgtgtgtgtgtgtgtgtgtgtatgtgtgtgtgtaatctttaggcatttctacatataagatcatatctgcaaatagagataaccttttttttttttttttttttttgagacgaagttttgctctgtcacccaggctggagtgtaatggcgtaatatcagctcactgcaacctccatctcctgggttcaggcgattctcctgcctcagcctcccgagtaggtgggattacaggtgcccaccatcatgcccagctaattttttgtatttttagtagagacagggttttaccatgttggccaggctggtcttgaactcctgacctcaggtgatctgcccgccttggcctcccaaagtgctaggattacaggcgtgagccattgcgcccggcctcagattttctacttctttgtgatttagttttggcaggttttgtgtatgtaggaatttgtccatttcatttaggttattcatgttgttcagtgttgtagtatttagtattctattataattctctctctttttttaatttttattattattttttgagacggaggtttgctcttgttgcccagtctggagtgcaatggcatgatctcagctcactgcaacttctgcctcctgggttcaagggattctcctgcctcagcctctctagtagctgagattacaggcatctgccactatgcccagctaattttttgtatttttagtagagacggggttttactatgttggccaggctagtctcaaactcctgacctcaggcaatccacctgcctcagtccccgaaagtgctggcattacaggcatgagccactgctccccgctctttttttttttttttttggcgatagagtctcactgtgttgccctggctggagtgcagtggtgcgatttcagctcactgcaacctccacctcctgggttccagtgattcttctgcctcagccttcaggtgtgcaccatcacacctggccaatttttgtaattttagtagagacagggtttcaccgtgttgtctaggctggtctcaaactcctgacctcaggtgatccacccgcctcggcctcccaaagtgctgggattacaggcatgagccaccgggcacgcctggcctttattttatttttctacgttattattcctgttttcagaggagggaattgtcagggaatgaggaaacaggacatgaggacaaggccagatctagggttctcttcaaaagccatgcagatgcatggagacagaaagtagaccggtggttaccaggacctgtcgggagggaggaggaggagtgactgctaatgggtacagtttctttctgagctgatgaaactgtgttggaattagatagtggttatggttacacaatttcgcgaatattttgtatccactgaattatgtactttcaaaggatgaattttatggtattttaaatctatccagtaaaataatttaaaagtttaaaaagtcatggatacgtaatgaattaggaacaaaattcaggtcaggttttaaaatgacagtcacatcagagaaatctttttttttcttttttttgagacagagtttccctcttgtcacccaggctggagtgcagtggcaccatcttggctcactgcaacctctgcctcccaggttcaggtgattctcctgcttcaacctcccgagtagccaggactacaggcgcgcgccaccgcgcctggctaattttttgtattcttagtagagatggggtttcaccatgctggccaggtcggtctcaaactcctaacctcaaatgatccacccgccttgggctcccaaagtgctgggatttcaggtgtgagccacggcgcccggccactaaaaggtttttatggggtatataaagcatgattgttttattttacttttgggtgtgcaacactgtctagaatggtcagtctgtagacgttgaagagacattgccatctgaaccagaaaatggagctcttttgcgatcagagagataccaaggacctagaagacgcgcatgctcagagacccttgcagagtcccgcacagctgtcctccagcagagaagagctgctcagctacctggtggccctgctgcggcaggggagcagagggcgtcgccaagcaaagccaggctcaaggaggtacctcactcttaaaccctgtgcttgaaacccgtgtctttagcatggatgtggcaatcactatcagtttctgaatcacctaagcagttcacctgaaatgtcattgcattaagtgtgtgatgatgccaaggacagtaatatctgaactaattcgtactcttacctgtttaaagtgactgtacagcctttggtgcagctccaaaagctgcttgacttgataagttttggaataattataacctgtgtttatatggaagcagtttagaaaacaacggaagtggttttcaaaaccattctttttttttagacggagtctcacactgtcatccaggctggagtgcagtggtgccatcccggctcactgtgcttctccacctcccaggttcaagcgattctccttccttagcctcctgggtagcttggattacaagcgcctgccaaccacacccagctaatttttgtatttttagtagaaatagggtctcaccttgttggtcaggctggtctcaaactcccgacctcgtgatccacccgccttggcttcccaaagtgttgggattacaggcatgagccaccatgcccggccttcagaaccattcttgacttacagatgataatttctccagaaatggatattaatttatacatttactgggtgtccatcaagtatcagtccctgttctagggatggaggggacagtgtgcacaagatagacagggctcggctcttaggggagaaacaggacagtcaaaccagtcatctgacaaaactgtcagttgaggccgggcacggtggctcacacctgtaatcccagcactttgggaggccgaggtgggcggatcacctgaagtcaggagttcgagaccagcctgaccaacatagtgaaaccctgtctctactaaaaatacaaaaattagctgggcatggtggcaggcgcctgtaatcccagccacttgggagactgagggaggagaatcgcttgaacccaggaggcggaggttgcagtgagccaagatcgtgccattgcactccagcctgggggacaagaacgagacttcgtctcaaaaacaaaaacaaaaacaaaaaaaactgtcagttgaacctaagtgttaagcagaaaattgtggagtttccctgtctgctgttattaagctcatacagaatttaggtcaggccatggcaaggtaatatcccatattcccaccttctcccacttcctgtggagttgaaagtcagctggccacttctttcaaaagatttttgaaagtcttaattaaacatttttgtcttataatgaaaagatttttctgtagcttttctgcttgttttgcgagcatctgtggccctcctctgaagcccttccagccctttgcagctcctactcaatctcttgctctctctctaaatgccaatctttttttttttttttttttgagagagggtctcattctgtcacccaggagcgtagtggctcaatcatggctcactgcagcctccacctcccaggctcaattgatcttcctgcatcagcctcccgagtagctggacccacagcacaggcgcacacccccacacccagctgatttttaattttttttagagacagggtctcattatgttgtccaagctggtctcgaactcctaccctgaagtaatcctcctggcttggcctcccaaattgcagggattacaggcgtgagccactgcgtctggccttctaagcactgatcttgtgatctccctggacctcagaagacttcctgtttctaggacttcctcagcttccctctcactttattgcttccctggggatctcaccgtcctcctggtttcccaggccttcttccctctacagactcccacgcttcccgttcagacctctctctggtgcctcagatctcttcattgaaacatctccacctggctgtcctgtgaacccctctgcctttcatgtctgagcagagcccacaagctggctttctgtccacccctgcattgtcaggggccgtttcgcctaccccaggctcaagctgggaacccagagccattcttgactttctccttaactcactcctccccatgtcctgtggtcgctaagcctggagggctatgctctcccctcatctccctcccctgccacccacatccctctccttacctgagtcctcatcttttcctgactgtactgtgggggtagtcttgactgcctgccaggcttccagccctgccccatcctctgcaccaccacccaaggcaccttcctaaaacctccctccacagctgcctggagaaggaaatccaaaccttggcccctctcagcctgggcctgggttgcctttcagcccttctggcctgcccgtctccaggcgccgcctccagctgtgccaccccctcacctgagtatgcggcgcagcctgggtgagtcctggagggcaggacacacatctccttatcaccgtgtccttattccagggccttgcccaggacagtgcccagagcttgtcatgggggacccagaatggatcatagtacttcattaaggagcaaacaggtgaaatagttaataaagcagaatgtttagagttacttggtcactgaaatttttggagaactttctgttttttatgttgtatattgcaccaacttgttggctattgggaaattcttacgggacattcaaaggcatgaaatgctttcccttggtagttcctccagcagtgtgaccgggaggatctggtggaattggctctgcctcagctggctcaggttgtgaccgtgtatgagtttcttctgatgaaggtgagtactcttagtgtttctaaatgatagcgggatgattagaagttatttagaaataatattattatttattaattatttttcaatagcctgcatagttgttaattttatttttgagacagggtcttgctctgtcgcccagctagagtgcagtggcaccatcgtagctcactgcagcctcaaactgctggtctctagcaatccttccacctcagccttccaagtagctgggactacaggcatgcaccatcatacccggctaatttttaatttatttaaaaaaattttttttgtagagatgggatctagctttgttgcccaggctggtctcaaactcctggcctcaagtaatcctcctgcctcggcctcccaaagtgatgggattataggtgtgagctaccgtgcccagctcatagttgttttggaaagagccaggccatttggaatcgttttccttttgcaggacagctgaagtgagcctgctggtcacacaccgtgcctggtgtgggggccgctgcctgggtagctgggtgtctcgggcaggtgcccgtttactcccttgacttttaacttggtacaggaggaatggaagtggcagccacaaataatggctatcctgggctctcctagaacccactcgccccagctggcctcttctgcccgcggctctgctccttctgagcccactctgaggctgcagcccaggctgcctgtgccccacactccctctggagctgacagtccagccggggctcagggcctttctgccttcccttcccaccctgtccaggagctcacccatgccctacatggcccccacccagggcttgtttgtttcttggcctgctcctcccatgcccatcctggcttctctgcaccatgcggggcacacagtaggtgctcactggggactgaaggaaacgcacaccactgagggctgctgaggggttaaggaaccgaaactttgtttagattttcttctgtattttccatatcagtgccttgagtttaaactttttttttggtctttatcttcacgaaggttgaaaaagatcatctagcaaagccttttttcccagctatatataaggaatttgaagagttgcataaaatggttaagaaaatgtgccaagattacctcagtagttctggtctgtgttcccaggagaccctggaaataaacaatgataaggtaacaatctcccatggcagaaagagttttgctcatagagttagccagaagaaagaagggccacgtgcagtggcttatgcttgtagtcccagtgctttgggagactgaggcaggtggatcacttgaggtcaggagtttgagaccagcctggccaacatgacaaaactcagtctctactaaaaatacaaaaattagctgggcgtggtggcacatgcctctaattccagttattcaggaagctgaggcacaagaatcatttgaacctaggaggcagaggttgcagtaagctgagattgcaccattgcactccagcctgggtgacagagactctgtctcaaaaaacaaaacaaaaccaaaaaaaaaaaaaactccatgtatgaaggagaatgtttttagtaatgacattttcctgttcgacctcattttagctttttcccatcaagtgaaaatttttttttctttttgtttttttgggagatggagtcttgctctgtcacccaggctagagtgcagtggtgtgatctcagctcactgtaactgccgcctcccaggttcaagcaattctcctgcctctgcctcccaagtagctgggattagaggcgcacaccaccatgcccagctgattttttgtattttagtagagacagggtttcaccgtgttgcccaggctggtctcgaactcctgagctcaggcagtctgcctgcctcagcctcccaaagtgctaggattacaggtgtgagccaccacatccggtccccagttttttttttcttaaagcaataaatgctcttccagaaaactcaaaaatgaagataagctagaagaaaatggaaaacaccataatcttcccactcactgatgatcagagttaaaacctcaggtatcattttcttctttttttttttttgttttgaaacagggtttccctctgtctcccagactggagtgcagtggcacaatcacagctcaccgcagcctcaaccttctggtcccaaacaatcctcccacataagcctcctgagtagctgggactaccgccgtgtgtcaccatgcccagctaatttttaaatttttcgtagagaaggggtctcgctgtgttgtccactctggtcttgaactccagggctcaactgatcctcccttataggcctcccaaagtgctgggattacaggcatgaaccaccatgcctagccctgttttcttccttatgtgggtttttggggatggattatataggggccattcatttttgtttgtggtggttccgacacaattctcatttcagtgtcattgttattatcaaattgcctttagctacattggattttttggggtgtttttgtttttttgagacagagtctcgctgtcagccaggcttgagtgcaatggtgccatcttggctcactgcaacctcccctcctgggttcaagcgattctcccacctcagcctcctgagtagctgggactacaggtgtgcaccaccatgcccagctaatttttgtatttttagtagagacagggtttcaccgtattggccaggctggtcttgaactcctgacctcaagtgatccgcccgcctcagccttccgaagtgctgggattacaggcataagccaccatgccctgccttattttcttaaattacatatgatgaaaatgtaaaaggtttttgctaagcctcatgtagatgccctccacagcagtcacctgtgtgttttttaaactcttgagtttagcaagtgtgggtatcatcctgctttgaggcggaactcggcacacacacactgtgcctgccctacagaatccggctttttcagcagctcagactgtgccatcgcctcttgggagcatgacagtggctccgtttgtgaggggacaccatccaggttggtccgcgcagaacccacatggcccgttttctcctttaaccttgttctgccgcccttcctgccgtgcccacccccatctcatgctctgtggggttctctttataacatccatgtataaatgataccagctgtctcttagcactttcacatctggtgtttacgtaggcattgcatatggagtcaaatctcatcttcacaaaagcctttccaggtagctgtaacctcttgtctggataagtcagggagatggacaagggagactcaggagatggtggctcaccaagatcacccaggccatgggcagagaagctgggatccagctcaggcccccaagcccatgcctttttaccagctgggaagggagatctgggtgtgggataggcaggatcgtttttctcaagagaccagtgagaagtcagtaaaggagggatagtgggaaagaaagttactatggtatcagctaacattattaagctcgtgatagcattaaagagagtgttttaaatgttttgtaaagactgttctgggctgagcacagtggctcacgcctgtaatcccaacactttgggaggctgaggcgggtggatcacttgaggccagaagttcaagaccagcctggcaaacatggtgaaactccatctttactaaaaatacaaaaattagccaggcatggtggtgcatgcctgtaatcccagctactcaggaggctgaagcaggagaatcacttgaatctgggaagcggaggttgtggtaagccaagatcatgccactgcactccagcctgagcgacagagccagactctgtctcagaaaaaaaaaaaaaaaaaaaaaaaaaagattggtctcctcctctaaattgtgctcacatagaaccttctagtttttataatccatttttatcatcagctagtccatctaacattatattgatcttcatctttctcattgttgagatggcatctcacagtaggtgaggaactttgtagatttaattctatgaagtcgtttaattcttgcatgtgaatgtgcttctgggggtgtgtgctgtttgggtgaagtttattctcttggcccatttcttttcaggttgctgagtcattaggaatcacagaattcctacggaagaaagaaatacacccagacaaccttggacccaagcacctcagccgagacatggatggggagcagctagagggagctagcagcgagaagagggaacgtgaggtgggcatggctgaagtgggtgccaggtgactgtgcacggtgaattagcgtggtttggcttcttctgttcacaccaggaagaggaggtagcggtttgcctattccttcctattctagctgattgggtcttctcttcacaggctgcggaggagggactggcctcagtgaaaaggcccagaagagaagccctgtccaacgataccactgaatctcttgctgccaacagcagaggccgggagaagcccaggcccttgcatgctttggccgctggtgagggtaaaatgctgtttgtggggtgtatccatggcctggcagccctgctgacatgcacagatgtacccaggattgccatttttcaggttgggtgacctgtgctggatttaaggggaccctctggtttctcaagtttcattccagcctcccagtgttctgtcattccagattcattccctgcgagtcttgaggtcttcagggttttctagagtgccttgttaaaatggagagccacaggccaggtgcagtggctcacgcctataatcccagcactttgggaggccgaggtgggcggatcacctgacgtcgggaattcgagaccagcctggccaacatggcaaaaccccgtctctactaaaaatacaaaaaaaactagctgggtgtggtggcgtgtgcctgtaatcccagctacttcggaggctgaggcaggagaattgcttgaacctgggaggcaggaggttgcagtgagccgagattgcaccactgcactccagcctgggtaacagagtgagactccatctcaaaaaaaaaaggagagccaccaaatggtagtaaacaggctataccaggagggtcccaagaggttaggctgagacgggtcccaggacacatccatctatggcttggctttcatgagacttcgctgtacatgccagctgagatttaacatttgaaaacaagacaggtcctggcttttattctggctctagccagaacctatcaactaggcacttaaaaaattatatatataaattttttttttgagacgggagtcgcactttgtcacccaggctggagtgcagtggcacaatctcggctcactgcaacctctgcctcctgggttcaagcaattctactgactcagcctccccagtagctgggattacaggcacccgccatcatgcccggctaatttttttttgtatttttgtagagatggggttttaccattttggtcaggctggtctgaaactcctgactgcaggtgatctgcccacctcggcctcccaaagtgctgggattacaggcatgagccactacgccagcctttttttttttttttgagatggagtcttgctctgtcacccaggctggagtgcaatggcatgatctctgctcactgcaacctctgcctcccaggctcaagcaattctcctgcctcagcctcctgagtagctgggattacaggcgcccaccaccacatctggctaatttttgtatttttagtagagatagggtttccccatgttggccaggctggtcttgaactcctgacctcaaatgatctgcccgcctcagcctcccatagtgctaggattacaggcgtgagcagccaccgtgcccagcctgatggtgattcttaattggggcatgtgttggaaccacctggggaggttattgtgaaatacaggggcctggacctctgggaattccaggtctgcaggtagggttgttgggagggtgtggatgtgagtatttggaaaggcctctttgggtgattctccagctcactctgatgaagaatcaccaatcattcattcagtattggcataaaataactgttgctgggtgtggtggctcatgcctgtaatcccagcactttgggaggctgagtcgggtggctcacaaggtgaggagtttgagaccagcctgacctacatggtgaaaccttgtctctactaaaaatacaaaaattagctgggcatggtggcgcatgcctgtaatcccagctatcaggaggctaaggcaggagaattgcttgaacccaggaggtggaggctgcagtgagctgaaatcgtgccactgcactccagcctgggtgacagagcgagactccatctcaaaaaaaaaaaaaaaaaaaaagcacactgtcgattggctcttagagcatatttttaatacaaaatctgtctttgtgaatagagaatagggacgtattttttaaaattgctaccaatcccaaggagcaaggagcatcgatgctttgacttttctgcagggcaggtgacttggcctagctggttttgggtggtgagtgcagtgagtgggccatgacacagtacacgccatgttcacctgtttcccaaaatgtttaggtttttcccctccagtaaatgtgactgtctctccccgttctgaagaaagccatacaacgacggtttctggtggcaatgggagcgtgttccaggcgggcccgcagcttcaggcactggctaacttagaagccaggagggggtctataggtgctgctctctcatcccgggatgtcagtgggctgcctgtttatgctcagtcaggagagcctaggaggctgacccaggcacaggtggcagcgtttcctggagagaatgctttggaacactcttcagaccaggacacctgggacagcctgaggagcccgggtttctgcagccctttgtcatctggtggtggagcagagtccctgccgcctggggggcctggacatgcagaggcaggacacctcggcaaggtttgtgacttccacctgaaccaccagcagcccagccccaccagcgtcctgcctacagaggtggcagcccctccgcttgagaaaattttgtctgtggatagcgtggcagtggactgtgcctacaggactgtgcccaagccagggcctcagcctggcccacatggatcactattgactgaagggtgtctcagaagcctttcgggggacttgaaccggttcccctgtgggatggaggtgcactctggccagagagaactggagagcgtggttgctgtcggcgaagccatggcttttgaaatttccaatgggagccatgagttactgtctcagggacagaagcagatttttattcagacttccgatgggcttatcttgtcccctccaggtacaatagtgtctcaggaggaggacattgtcacagtgactgatgcagaggggcgtgcctgcggatgggcccgctagaaggagttcctctagaagctgtggagtcggtcgtcaccgtggagccagagccctcacagtgaagtggagtcagatcctagattcgtctgattttatccagagaaggtctatggcaagcaatgtatatttttctaatgtgaatattgcacagatgaaccttttatttataaagaataatgtctttctgccctgctgtctacatttttctatggagcttgtcataataatagcagatattacctgatcaggaatccctgtggcgcgtctgacgctcatgagtttttcatgatggtgatgagtagcactgcactgtcacctgatgattggccctgctccgtttcccttctctcctgggagatatgctgcttttccaccagacttgctccatactagaagcttcttttgggttcaattaaaaagaaaataagctagtcattctgggcagcattttattgatagaagggggaaaaagtcatttctacttgcatgattttttaaattaaattaaattaaattaatttaattatttttgagaccaagtcttactctgtagcccaagctggagtgcagtggcgcgatcttggctcactgcaacctctgccgcctgggctcaagcg

SEQ ID NO: 8048 - DNA, 1790 bp, Homo sapiens
ttttttgtattttagtagatacggggtttcaccatgttgcccagggtggtctcaaactcttgagctcaggcaatccgcccacctcagcttcccaaagtgctgggattacagtacaggcatgagccactgcacctggccaatgatttttttttttttttttgagatggagttttggtcttgttgcccaagctggagtgcaatggctcgatcttggctcaccgcaacctccaccacagggttcaagcaattctcctgcctcagcctcccaagtagctgggattacaggcatgtgccatcacacctggatcattttgtatttttagtagagacggggtatctccatggtggtcaggctgatcttgaactcctgacctcaggtgatctacgcgcctcagcatcccaaagtgctgggattataggtgtgagccactgcactgggcctgattgtttttttttgagatggagtcttgctgtcgccaggctgaagtgcaatggtgcaatctcggctcactgcaccctccgcttcctgggttcaagtgattctcctgcctcagcctgccgagtagctgggactacaggtgtccgccaccacacccggctaatttttgtatttttagtagagatgaggtttcaccatgttggccaggatggtctcgatctcttgacctcgtgatctgcctgcctcggcctcccaaagtgctgggattacaggcgtgagccactgtgcccggccccggcctgatttttttttttagagatgagttttcactctgttgcccaggctggagtgcagtggtgcaatcatagctcattgcagcctttaactcccaggcttaagcgatcctcctgcctcggcctcctgagtagctgggactacaggcgtgcgccacggtgcctggctctcctcacattttacagatgaggaaggtgaggcataaatgatggggtgacttacttgaggtccacagcaagatgctgctcagggtagaagcccagttctttgatgtcccacttggaaagtcacttagtggcatgtcttcaatatttccgtgggctgtgttacggggaaggaagggaagggccatttgtccacatgtggaagaaagcattcaaagggagcagcaggtctctccccacgccttgcagagacggtcaggagagaccccaagcagagagcacgctgctcagggacagagctgggcttgtgaccatgtgtcgccctggcgctgtgctccttccaggtcctgccctggagggcagctgtattctcagagagccagcctttcctacagcccttttagtgaccaggggcatttcctaccctcacttgatctcaaagccacggtcggtaggaacaaaaaggtgggttttctagcaggctggaaatggccagcaggggagcaagccgcggctgcctgggagtgttgggtggtcaggtcaggctgtagatgtatcctgtagactcaaggccgcttctcaggagtccagagtcccataaaccaccatgagtgccctcctgggatcctggagatggagacaagagccctgaggatcattcataaccactgtcaggtaactgacacaacatgctgactcgagtatgaccatggtctggatgaggccctggtaaatatacatttattttctatctataggacactagtgaatatcccaacacatcttagtttcaccactgtgtatgtgctactatgaatggatggtcaatgtaactgatgtaaaaaaaacctacaacaaataaacctttgttccaccagacagaattgaagaca

SEQ ID NO: 8049 - DNA, 387 bp, Homo sapiens
gcccttaccaaaattaatcatcatcctacatccttgtttttcaaattctcttgcttaaatttaatacagttttatttcttctcaatgtattcctataagatgtgtgcgtgtgtgtgtgtgtatgtttgtgttaaattaaaagggctttaaggtaaaacaaagaccagatttttccatcaataacaaataaaggtcttattaagtatcaaactttactaataatttcaagaatacaagcaatcaagtgggataggagaaataagaaaacatttaggctatactgcagaactccctagtttcctgctttcagcattgtatccatgcttttggcttgaaataatatatgaggagatacttaatgagattcaagggtcacctcacacaact

SEQ ID NO: 8050 - DNA, 387 bp, Homo sapiens; identical to SEQ ID NO: 8049

SEQ ID NO: 8051 - DNA, 387 bp, Homo sapiens; identical to SEQ ID NO: 8049

SEQ ID NO: 8052 - DNA, 813 bp, Homo sapiens
tttttctttttcttttattattattattattattatactttaagctttaggttacatgtgcacaacgtgcaggtttgttacatatgtatacatgtgccatgttagtgtgctgcacccattaacttgtcgtttagcattaggtatatctcctaatgctatccctcccccctccccccaccccacaactgtccctggtgtatgatgttccccttcctgtgtccatgtgttctcattgttcaattcccacctgtgagtgagaacatgcggtgtttggtattttgtccttgcgatagtttgctgagaatgatggtttccagcttcatccatgtccctacaaaggacatgaactcatcattttttatggctgcatagtattccatggtgtgtatgtgccacattttcttaatccagtctatcattgttggacatttgggttggttccaagtctttgctattgtgaatagtgccgcagtaaacatacgtgtgcaagaagacgtttatgcagcccaaaaacacatgaaaaaatgctcatcatcactggccatcaaagaaatgcaaatcaaaaccacaatgagataccatctcacaccagttagaatggcaatcattaaaaagtcaggaaacaacaggtgctggagaggatgtggagaaataggaacacttttacactattggtgggactgtaaactagttcaaccattgtggaagtcagtgtggcgattcctcagggatctagaactagaaataccatttgacccagccatcccattactgggtatatacccaaaggattataaatcatgctgctatatt

SEQ ID NO: 8053 - DNA, 813 bp, Homo sapiens
tttttctttttcttttattattattattattattatactttaagctttaggttacatgtgcacaacgtgcaggtttgttacatatgtatacatgtgccatgttagtgtgctgcacccattaacttgtcgtttagcattaggtatatctcctaatgctatccctcccccctccccccaccccacaactgtccctggtgtatgatgttccccttcctgtgtccatgtgttctcattgttcaattcccacctgtgagtgagaacatgcggtgtttggttttttgtccttgcgatagtttgctgagaatgatggtttccagcttcatccatgtccctacaaaggacatgaactcatcattttttatggctgcatagtattccatggtgtgtatgtgccacattttcttaatccagtctatcattgttggacatttgggttggttccaagtctttgctattgtgaatagtgccgcagtaaacatacgtgtgcaagaagacgtttatgcagcccaaaaacacatgaaaaaatgctcatcatcactggccatcaaagaaatgcaaatcaaaaccacaatgagataccatctcacaccagttagaatggcaatcattaaaaagtcaggaaacaacaggtgctggagaggatgtggagaaataggaacacttttacactattggtgggactgtaaactagttcaaccattgtggaagtcagtgtggcgattcctcagggatctagaactagaaataccatttgacccagccatcccattactgggtatatacccaaaggattataaatcatgctgctatatt

SEQ ID NO: 8054 - DNA, 813 bp, Homo sapiens; identical to SEQ ID NO: 8052

SEQ ID NO: 8055 - DNA, 443 bp, Homo sapiens
gctgattcctgcccattaagccaacccaggcttcttgtttcatggataaaggccacgttaatatccatggcatgaaagaggtctagggaactccaaggctacttacagtaggggtgatagaggtataggtgaaagcagataattcctattctctaggccccccagcttcatgggtgcaagccgctttggtactcatggtggcacttgccaagttctccagaacttggggatgcaaggacagcagatggaaaaaggacgctcttccatcactccctgaagtaccccgggtatctgttaggaagtgaagggaaccatggatgcctgctcacctttctagatgggtagccattcatcttcactctgtacccctttcaaatgcatcctgaatccctgggactcctttaaaaaatgccttctcttttcctttccccttctctgtcttt

SEQ ID NO: 8056 - DNA, 4797 bp, Homo sapiens
tcaagctgtgggtgagaagctctctagcagggactctgaccttatggaggatcgctgtttcccccatttttccttttcacccaaaaaagtcctgcttctctcacccttcaaacagcctgtgagcctaaatttttgtggccatgggacagacaaggaccccgtcttcagctgaactaaggaaaagtcctgcgacatctttggtacgcactgtggaggctctacaaacagtgagtgaaatgcatgccaataattctttcccttccctctctctcctgagccctctcatcctccggcttctgagggtagaggaaaccatgccaccaccccctattactcctagggttaggggccttttcacagccttttctcccttttttggaaggaacgggtgagcaacggctccccaccgccctcccttccctgccggggctgggatacctggctcaaggcgtcatgagtggctggcgttttctgccacgcactcatgggatctcctcctccctgcaccggggaggccagctctgacccacagcaattaaacttgtctccctggtggaggaaccacttgggtaagagtaagaggttcttccccaggcatttttaaacccctttttttttctcctcttcacacccagtcagcagtgaacttagtctctgtaaagcttcaattgtggaaaaggatttgtagggctagtcttgggccgtggccaatcctggtgtgctttgcatgtctgtatggtgtgtgctgcaagcctccatcttgttttacatcctgggggcgtgaccagtaactgcttggcaaggtttgttgagcaatcctgcctcagaggatgagccctctctggtttgatatctgcatgttttcctagccctgtctcttaaagggcctcacccagcaactggattttctaatgcctgtgtgtgtgtgtgtatactgtgtgtgctgtctttaaaaagatctctaattaatttgtcctaaagaagacaagcacttggatcaagtattttttaagggaagttaaaagctgtggtacctttcagttcgcatgactttaatctttgagaaatcaaaacagcccctaaagattattggtaaaatgtaggtaagatgcaaggtttgctaagtgtttcaaggttacaaactgctttttgggttttgaaaactgtctgtctcctctgcttcacggctggtagggcctggggacatatggaactaatcacctccttaactaagaaggcaaaccttggctacagttagcacacaattaaaacaatttaccaggttttaaattattgttaaaaattactaggagttaccattataacatgtaattgagactactggaaatagatttgcatgcaaggagtgtaagaacagtgaagtatgttttttagtaaaaggttataagaaggcatgaaaatgtaaatttttgcctagggttaaaggattgttttgaattaaattattaaaaagctgagggttcaaagaagtgatggaagaattgtgaaaattaaccttgccgaagaggttctctgtgtgaacatattgactaaattcaaaaaaccgtattatatggtttttctgtaaattgagcattgaaataaaagcctaacaaaggtttcctatggcattagctgctctttggcaaaatctgtaaagggttataaaaggtttttgcttctttacgttttctgagtcatcatttttgcaaaacaaataatttgtggtaatctggaattctgtttcataatatcaagtgttttaaaccttgaacatttaacagccttcccaaaatcaaacttgagcttcaaaattgtcttccccggcacctggctttttgagtagtttgacagggcccctgaagtgtccagagaagagaggtaaacagaattatttgacatgtttaggtacatgggattgccaaaatgatgttcagtcttctttaggttatatcttggtaaataatgctaatatatgttccaacattgtatgagatttctaaaattctaatgtctaagtatatgctaccaatcataattaaggttaagttattgcaaaccacagagatacccaaacatttttgtcagttgtgtttctaactgtcactaccctgggcattttgctattcacagacaattgttgtcttgctttaatccttttcaaaagatggtttataataagctatagaactttaggtggtgctctcaaatacaggcttctgaaagcttttgagattgtaacattgaaataaaggaaaatttatggggctcataaagagctgaaatattcacaaataccaagcaaaacgagttaactagatggactgaactcaggaagctgaagcaaatctttttgacttttgcttggaatattgctgatccttgttttgtttttcacagtcaaggaaacttattttgaactatttacagtcattaataaggaaagtatacactcctgtgatcaaaatttgtagcatgtttgtttctctctgcctggttcctctagaatttggaaactacctgtgagtattcttatggcaatatagttgtttgcatcagtgcaataagaatccatttttcttttgcaacagaaaacaattggaaaaactggttattttaccaaggctttgactggaagggcatacttccctttacggagtcaatcttgacttgcagagccaataaaagccccatgcggaagctgtcctcatactcagtccctgtatagggttcctgacctgtgatcagtaaagagtgtcactttctaacaggtccaggagctccaagtttatcttgggaccgtaagaggagaggatgacccaactcacatgtatttgagaataaacccatggctaggatggctttaaaaggtcttatctgagatcccttgaggaacagagttccatcaaagccaatctaaaaggcctgtgtagaaataattattatgcaaataatcaggccaagtataaggctaaagtctattttgcaaaacactcggtcttatcatggtttttttttcttaacaaaagtgaggactggagagaaattatgtttcaaaagttatacatttgtcattaaattctaaactcactagttgtttttaagtttttgcctacatttttagactaaccctgcttattcctgtgaaccaaccagcaatccccagctgcagctcagaaagaacaagaggggtgttatctggtaatgtagaaatctggatcaatattctagttctgagcaattatcctgcaaatcctgccaggtgatgggaataaatagaatgtccatcactagcaagtttcctttttgggagagtaagaccaagagccctaaccaaagccaagcaccacgcaccgaaaccctagcaggcataaccatagccaccagttatctgggtgtgtcacaagacatccttttctctcccttgttggaagaggactcacttccacagctttaccttagcattcagcttatcataaggagtccatgcaatcccaagctttgggtcaaactggatctgagggatccggaggcagacaataatggaagttaaaaggcacagcacaagtgagtgtagctgattcctgcccattaagccaacccaggcttcttgtttcatggataaaggccacgttaatatccatggcatgaaagaggtctagggaactccaaggctacttacagtaggggtgatagaggtataggtgaaagcagataattcctattctctaggccccccagcttcatgggtgcaagccgctttggtactcatggtggcacttgccaagttctccagaacttggggatgcaaggacagcagatggaaaaaggacgctcttccatcactccctgaagtaccccgggtatctgttaggaagtgaagggaaccatggatgcctgctcacctttctagatgggtagccattcatcttcactctgtacccctttcaaatgcatcctgaatccctgggactcctttaaaaaatgccttctcttttcctttccccttctctgtcttttcttcacagataggtaattgtgtccctgtactatgggacactcatctcagatgcatcctccaaactggaaagagttaatttcccaaaccttgaactggttggcttgagattaggctcaggggaagggaacacagaagcccagtgtgccggcaaaagggtgaagtttttttttaccggtcaagcttttggcctccttctccctttgcaaactggtaaaaggcctcgggatttttgagctctccttacccctccccttgtttcattctgatacatgttttctaataacctggttcgtctgttcttgccttcaggccatcaaactccaaccagtcacccaaccagagcctctgaggatggccccttctgcggggaacccttacatgggcctctgactgatgcttccccaaaacagtgccccctgtcatcaggaagcagttaacactggtcttcattcttacgcttatccttattctaacagcagttatatgtacttctttagacgggggaataagacagccaggtgggagggggtctctggaaaactccatctggcctgtgcactagggtggaacctcaggaagttgatgacatttgtagctgggagcagcctggcccctcctcttcctgtgtggaacctgaaattccaccggcttggcaggaagcgctctagcagggactccggctttgcagagcatccctgtttccccgtttttcccttttcacccaataaaaccctgcttcactcacccttcaaaccatctgcaagcctaaatttttg

SEQ ID NO: 8057 - DNA, 556 bp, Homo sapiens
ctactgttgcaacatagattgcttataattcttctaattactaacaatgctggtatgaaattgttgtgtatatctctggtagatatgtgttatttcttttttgcaatgctagattataattatttgtctaaggtggagattaccagggtagactcgctctggccgtatgtaatgatgtctgtggctacataacctgccaacacttagtcttatcacacattttattttaaaatcaatatgtaaaaaatactaatttacttggtagtaatttaaatttttctgattattactgaggttgaatatgttttcatatgtttactgaatattcctgttaattttctcatgaatttcagttaatgtttctgttgattttattaatttgtagtggttttgaaacatattctagaaaccaatattttgtctgttgtatgtgttacaaatatatttattttgtatagcttcttcatatttagtacttttacaattttaacagtaaaattagtttcatgttttatagctataattattataacttttaaataaatatttcctcaat

SEQ ID NO: 8058 - DNA, 596 bp, Homo sapiens
ttgaaaacttactgtgctcaaggcacagaacggggtagttttatacacattctcccatttggatttttcaaagacaacatctaatcatccccagagaaatttcagctgagaagacaggatggtgagacagttcctaagtctttcctagacacaattgtctttgcaagtcctctgccacagtcaaaggtgctttcttgcctacctactggtaaaatccttgactgtccgatttctctaaataactataattggagcaatcagatcattaaaaaaaaacagcaggagagatgttaatgttctaaaatacagtttccattctaattgcagatgaagtgccctgggggccagagtccagacaagtattttggcacctccaaggactcgcagaacacagagaggaaaagagagaccctgttatctttccgcaggggtggccgttcaaactctcagagatggaagttaagatttcctttggtataagtggcagtttgactggctgcaaggagagcctcagtttgtttaatttggagtaaaattttatgagttaatctctagtgagggaaagcagcagtaaacacagaacatactggtcatta

SEQ ID NO: 8059 - DNA, 457 bp, Homo sapiens
atggtgactactgacataaatttaatgatgctgagaattgacaacttctattaatttttgtgaatattgcttggagaaggtttaacgactccaccaaacattaggaccgtctcaaccaaatactaaaaaggggtccatttcatttacatttcctgttgccatcaagaatggctctttaatgagttttccgcagcaggatgtagagacacagatgccaagaaacttgcctttattttcttggaagcatatatccttggcaatgggcacatattaatatgatgagtgaactgaaactcaagaatctaactgccttcagaaaagtgacatctgtatgcacattcatttccagcaatttcccagatttctttggtatttgtctttctttaattttttccaggtattttttttctctttccaattttgagagaggagttttgtaaagatactgagttctttt

SEQ ID NO: 8060 - DNA, 1886 bp, Homo sapiens
aaagataaaaagaacccgggacattgatagcatcatggggcctgttctcctccaccctagtctacctacgtctagaattctggttacgtgagcaaacccactctgcatttctgttattactgatacagtgatggagccaggatttgaaccaaagctatgctgagtcattccttctcatccaggtaacactctccacacaaacgctatactattactacagaagtcaccatctgtggccaataaagactggagaaatcttgctccagctattctttctcaggacaattggagttgcaagtcttggaagtaggaataatttcaacctcataacagcaatagaaaaggtagtgcttgtgaaagataaaagtagaaatagcctaacacagcataactttctttattgatagtatctacacagggaaatgtggatttatagaaaagaacaacatgtcaaatgattacaaacagaaagttctgattctggcctcactgttgtatttgctattgaccttagaaaaataacagtttctatctgtttcccttttcttacaatgttaataaaatagatctttgagccatgggcttgtgatgagagtccaatgatgaaatatacataaaagcttttccaaaaaaaaaatcaacatgttcggtgctctgaacctggaaggaatcactatacgaatactgcattcctagtgtatgtgtaacccatgcacagagaaccctgtggttattattatcagattgtagcgaccccaattttcttcctcttttttagccattaagtaataggagaccccatgagacacaggaataatgtcagaatggagcaacattgtcacagtgaggagtaggtgtgcccgtgtatgtgtgtgcatgtgtgtaagatttaacctttttctcattgagtttcatatatttcatgcaaaggattgctgaatattcattgatgtatctagtatccacaagtatgctattagaaatgtattatttatctatatttttgaaaggttgaaataattcagtgttgatcctttgcaagataggtttgctacctttaaactgaagtgacaataacacccttcggtttctctcaagttgtgctgatatccttgatgtctctaacaaaccagagactgcctgtgagaatcctgtatgtcaccattaaattgaaaaaggcttgaaatatcaaaacctcacttctggtagggaagggaaacgagaaaaaagcaaaccgatggttattcatgaatcaccccgggcctgccatgataaataacagtggcctctttcttctcttcgctgggctcgtaattctctccctgaaggtgttttacctgcacaggaagaattgggctggagggatgtctagtaaaaatgatttttaaagcctcttaaaacgcaaaagcctatgtttgggttatgagtcattctttttgcatacagcaaacaatgtccaattaatctcagccgactggggagatgggactaaaacaatttgcaatgtttagtctgtggttttgtgacaacctagtgatgttaagagaaaattaaatactcgataaaatagcttatttgaaaagattacaagcgaaggcgtctagatttgggcttctcctgcaacattaaacatgaggattcactgtccaaatatgggttccgcatataaggtaggaaatatttatgccatttccacattaaaagggtagcatattatttgtaatgaaatacagcaatacaaaaataatcagtcaaagtgcagcttcagtgtgtttttatgtagacgtctgaatgtctttccattgtttcagcagagagctgctgttttctcctgcgctgacaggcaatgctatgtgatatgttggcaaacaattttactgttttcc

SEQ ID NO: 8061 - DNA, 413 bp, Homo sapiens
ttgttttaaaaatcatttattaaatacaactttgtgccaggaaactttctagaaagttagcatacattaacttatgtattactcacaacaaccgggtgacttaagcattgctaaagttgctaagtcacccacctttacagatggggaagccttcttgcacatctaatagggttttccagtgtgctcaaggtcatgtggcagaggcagaattaaaacccggatgtgacccatggcagaacccacactctattctgcctcccctagagccagcatccactacacatttccaagaatcctgtaaagcacccttttctgcataccagccaatgtgaatgcagaaagagtcgctagttgtgataataaatatgtcaaaacaattatcttttacctctctgatatcctttgccatgagg

SEQ ID NO: 8062 - DNA, 32177 bp, Homo sapiens
agtcgtggctgcagcgctgaggcgagaggttggtgggtgtctccggccataatgacccaggctgagaagggtgatacggagaacggaaaggagaagggcggcgagaaggagaaggagcagcgcggcgtgaagcggcccatcgtgcccgcgctggtgccggagtcgctgcaagaggtgcggctctggctgggttggaactctttgcccttgcttgggtcctccgctgccaggcaaggggcgggaggcggcgggaggcttcgagtcccccttgcaggccccagcccctggtggggggagtgcggaagcggtcgttcttttccgggtggtggcgcgccgggacgccgagggctgggaggtgcggagcgccaggagccaggcggagcccccgcagggacaccgctccgatctcccgcacgccccaccgtctggttgtgtgcgctcctgcccgggctctggcctcagcttccccgaccataaaacgaccacggtgataaccagccgcctcgcaagttgccgtgagggttaaatggtggcagatagagtttaggaccaggctggctcactgggagcgtcagcctgtgcttgttaagggatagtttggggtccaggctttttcctttgttaaggaaatctcagataatggaagtcatttcaagcttaaaagcaaggaaatggtggacatttgtctaaatatatattaagagcttgtgtatcaaaaacaacactattagaccaaactaaactaaccagaaaaaattatttgcagtagcgtgcctggcagaggaccttagatgtatacacatacacaaaaccttactgatcagtaactaaaacagcattcacgtaggaaaacgggcacaggcagtgtacaattcacagaagaaatgaggcataaactgctcagaaattcatgtaggacatctctgatccagcttccttaccggtagatgggttaaggataatacctaactagtagggcagctactagttagttatcactagtatgacagtgcctggcacaccgtaagcccagagtggccattactgttgcacaggcctggtttctccatctgtctagttgagaaggctgactggatggtctgtaagggccttgccagatccttccctctaggattctcccactctgtggggggtgattaggaggagagaggtcacacttggagataggacaacaggtatcagagcatggcatggaatgggcttgtgcagagggcagtattgggcactcaagcaagtacctcctccatccccgacagtcagggagggtttcttcaaaggaggtgaggtgacatctgtttagagtcctgaaggtgattaggagctaaccagagggaggagggaatctcagggaagaagaacagtgtggaagacacttgtgccaacagaggatgtgaagtgttggaggcccagccagtagattaggatgtctggagttaaggaaggggactgaagatcttagcaggggccatatcatgagggtcgtgtaagccacagagtctgacctcttgtgaaggcagtggatcacgttgaaaggctttactatagtaagagccaacattcctcgaatgcttcctgtggcccagctctgagttacatgtataactcatttaattctcacagtaactgtgagttaggagcttcattcagagcaaggaagtggcagtctgaatttgcagacagatccgtgaattcagagcctgggcccggattctatagcaacatttcttcagtcacataaatgctcaataactgtatgttaatttgtagtggacaatttttgtttcatttatttaaacaaatatttgttgagctatgtactataactcaggtcaagggaacataataaacaatgagtttgtgtttaggtagagagcggtaattggatacttctcaaagaactttattgaattattttgatacctttgagtcagcttcttagtttagcttgttatgtgtatgttgtttaactttgttacctgcatattatttacaaagtcacacatctatgttttatatctgcagcaaatccagagcaacttcatcattgtcatacatccaggttcaacaactttaaggattggtcgagccacagacactcttcctgccagcattcctcacgtcattgcccgaagacacaaacaacaagggcagcccctatacaaggacagttggctcctaagggagggactaaatgtaagtcaaaaacgacctggagagaaagcctaaggttgtttccctgggagggcttagacacaagtacaccagaatcttaaagaaacatcttcatagctttgctgtgttttaaaacattaataatgtcactaatttttcatcagagctagtgactttagatgtaaagaattagttacaacaaaagtaagtctttcagggtgaattgagtgtggatgaaggtgatctataatggaagacacaaaatcatcactcacagtaatacattcaggtccttgttaacaggcttaaacttatggattaagccatatttaaactgtaaatatctctttcagatacttacagtttaagtcaataagtcaaactcttattttcaatccattagcaaattagattgttacaataagcacttattatggtcttagattaaccataatttcaaggcaaaaaaaaaattttcttgcagtaagcatctactttatcctatgttgcagatggtaattatcaggaaaattctttgtgatcaatgataaatctatatattacatcataatccacattttactttgaagttttaagtcaaggatagttttgggaatgtaaagtttctttaattctgatagtaggccttagggttccattttttagtgtaacaagcagactctacgtaagtctagttgtaagtttaaatataacttgctgatataagagtccgcacttcattatttatctttggatcttataattctactttagggagtacgtttaagaaataaaaatcaaaagaaaacatttctgtaaagatatttatgggcattttctttatactataataacgagaaccagtaagtttatggcttaaccaaaaagtttaagccttgctgatcaacatatgaaggaatgtgtcattgtcaaaactgtaaacataagaattatataattgtatggaagagtctctgaaatattttttaaacatgaagtaggtatgctttgattagtgctgtgagaaattttatgaaaaatcacttgaaaattttgcatatagttgttttatagtgagggctgcttttgacttatttataataaaagattcctgggaattctttttttcttttcttgagacagggtcttgctctcttcttcaggctggagtacagtggtgcgatctcggctcattgcaccttccacctcctgggctcaagcaatctttccaccttagtctcccaagtagctgggaccacaggcctgtgccaccacacccagctaatttcttgtattttttgtagagatggtgttttgccatgttgcccaggctagagggaattcttaagagcagtacatgtgataaagattaaggaaacgctacttgttgatgaaggagcatttccaaagattggattaaattagtagtttttgaattgctttgtcttctcattaaatcctttgtactgctcatctttcattttttccccagaaaccagaaagtaatgaacaaagacaaaatggccttaaaatggtggatcaagcaatatggtctaaaaagatgtccaatggtacaagacgcattcctgtgtcccctgaacaggttcgattaactcttcagatttattcttttatcaccactattggtatcataataccattcacatgttcttcctataccactatgcaaatacaagatgggagttccttaaaaaggaagaaaacccctcataaccacttaaagaatacccgagtcagtgttacaaatgcttaggcaagccacataatttataaggtggtggtaggcaagttgatggaagtttatactttacctgagaaggtgtgattccaggatcttggtgggaaactgttcttactacattcttcaatttcatatgataaaccaatatgataggaatggacaggagtctgtattacatataaatttgaattcagctttaagcagcgtttagtgttaattttggactggctgtgaatcacagcctaggtgttaaaattgggggaaaaagaaccccaagattgtaaaaaggacaagagaatccttttgcagccagtcaatattttgccaaatatttgtgattaaaatttgccaatgtgtctagtatgtgagagagaagaaaaggagacccttatgttgcccccgccttgaataaattgagataattttctgatggtttttcttttcaggcacgctcctacaataagcagatgcgacctgcaattttagatcactgttcgggaaataagtggacaaacacatctcatcaccctgagtatttagtaggagaagaggtaagaaacttctttacaatagaatgaaagaaggggaagctgatcctcctcctaaaattcatttacgttgccacccagtcctagttgtttcctagcgttctataaccctgctttgagtaccagatagtcacaccgactcctacttcactctcaacatttctcacattcagcaaacgttagttagatttttggatatgaatccagaaaaccttgagagaaaagttttaacaaagtactcatctccctcctccttttctaggccttgtatgttaatccactggactgttacaatattcactggcctatcagaagaggtcagttaaatattcacccaggccctgggggctctcttacagctgttctggcagatattgaagtaatatggtctcatgcgatacaaaaatacttggaaatcccactgaaagatttaaaggtgagctaaaatcctcagttatttggattgtttttaagattcttggtcaatgaaagtacacgttaccgagttgtttgtaatatagtgtccttcttgaaacattcttgaccttcagggtgaggattcttggtggcatgaggatgtcttttcttcttcacttaattcccttctggtgctttttttctttctctgtttctttggtgtctctattactcgaatcagcaagcttgctcatttttgtcttctctttggaccttactgacacatcagttgtcttatttttgattttacaagtttttaaaaatttcaaggaaaaaaaaacacttgagcattttttttttccttataaaacccaaaggatagtacagaggtttgagctttaatctgggtgtgtaaccgtagctgctactcctttggagggaagtctctctaaaaaggagtgtgaatttgacctgactagacttgagtgctaacccttttatctttgttcttctttttagtattatagatgtatcttgttaattcctgatatctataataagcagcatgtgaaagaactagtgaatatgatactaatgaagatgggtttttcaggtatgtctgatatcccagtgaaacctattttaaatggaattttctttctttaatgacagagttaatcttatttactgacttatttatttatttatttatttgagacagagtctctctctgtcgcccaggctggagtgcagtggcgctatctcagctcactgcaagctccacctcccgggttcacgccactctcctgcctcagcctcctgattggctgggactacaggcacccgccaccatgcccagctaattttttgtattttttagtagatacagggtttcactgtgttagccaggatcgtctccatctcctgacctcgtgatcctcccaccttggcctcccaaagtgctgggattacagacgtgagccaccgcgccgggcctactgacttatttaaatgcttattctgaaaggatcagtgttcctcagatgccctgcccagaggtccctaggctccccgcttcagctgattatctgttttgggatctttaccgtgctacagctaatgactactctgccttttcttttccccccccagggattgtggtccatcaggagtctgtgtgtgccacctatggaagtggcttaagcagcacgtgtattgtagacgttggggaccagaagacaagtgtatgctgtgtggaggatggggtgtctcatcggaatactcggtaaggaacttggaaggtggcattccctgtttcctcttccctcataatctgttcaaccgtaaataataagaaatcacaggttaaaaattataagataaccataaattcaaaagtctgcatggtaaaccagcaagattatggaagtgcatattctagcaaggctaaaactaaaacgaatcattttacccttcccattggaacttcttaataggaatttacatcagcagcccctgaaagtcctgggatgttttatgcgctttcccataggggaaacgtaaacagtagcttcgtgtctttagctgtggtttggcatagagctactaatcacatccttatagcagagctttatttaggcaagtcatgtaggagaaaatcgaccttttcaatctgaattctctggccagtgttttgaatatctgcattttttgtcatagtggtgttctgcgggtgagtaactttatgatgatagacaggtaaagaaaataactatcaggaccagatttgcagcttgtccttcttcaggcaagcctaacatatgtaagcacactcaggtaatgcaggtatgggctctctgaagcattttgtgctccagagatggcttcttgctgcccctcaggatgctttcattcttcccgtcctccacattaggtagtttgagtctttaaaagagggcttaaatcgtccatgagaaagggtcatctgctgcctcccgccccaagttctagtacattctaaaatccattttgagttatttggctcatccattgttagaatatccaatgccacttgttctcaaagtgtggagaaaatgctggacccaggtttcctaccaataaaataatatagcagctgtcttcccaaattgtagaaaccttcagttagtagacagctttctctaagctattctcccataagtttgtcttatattgtcattgctgccttacatgctagtgagtgtagaccaccaaacaactgtcatatgataaacacatattgactgggaagtaagctggatttaatgggtgagtattgggtttctcagatacattttgcaaacatcatgactactgtaggtgttccccactggtttttgctgaagttccttttctcccttcttccatccattcattctggcctttcaacatacatttcttgaaacttgctatatatcactgtgtttaatggacatttttgtttgttttttgtgtttcttttttttttttagatagaatcttactctgtcacccaggctgcagtgcagtggcgtgacctcttggctcactgcaacctcttcctcctgggttcaagcaattctcgtgcctcagcctcccgagtagctgggattacaggtgtgcaccaccatgcctggctaatttttgtatttttagtagagacagggtttcgccatattggccagctggtcttgaactcctggcctcaagtgatctgctcatctcagcctcccaaagtgctgggattacaggcaggaaccaccatgcccagccattaatggatttcttcaaacaccttttgcaccttcttaaccaacagattaaccatctacccttttctcttaactttaggctttgtctggcatacggaggatctgatgtgtcaagatgtttttactggctaatgcagcgagctgggttcccttacagagaatgccagttaacaaataaaatggattgtcttcttctgcaacaccttaaagaaactttttgtcatttagatcaggtgggagcagaatcaatattgctgattatttttgtttctaggaaaaatttaagagatttaaaagatacttaaaaatgtaacagcattggctgggcacggtggctcatgcctgtaatcccagcactttgggaggccgaggtgggtggatcatgaggtcaggagatcaagaccatcctggctaacacggtgaaactccgtctctaataaaaatacaaaaaattagccgggcgtggtggcgggcacctgtagtcccagctactcgggaggctgaggcgggagaatggcgtgaacctggaaggtggagcttgcagtgagccgagattgcaccactgcactccagcctcggcgacaaagcgagactccatctcaaaataaataaataaataaataaaatgaagtaacagcattataatgcctttttcaacccacgataaagcctgcaggtgaaagcccttaaggagtgagagttttttgctaaagtccgagcagtgagggtgtgtcttaggctcaggaaaagtttgatttttttagggaacaagtttagcaaatttctctgtctcatcctgataaaagatgaagataaacctttaggtgtaaggaagatagtaggtaaatatgtaagaacagacattttgttaaatgttataatttgaagcactttcttaatattgcaaacaatcaatgtttaatcattgctatatatggattggtatcctttttttgtttgagacttgtttttacttttttcaggtaatctaaatattaaaaaattggggaaacaaaaatactgtaaatttcccagttactgagggaatttgcttattgatttgggtcattgttgtactaatgtatgttgataatggagaaaacaaataatgcaaacagtggaaattccagaaatgttaaataggggaacaaagtacaacttaattcctattttactaaattatagtgtgagtggtacaaagctgtaggttggcctttttataggtgatatttagatgatggtgaggctgaagcataatttgaagagtttacatgcattcttactgattcactgacagcatcttttcctggaatcaggacatctctgggcttcaggaccatgagtttcagattcgacatcctgattctcctgccctgctttaccagtttcgattaggagatgaaaaactgcaggtaacttataggtatctgtttccatgggtagaaagaaagttatccaggttcaatcaaactgagagaatatgcccttgctggaaacattgtgagatcagaatgtcaactgattgtagattatccactaaaccaacatttaagccactggtatagactagaatggatctgaagaatatctttctatttagcccctatatgatgaggtgttaattagaaagaaaggtatcattcttactaggaaattatgaagtagattttgaggtacttgatatttgctttgagatttctctcatatggtgtcatatcacccatctggttggatgatgagtgagttttctggcctatggtgcaccagagaaataatgccactcccgaaagagaacattgcccagtctaacttagggaatctgatctgccagttttgtttttagaagaacagaatttagtggatcagtttttttcaggatgcagtatcttttgttgatcactctttttcttcatgtacaggctccaatggctttgttttaccccgcaacttttggaatcgttggacagaaaatgacgactttgcagcacagatctcagggcgatcctgaggatcctcacgatgaacattacctgctggccacacagagcaaacaagaacaggtccgtagcaattctggtaggagaagagagagttttgtccctgaaggagaaatttgtccagagttaataggccattgtaatcagttctatcttccagcataataacactgatatagcttttagaattgtagatgaactgaagtctgagtttaaaatctggaagacatatttctctattcagcaaacattaattttctgaatgctagtccatacatttaaaagttaatgacactttccttttggtgtatatcatttacttacattatctacttctgaatattttttcagtagtattttcattaaaatctcacctgttacttaattttgtgaaagatgtgtggcatagccaaagagctgaattcctttgttgaaagtggatccccataatatgatgtctggtacaggggcacaaattgaaggtcttgtctgctaatgaaacagtaccagctcatgatggagactagattttctagtctttgttcctccccagaggcaggcatgaggtggactcataggatctgaaagtaagaattccttaacagtcatggcccatgaatcccactggaatactccatttaaaaactcagggcacggggaagaaagtctgtctgcactggtatttcacttttaaaatctaaccagtgatgataaggttctgagagctaccctgcctaccagcagctaccttgctttggaatggtcaaagcatcttcatctgtgcaccgtctctcattcctaagttacctgggaatgggtgctgggcagttgttgtattgctgtgtggcttttgttttatagtagtagggtagggagggatctagctagacaacatcaatagtgttctgttgttgtaataccacatacttgattgtccttttgatttaaagtctgcaaaagctactgctgaccgaaagtctgcatccaaacctattggatttgaaggggatcttcgtggccagtcctctgatcttccagaaagactccattcccaggaggtagatttggggtctgcacagggagatggcctgatggccggcaacgattccgaggaggccctcactgcactgatgtccaggaagactgccatctcgctgtttgaaggaaaagccctgggcctggataaagccatcctccatagcatagactgctgttgtaagcacatctggggagaccgggagatagcagtgaaacaagatagcagttaaataaattggttcagtctaggatatacttgtgcagtataacatattcattgaaaagtgattaagcgcctacttggcttgcattgccaggtgttgggaatacattaacgaagtaggatgggtttatagcctagtggaagaggccaaaataagtcagattattacacaaatgtgaaattaccactggcaggccactactaagcagtcagtaccctttagataaactttgtagcacctgccagtggtactttcacatttgtgtaataatttgaggaatttcacatagaatctttactcactaggggatggtatggaaggtgggaggcagggaaagcttccttgaggaaggcagaccttgagagagatgtaaaggatgaaaggggtcagttagcagtcacagatggggtagaggaagaagcctgtgaagacctgtgtggctgggaagcagggtgtgaggatgaggctagagaagcaggggacgaccacccgtagtggatcttgtgggtccctttaaagattttatttatttatttttcagagtctcactccattgcccaggctagagtgcaatggcgtgattgcggctcaccacaacctctgcctcctgggttcaagtgattctcctgcctcagcctcccgagtagctgggactacaggcgcacgctaccatgcccggctactttttgtatttttagtagagacagggtttcactatgttggccaggctggtttcgaactcctgacctcgtgatctgcctgccttggcctcccaaagtgctgggattacaggcgtgagccaccatgctcggcctcctttaaagattttgatcctaatcctgcaagtaggattgcggtggcgtggcaacatgcctacatttgtgtttcgtagggttcccctggctgcagtgtggagggtgggctggagggaaatctttgagaaggctattgcacttgctcaagcaagaggtgttggtggcttggcctagaattatggatgtggagaaaaaagcatggaggatgtcaactgtcttttcagcatctgacgacaccaaaaagaagatgtacagctccatcctagtggtgggaggtggtttgatgtttcataaagctcaagaatttctgcagcacagaattctcaacaaaatgccaccatccttcaggcgaattattgaaaatgtggatgtgatcacaaggcctaaggtaggttgtttcattgtgcaagttggactgtatgcaaatgaaaccagccttgtatgtggacagatcaaatcctgggaggcatgggcttgtgtctgaggagttcttgagggcttagggcaagtggaaaagttaatttcagcaagccatagatgtggtggaaggtgctctggcctaaggtactggatttctgctgctttcccctgccgtgctccccaaactagcatgactgaattccacctttgttaaaggatcaggtggggcaaggggaggaccaactgctctcaagccctgccagccagaacagctccattttaatctcttttttatattaaggatctccttctgctccctggaccagatgatctttaaggatctttttggtttgaactatcttgaaaagaaagataaacccaggaatttagaaatagattttgtgtgttttattaaatctcactgacaattcctggaaatgttcctatttctttttaatcctgagggagggattgtggggatctatttattccactcaaactgcgaaataagtaagtcatttatttatatatgttcctgtgtacagggtaaatagggtatttgtgcaatagtagtaaatagtagcatcttcagttataaaaatttaaaagttttcttggctattgaaacagaaagatgcctgtagttcataagtcctactgtctttttttgagacggagtctcactctgtcacccaggctggagtgcagtggcgcgatcttggctcactgcaacctctgcctcccgggttcacgccattctcctgcctcagcctcctgagtagctgggactacaggtgcctgccaccacgcctggctaattttttgtatttttagtagaggcggcattccaccgtgttagccaggatggtcttgatctcctgatctcgtgatctgcccgcctcggcctcccaaagtgctggggttacaggcgtgagcctgtatttaatcctgctgtctttaatacagggtgaaagcctggcttactaggtattgactcagcagggatttttctcggccccatattcaagtaaatgattgagtatatgtcttatgtgattaggctgaaatgccttcatcccttctgtaggacatggacccccggctgattgcatggaaaggaggggcagtgttggcttgtttggatacaacacaggaactgtggatttatcagcgagagtggcagcgctttggtgtccgcatgttacgagagcgggctgcgtttgtgtggtgaatggggaggaaatgtcactgccgaagaccaaaaacaagcttcttggtataaaagactcttacagaatatgtgtattgtaatttattgatctggatgcttaagtgtcatggacagtaaatgaatttgaactttatgttgaggacatgacattggtttgaaaatataaactgcttttgagcagtttagtcagggcatttgagaataaataggaactttctcttcagttgtaaactctcttgccctctctcagggtctcataaactccccagtgatgtaaacgttgctattgaaggttctcatgtggtgaagcccttcatttaagttggcttgaatctcatcagcaggcagcctcatgcaaccatgagggatagtatgtgacgagggagaactgtccactcatgccattttctctcttgtctagtatttcattaggatctaaagttgtctgagttaaatgcacttatgtgactcatgtgtcctcttagaatcccaaatagggggaaaaagttttggtggtttttgttttttttttcattttctgttggattacagaaaaagaatgggacccattcaggtctcgatttccaaaggtaaagatggaaggctgggcagactggcttttgttacctgacatgccgtagggtgagcttagaggaagaaagaaaacaatttttatttggccaaaacagaacaaatgctgaaaaggaaatcttgtttttttcctaaagccaaatagaaatgatttgggtataatttaagagtccttgtgttgtacagatatggtgactgatgtagttattaatactaccaacttagtcatcaagcctcaattttcctttacctgaaggattaagtgaaagcttttggagttcatgatgttcagtatgatcagttaaccttaacctctgagcatcctgaagcaaaatctaaataatgcagctattaccactggtggtccaggctctggtgaagccctctgagcccaggaggaagagaaagcattgtccagaggtaggaacacagtctgggagcccagagctctgggaggagtgggaaaatgctgcttcctgctgcttgcttctaggcacctgcttccgccatctcacttaccatggctagagatgggggtgagactggggaaggacaaaagcagggaacagataagtgatggaaatcagaagggaatatagaaagaactctggatgtggagaaatgccggtacctgagcattttgtatcaatgggagtaccctctgtaactgctcagtaggttacaaatgaagagtccaccagtattagaaacaatttaaacttgccagtaccaactgggatgtgtgccttcaatttgaaaattgtatgttttattttttaaatttgttaacagcattaatttatagagtattgatgtcatttatgtttctgaggtgtttcaacacaattttggatcagctgcctgtttgcaaaaacataatatatttctgttaaacagttcttcacctaacagcatattgctcttataactggtagagctgtttcaaaggaagttggtttctggtccaagttttgacctaaaccatgtccatcttctattaccagcacttacaagcactgtgaaaactgatcatgacaaataagtaaaatttgctacattaaacatattgcctcagccattactaagcgtccacttgtaaagctggacacagtttttactttatgcttcattttgattttttatccgtaagacataaattagaaggcatgaggtggccctttaaggataatctgcaaatatacacattttaatagtcatccatctgaaatcgatccacattccagagaagattcagtattgtgctgtgtgaaataagcattcccagaaaaaaaacatttatgctaataatacaacataacctctgcattaaagaaaaagatgcttttaggccaggcgccgtggctcacacctgtaatccctgcactttgagaggctgaggtgggtggatcatgaggtcaggagatcaagaccatcctggctaacagggtgaaaccccgtctctactaaaaatataaaaagttagctgggtgtggtggtgggtgcctgtagtcccagctactcaggaggctgaggcaggagaatggcgtgaacccggaaggcagaggttgtagtgagccgaggtcacgccactgcactccagcctgggtgacagagtgaaactctgtctcaaaaaaaaaaaatttaaaaaatttaaaaaagatgcttttagaagagtaaaaagttggaagacaaaatgtgcatcttttatgttctgtcattctgtgggggttttttcgtttgtttgttttagacagggtctgctctcacccaggatggagtgcagtggcacaatcaccgtttactgcacccttgacctccagggctcaagtgatcctcccatctcagcctccctagtagctgggaccacaggcttacaccatcacactcagctaattttttaaatcttttgtagagatggaggtctcgctttgtgacgtagcctggtcttgagcgatccttttgccttggccttgccaaagtgctgggattggaggcatgagccactgcacccacccctgttttttatttaagtaaaccattataataactcatttataaaaaggttacttcaagagggctttcaacttaagaattattttcattttgaacatgaaaagttaaatagtaactaagaaactgagaactctgacagtgacctctaataggtaactttaggcaaaagtagacaagtttgtgggtattttgttgttcatgttaaaaggcacctgtacaagaatcaagatatgaatctagtttgtagagggaaggtcttatgcaaataccaaatcatacaagtggttacacatataatagatcatttggtccagtaaaagtgggttcagcttgtttattccctacttttgttatcttaaaaacaatgattttttgcatgtaatagaaggtttttcacttaagatgctattgagtgaatcagtgaggggttcttagagttagtattcattaattaaacatagaatattagctaaacagttctgggtacactgcaatgcatggtctatggaagactagatgtttggctgaagatgctttattgttgcattatcaaaatggttatagttttcaattaaaactgtaattgatttctatgtataaaacagctttgaagttgtaaatgtagtttccaatcgttagttaatgctacattagttagcaatatttgaaaattttattggtataaaatgttttaattactaaggctgtttgtaggctgcatagtaagcttcaggatcatcacacgttttttccctgtaattggtgggataggaagcctttaaggtctcttgcttctcatgggtgggctacaaggagcagcagccatcgtggcaggcttgtgatctttttcctgctgacacctgctgcttgacatggagaagttctgcacagaaagcagtggcatccttcatgaggtggtacttggggcagacactgagagcattgtaatcgtcttttgtatcaatctctctaaagtagaccaccacgtatttgtgcagatgaatctggcttcttagatcactgcagaaaaggttaaaggcaagggggaagaggtcttgagagttctcactgggactgccctcgctcttgccacaggtaccatcgcacacactgttgacgtcattggaaagaaggaagacgactttgtctgctgccttcttttgagtggcaagccactgcactggacccatctctgctattttctttttctgccacttttcaaggatgacctcacttctgcaatggttttgaagaaattcagtgaagtaacaaattgtgtgatggaaacatatttcagatgggtaaaccacaagaaccttaatggggggcagtagtgtggtggtagaaaaggaagtcttcttgatcctttctgtgagaggagaaaagcatttgttatctgtgaacagcaaacagcaggctttcactctgtaaaccatccctgacaaatgatcccttgctagagaatgtcagctgagcaccaagggccttgttagtgacagcaaggaaaaacatcctgatgttccttttgaacacatcacctgaaacacactgatgcttaaaccttaacttttttttttttggagacatagtctcactctgtcgcccaggctggagtgcagtggcgtgacctcggctgactacaacctccgcctcctgggttcacgccattctcctgcctcagcctcccgagtagctgggactacaggcgcccgccaccacgcctggctaatttttgtacttttagtagagacggggtttcaccctgttagccaggatggtctcgatctcctgacctcgtgttccgcccgcctgggcctcccagagtgctgggattacaggcgtgagccaccgcaccctgccttaaaccttaactttttaaaccttattttaaaagcagtattttctaagtccctctcactaaaacaatcctctcaaccaagccttctcttttcagataaattcatagaaactttaggtttaagatactttgttggccaggtgtggtggcttacaccaggaatcccagcactttgggaggccaaggctggtagatcacttgagtccaggagttccagaccagccagggcaacatggcgaaaccccatctcaacaaaaagtacaaatattagctgggcttgatggcatgcatctgtggtcccagctactcaggcggctaaggtgggaggttcacttgagctcaggaggcagaggttgcagtgagccaagatcacaccattccactccagcctgggcaacagagtgagaccctgtctcaaaaaaaaaaaaaaaaaaatactttgaggtgtgtgattgtaacctcagtacttttagtgctgtatatgaacagggacacttgacctctgcacttcacattttgagtcgggtcaattaggtagttgcttgtactgtcttctacctgcaggtggtagagtttctttatagttcccaaagttaagtggcaccccttttcagcccctggaacttaacctggaattctgccctatacggtgctgtaaaacaaaccatgtttgaaactactgtaacgaatacaggtcagacagcatccctaaatgtaagaattcctgaggtccaggtgcccctgtggctttcttagcttagaacatggagttaatctcattttatttacaacatcacaaatgactcaaaggatgcatttgtatttcctttcctacatatggagaagaggagtttttttaatagctctgccttgagctgagtatgtaaatgctctggtttctgtattcaaatactccatgttttgaagttagcaaagcccttagagagtacagctgacccttgaacaacacagtggggaggggcaccggccctgcatgcagttgaaaatctcctataacctttgattttcccacaacttaacttctaatagcctactgttgactggaagtcttaccaataacataaacagccaattaacacatattttgcatgttatgtgtattatgtgctgtattataataaagtaagctagagaaaaaaatgtaattaaaatcatgagaaaatatatttactaattcattaaatggaagtggaccatcagaaaggtctttattcttgtcatcatcttgttgagtaggctgacgaggaagaggaggaaggggttagtcttgctgacttaggggtggcagaggcagaagcggtggaagaggaggcaggagaggtgggcgcctcagtgtaactttacagaaagacatcataatttctggcttttttgctttttcatttttctaaaaatatttgtatatggtaccaatccttcctccaccacttgctttaggtttaatgcttgtatcatagaagggtctgtgttacaaaagaagtgaaaagcagtcttgactaatcagaaacctgccagattgtttaatgtcgatttgttttctgatgctgctgcttctgtgtcgtcttcatcatcacctcacactgatggggaagcactcgtctccagcaggttgtcttctctttgttcctctagtgtggttatctgttagctcttgaatttctccaagatccgtatcttgaaacccttcaccccccaccttttttgccacatctacaatctctttccttgattggctctgttgtaaatcctgtgaagtcatgcacatcatctggacagttttctcctgcaggaatttattgtttcaggcttgatggctttcatggcttgctctgtcacaatgatggcatcttcagtgatgtaattcttccagacttccatgttgttctctctgttggtgttctcgtccatagtgttgacaatcctttccataaagtactgtgtgtaatgagccttgaaggtccttatggcctcccaatctagaggccaaattatgatgtgtttgggggcaaggagaccactctgaggactttagtgttgaactcatggggctctgggtggctgggggcattgtccaatatcaaaagaactttaaaaggcagtcgcttcctgggaaggtacttctgacttcagggacaaagcatcagtggaaccaatccagaaaagttttctcagtgtccaggccttcttattgtacaaccaaaagattggcagctggtgtttatcttttcccttcaaggccagggggttagcagctttatagataaggccagtcctgatcataaacccaattgcatttgtacaaagcagtccagttagcctgtcccttcctgccttaaatcctgatgcatgcttctcttccttactaatcaatgtcctttgtagcatttttttcccagaagaggacactttcatctgcactgaaaacctgttcaggcaggtatcctttctcctcagtgattttcttaatggcatccgggaactcacctgctgcctcttggtcagcagaagctgcttctcctgttatcttgacagtttttaagccaaaccacttttaaaaattatcaaaccatcctttactggcattaaattctccagctttagatgcttcaccttccttttgctttaagttgtcatataatgactttgctttttctcaaatcatattagagtctacagatatgcctttcttacagcaatcctgcacccacataaaagctacattttcaatacaagattaaaaggtattctgcaaaatgtgcaaggttttcatgtctgctggtgtagctgtagtgatggcttcatgaatttttttcttttttgactatggtccttacgctggattcatttatcttgaaatggtgaacaatcacagctgcagaccctcaatttatggtacatatcaagcaatttggctttttttcttgtaatgaaaaaaaaaagttttttttgctttttttcatgacactgcttcttgggagcactgccagcattactagtggcacttcgtatgggtcctaaggtgttattgaaggtttacgatattgcactaaacacgaaaaataccagagaaccactggagatactttttactgtgatatgtaatttactggagacaggaactgctcgtttggagatggttagcatcacagggtgttttaagtcgatacttgcaacccttgagctcaccacagtagcaacaggaggtggctaggaaattattcacagcaggacagtacgcactgcaattaattgtatgcagttatgatttaataccacatctttatgctcacgtttctctcaactgtgaatggtgccatgtacagttggtatgtgtgtgtttaagttttgataaatttttaacttttaatagttaaaatagttaactattggtatggtaggaaatgataaagtagactagtatctgtatacattttctgcatttatgacatacctttttcttcatttttttcaatattttaattgaaaagttcatccgagtttcatctaagttttttcaaagtgatacaaatctccaaaaaattttccaatatatgtattgaaaaaatccaggtgtaagtggctctgcgcagtccaaacctgtgttgttcaagggtcaactgtgtatgaatccaagcgaaagcttttcttaacacctcataagaactattttttaaaaaacaggaactagcatagagtaaccatcacaggtaaagtgtaatttgttatcagccatcttttgcccatttcagtactggtagaaggctcaatggtaaaaataaaaacgggacagtcagaagatctggaagtcctgaccctgctttcacctggcatgtgtaatccagtcatgctcgtatcagtctctgtaggagcacttgaaggtattacataaatgctatctaactctgggaaacgccaacatgtgattgcctccagaggaatcttctttaaaaaaaaattcaaaatgttatttccttactaggatgtctttaaagaattataacccttaccgtgcctccacattagatagatccctgccaccagcacccatgtggccaccagcagagacagcaggaggagaggcagccagcctcccggcttgcttttgtctggaaaaaacaaagcttattcacctttggaaaacaaatccacacttatctcttaatttaaaaactaagacttggtatactttatagaggtttatttattttttattattttttagttttgagacagagtctcgctttgttgcctaggctggagtgcagtggcgcaatctcggttcactgcagcctccgtctcccgggttcaagcaatgctgcctcagcctcctgagtagctgggattacaggcatgtgtcaccgcgcccagccactttgtagagatttagatccctttaaaaccatcagtcagaagctctttagagagtctgccaatcatatctttttccctagagtgtgcaggtcttgcattagattctcaaaagggatatgggacccaggaagttaagaacagtcctaaaatctctttggcttctttgtcctgatatgcaccggcattttcacagtaggaactagggtttctgtccagtttttttggttctttaaggaattaatgttattctgggtacaactgcttacatacatagcacatatagatgacatttttacaggccgtcttgttagactgacatacatggaggatagtgccacccgcctcacaagaacatcaggtaagctcaggcacagagtgcccaggaatctgtaaggcttcgcccacgcacaagtcagggctgccagtcacctgggttgtcttcactttatttggctgcgtctaatgacaccttccaacttttgaccccacccctggactgttgtgtaaacattgtatttctccatctgtaatgaaaaagctaacacatctctaactccagagacattttccagaacatgctgttctcaggcactagtgaggcggtaccattattcctcatttgttatccaaatgttggccatgtgaccacaccaaaagctcatcctgggccactgagactggtaattgaatcagaatatagtgaaatattcattctcatatatacccagccatcttacatctttggcttttttcagcagatccttgtggcactcagaacatccattttgcactgtgtatttttttcccttctgtgtatcctgctttgtaaagagtcacgagtggttttacaaataaagcctgttcttactcagattctaggttctctgggacagcactgttggctttctctgcaccccagttcagtgtacacaggcagcgaccccttgcactgcccacatacacacaacccttccacatactgagtggggggcagtgactgtgtgtgagccactttgatcatctggttgaagttactgggcacttactgttatccagagggaaagggacgcctgtttgtgggcagagcacaactgttcctttatgtcggatgcagtcgctgccacaagtaggaaaatatggagtcagctgaggaaaaacaagaggctcagaaagttcacaccatgcatcagagcaaaatctcaccaagactcctacttcagccaaaacttcccttctttctggcttcgcccatacctctagtgttgtcatgcacattttccccttggtcacacatctgtaacaaagccctaaagtcaaaaccagtgacccgagacccacgtgcccaagactcccggggtctgaacctaaactttgtacacgttactaacataccagttcgcttacctaaaagggctaggtcatatcttaccacgtagacaaacatttcctctagaaaaaaggagcagcagtgatcctcttggcttccttcagccagtgctttaggacatgcaagtccctgtagtaagggaagtctatggttctccagaaaagggtagtagccatcataccctggctggtgcctgccccctctggtgtgtttgagcactttttatgccagggaatgaagcatggaagctccttactctttggggagtggctgtgtcccactggacctcctgtgtccccacctcaaaaactagagttgaaagagacatactgagaggtgaaggagcacctactgctccaacttcctgtgttccagctgggtccgctgcggcccagagaggactggcagcccctctccagagttcatacgctgcctggaactcaaaccttcccatttcaaaccctttgcagcttcatcttgcagttaaaggcttgcggaagtaaaatggtactgctatccctgagtgtctgtgacagaaaatgaaaataaaaagtgctttggaaggtcagcagccattaatacaagcaaaagggaccacaactgccacgtcggcctcctgacctcagcacggtggaggctgcagcgaaagagcccccatgaacgccacttaactggtgtctgctggcagaagtgcatttgacaagagagaactcatccttaaaagcaatgaatgatggaacagtcttctatgtcccttccctccccagagcagctcactgaactttacctgcaccgtagcaccttcactatccccagtcactggaatcaccactgaagctcgcgtttgtttcttctggtgtggcttaagagagagagagtcaagaattatgaggtgccaggtgcactggctcacccctgtaatcccaacactttgggaggccaaggcaggcagatggcttgagcccagtattttgagaccagcctgggcaacatggcgaaaccgtctctactaaagatgaaaaaattagctcggcatggtggcacatgcctgtaatcccagctatctggggaggctgaggtgggaggatcacttgagcccgggaggtggaggctgcactaagctgtgattgtgccactgcattccagcctggatgacagagtgagaccctgtgtcaacctccgccccccaaaaattatgaggcacaggagtgagcagatttcgaggcttccagcaaagcagctttgcttcccaaaaggactcctttcactagaccatgtgtaaagaagggctcatttcctgcttcggagacttccttctttctatggtttgaggttcacagtgacacctctcaggatgcccacagggacttgtttttatctgttgaattcatcaaagtagcccagcacgtttggacaacactgtccccattttccttcaacacactaaggaaagctggaggacgaggtgaaggggacgaagagaaaaagtacctcaaacacctgagaaaacccgatgatagtgctgtgttggataagagccatgtatctgtttcccaggggagtggttgtgaagttcacttctactgtctcctcattcttcttacaagcagtgatgttcggatcccacaggcttcctgtgagttgagagagaaccatgtagatgaacttgctaactcttccctcatttaagttccccacagggctttatggaaacaaacccaagttctcaggaacaatgtccaagagatagggacgctgctacatagtgaactttttatcattgtttccaaagtctcaaagtacttgctgcccaagacagtttggggatccgtacatcgctgctttgctaaaaacagcttccctgggctgagtatggtgggaggcacggattggttctgctactcactgctgttttcaacctctcttttgagttaagggatagggtcagtattttctacttcccaggatggggagaaagagctacaggttggaaaacatgtctaagattatagagcaagtgaactcacaatcaggactacaaccactagaatattttgtgttccaggagcttcatccatcagaccattctgccagcttcactagatgcaaagaaagaaggaaatggctcgtagcttagaggatataccctgataggtctgctctggcagaaaaagtcagtcgtttcattcatgtgacttgcaaataaggactggactgatttccaggaacaacaatgtataacagcagaaattatcttctccaccgaggagaccatttgaggccctggctcagaactgtctttaggagttcaggttcaggactgacttcaaggccctctgacctcctcacacctgcagtgttctctgtacccttggtgggaagctcagcgtccaaatctgccttctagcaaggacagcatggacggctgtctgaaagggtaccagggatgccttgtgcagtgaagggtgcctaagagttctgggctgatccaaataccactagcctcattagcattccaacactatattactcagaaatttacacaaacccttggaaactgggcactagggactaataatcctaaaggggattactacaaaattcaaggggtaaaattcactagcctgtgaaaagtgatcctctttgaggacacaaattgagagcgtaattgtgggccagtcctttagcgaactcacactcccacctcgaatgtttgctaatccaaacagaaggttcttaggatccccatggccacaggtgggtggtgctagcatctgagcaggtggaagggctcgtaggactcccatcaatcaggaagagcctttgattggcactgctgagccatttgggctaaaatgttgttaaccaagtggatgggggtggttctttgtgactgttgctccactatataaatgtactgagggtctacccctttctggacaggctgctgcactcagtgggcaaagtactggctggagatcaggagccataggtgcttctgccaccaccatcgggggtgcttggatattcaactctcccctagggctcagttcttctgtgcaaagatgaagagagctatgctgcctcaagttacaagtttcttcaaataataaaagcaaatgccgtatttacttaccggccttgacacacttttttttatatttcattatgtggtctaggcagcctggaaatttgaatgaaagtttttacattttagaaaaaggtatctctgccccaccccctttgccaagtgcacacacacatacgcataccacacctgtaacaaattgccaaaacattccagatgtaagatggcaaattcaaatggggctctaatttttttttttttttttttttttttgagccggagtcttgctctgtcgcctaggctggagtgcagtggcgcaatctcagctcactgctagctctgccacccaggttcacgccattctcctgcctcaggctcctgagtagctgggactacaggcgcccgccaccacgcccggctaattttttgtggggctctaacattttactgctaaacagagaacatctgcccattacgtgataaccagagtctaatttaaatacagcctttatcaaaacagtatctttgatccctaagagaggactcgaaaaccatccatcatttgaaaaggacatttggtaatatctgtagatgctgccccttcaaggacatgaagcctaacactcccctatcctcaccccagggtggggtagaattagtgacttgtttccaaaaacgagagttgggaaaaacagtagatttacatggagaagtctggcagtccccacattaatctagtgttgatggtgacccccagcctggtgtcatgtgggtgccatggacccctgatgggataagaagggcccggcacctctgtggtatgaattccctgtctaatcatgagacaaacatcagacaaacccacactgggggacattctacaggatgcctggtcagaactcaagactgtcaacgttctgaaaaacaaagactaagaaactgttacagaccagaggagagacacacagggactaaatgcaactggaacagaaagaggacattcatgaaaaagcaggtgaagtccaaataaagtctggagtttagttaacagacacgtactaatgttggtttcttagttttgacaaatgtatcatggtaatacaagacgttaataggagaagctgggtgagaggtatatggaaactgtactatctttgcaacttttctgtaaatctaaaattattccaaaataaggctgggtacggtggctcactcctgtaatcccagcactttgggaggccaaggtaggcagatcacccgaggttaggagtttgagactagcctagccatcatagtgaaaccccgtctctactaaaaatacaaaaattagctgggtgtggtggctcatgactgtaatcctagcttcttgggaggctgaggcaggagaatcacttaaatccaagaggcggaggttgcagtgagctgagatggtgccactgcactccagccagggcaacaagagcaaaaccccgtctaaaaaataaataaataaataaataataaaataaaagaattccaaaataaaaaagcttatttgaaaacaaaatgaggtttgctctcatcaagaaagttggaaaccacgtgtagtaaatggtgcagcaccaaaaacaccctggaccacaatctccaagaccagcagtgaattggaaattaccgtttggctttgatgccttgcctgtgacagatgacaggatggtggtatgggatgggtgactcggctcagatagacccttcacacacaccatcctgtctcatcctcatcacagccctgtgtgtgacattgcagctgtggtaccagagaactggtcctgtgtcacaaagctggggcaagggcccagcatccaactcaggaccaccctgcctctcatggacagcttggggacaagccaactggagtctgtagattctcagaggcccagccatatgcagcccactctagaaagctgagataggaacgaacaaacattttgcatcagtgatataaagagtggctcaggtgcattgctctagaaggaccaaagtgtgaatgtcagcttcacttttatgtgtgtataacccagggaaagtgacttaacctctcagtttcttcatctgtaaaatgcagctatcccaaccttggggttgctgagatgcttaagtgagatgatgcatatcaagtattcagcacagtgcctggcatacaggaacagactttttcctacattttacctgactttattctctctgctctgtgggtaaagtatggttactactgtgtccatgctttagataagggaactgagatttagcaaggccaaaagccttatccagggttccctgggctctctctgtgcatatcgcaaagcaggcatcccagcaagacaaagaataataaacaaatgaggaagtttacctggtgaggtgaaattcacagacatggaagggccatcttcattcatatttgcattaggaatattatgggccccaatgaaatagactgtgttcagctctacagggaagccgatgtaggaaaatgtccactgaaaggcaaagcaaggaactctcaattcccaaaacactgcagtacagaaacagtataccttagtgtgttgcccttttagtttgtatttcattactcactctgtgaaaacttaggtctccaaccaatgtctacttagggaatgggcactaaacaatttacagaatcagagaagtataaagttttaaagccaggatataatttaagtccaattctcttccattggctggtagggaaaaactgaggcccagagatgctgacttacaaaaggcacaaaacagagaagtagccgaaaatgggatttgaaccaagggatcttgctctaagctctgagtcatagctatttaccagcccgtgtgagcagcacatcatccatgctccccaaacaaagggcatagctttcagcaacaattagccaaatacataaaagtgtctatgcccggatacagtggctcatacctgtaatcccagcactttgggaagctgaggcaggcagatcgcttgagcactggaattcaagaccagcaacacggtgaaacccccctctacaaaaactacaaaaattagccaggtctggtggctcatgcctgtagtcccagctgcttgggaggctgaagtagaacgatcgcttgagcccagaagattgaggtcgcagtgagccatgatcgcaccactgcactccagcctgggtgacagaacaagatgctatctcaaaaaacaaaacaaaaaacaaaaaagtgcttactttaccaccagagggtctggtctgagtctggaaggcctctgtgtaattgcacctcacacagctgtaggactggaagttgcttttgcccgtcacacaaatcttggtggccttcaacaagcggatgctggctgccgagataggcaagaggacattggtttatttagcacttgctgtgtggctgacttgatgctagatgctttactagcatgctttattttatgtctcggttcatattcacaatagtactgaaaggtaggcaccactgtctccagtttacagatggggttcgtgaggcttaggaagtttcagggagctctgcttaaacttagaaaactcatcagcaagtagcagatacgaattcagattccaaagcccaagctccctcctcctcataggtcagcttgaatttcataggatgcctgcaaaggtggctatagctctgcactattctgggtctcttttaagaggaagaggctggcctcagggagacccacaaagaccctccaagactgtcatcaccaaaccacacctgttccgattgcacctttatccatgctgattcttctccctgaaggtcctttcctcccattatctacctcttcaagtttcactcttttaaagcccaactcactcatgcaccacagcccataaccacagctgacaaagagctcactctgtgccaggtaagggcccaaacccttatggccacatctcacctaaagcaacctcaccagagaccctttccagctcctctcgccctatcccactcagatgaagcacagctcccttctgggactcccctgacattgtgcctgtgtctgcctcccctacccctctgaatcctcctgggtggagactgtaggtgactcctctctctgtgcctggcactcatggattcttgaccaggtagacttttttccgatctgaatttagcagatggaaaccaaaaggatgggcattaggatcccaggagtagctcactgaaagaactcatatggtgccttgcagcacaatcttggggaaatgccaaaagcttcgtgacgtcatctgggaagtggaaaagtaatctatctaagccagtgctttccctaaactgaagtggggtggggaaaatcatctctcgccttaccttatcttcttccatgaagtacatacacagaaaagtacacacataagtgtaccacttgatgcatcgggacactcatgcaaccagtatgcaggttaagaaactccctcaggtgtgctcctcatacttccttacagttattcctaccccagcaggaaccactaccctgacttttattttattttattttattttattttgagacagtctctctgtcacccaggcaggagtgcaatggcacagtctcaactcactgcaacctccacctcctgggttcaagttattctcctgcctcagcctcccaagtagctgggattacaggcatgtgccaccatgcctggctaattttttgtatttttaggagagatggagtttcaccatgttggccaggctggtcttgaactcctgacctcaagtaatctacccgccttggcctcccaaagtgctgggattacaggcatgcgccaccacgcctggtcttttgcttttttttttttttttgagacggagtttcactctgttgcccaggctgctggagtgcagtggtgcgatcacagctcactgcaagctccgcctcctgggttcaagcgattctcgtgcctcagcctcccgagtagctgggattacaggtgtgcaacaccacatctggctaatttttgtattcttagtagagatggggttttgccatgttggccaggctggtctcgaactcctggcctcaagtgatccacccacctcggcctcccaaagtgctgggattacaggcgttagccaccgctcctggctactatcctgacttctaaacactagattggttttgtttgcttggcactttctgtaaatgggatcatatggcatgtatgcctgcaggcatgcacacagatataaatgtacaaactcttttgaatctgccttatgtttgtgacattcatccatattgttgtacgtagttacagatcattcattcttgttgctgtgacggaatttatctggtgattcctttctactgttgggcatttgagtgc

SEQ ID NO: 8063 - DNA, 8710 bp, Homo sapiens
caccttcgtcctcgtcagcattttgtctaatcgcggcctgtgacgctcgaagggcggggagcagagggagatacagaaaccgacaggggccaggcgcccggtggctccgaagcggggaagtgggacaagatggtttacatctcgaacggtaagttgagagcgggctgtggcttcgaccggtgacttgtaagatcggactccaggttcctttcatcgtcgctcgctgagtcttgagcccggtgcggcttccccgggcttagcgccccgcggccgggcggagctggaccgaagtcgcctcggcttgcggcgcgtcagccgatggtctctgagccggcagtcgggggccgaggtcccgccggcctcacgttgagtactgggagccctgcaaccccgccttcgtgcagcaagcgcttgattgtggatttgcgagggtggtctttcctctctcgggtgtcggtatccttaaaactagtaaggacaatgatgccgacgctgtacacgtagcgcttgtgccctggacagtgtttcagttatttgcttatcgtcacattcaatcctgttttacgggtggaaactctgaggctcagatagattaaatagcttgcctgggctatttaagtcacagaggtaacttaatggctgagtcgggattcgatcacaggtaggctgacgtcagcgtccttgttatctgttatgctgcctctgtctacaacgtgtaaaaagaccgagccgacctaggatgataattagatgaaagctttgcataggctttttccccaggaaagggtagctagtcaaacatggaattttttgctcgaatttcaaggggcatgggaagaagtactatcttcccctaggagcaagttaattattaccggaatggagaatccgagagacttaattctgcgaacccacaaagaagatgaccggaaaggaaggacatgactgtgtcagatcagtgctagagctgcctgcccacctgtttgactcaggtgaaattctttggtacagtcttaacaaggagttgtggatcattggaactaggtcttggttctatttgagtcatctgtttttctccagagacgagtaaggtagtcagtgaggagccttctggctgactgcacttttgcatttcttgacttttaaaaatctccccttctcatctcccacttaaaaatctttgaaacaagtagattgatggacactacagaaaagcatcaaaatttcatcttagttttgggcgctttcagactttagtctgttttatagcctgttttatagcctttgtgatataagcttaaggctggaagcttctgtatgaattattgaataattccttgtatttgttgtgtcttactgtgttcgcattatttcatttggtccacataagtagccgattaggactctttatcgtactttaaaagttgagaaacacaactgcattcaaacaccttacttctctctggggatattggtggaagggacattctgccttaagaaagggaaagtggaaaagcaagatagaatcacagaggaagaaatgacaggttccaattagatccaccttcttaggactgtattatcagcacttgacaaaatctttctcttgctgtcagatgacttttttttttccaaaaatcttatgtgatggctagccctggaatactttttgttggagaaagaaaatgtcacatcagccaacgaagcagagctagtaagaggcagagaactaagcctgtcacccaccctctaaacttttgtagccccttgctctcagtagcacagtgagagcttagatccaagtgggtatctgaaattaagctggtcaagaaaagaggaaaagtaaaccctcatggagtgggtagaggtgagtggggttaactcttgggataatggaaaggagaggtagttgacagttactcttccccgaaaatattctgacatcttgatttgcaaggctgaaatatagtgtaccaacttatgttgtagcttctattaaagtggtttgaaaaatagatccagttttgcttaagataaagctagagtctattagaattaagagtatgctgttatagaaaacagtagttattttaatgaagaacaagccaaattctctttagtacttagagcatacacactctttataagaattttataaaaataactgattccaaagacttgtaagagtatgaatacgcaatctttttatacaggcaagagactttgcaaatgaaaagaaatactcagcatgtttaggaatatggaagtggtgtgagcattcctttatattcacccgtcccatttgtttcttcaaagtacttgaataaagaggtatttttacacccatgttgatagcagcattattcacagtagtcagaaggtggaagcaactcaagtgtccatcaacagatatgagtgggtaaacaaaatgtagtatatacatacaaggatatattattcaaccttcaggaaggagattttgacacatactgcaacatggatgaactttgaagacatgccaagtgaaaagctggtcactaaaggatagaaattgtattattcttcttttatgaggttcctagagtagtcaaatttgtcgggacagaaagtagaatggtggttgccaggggctgggcggagaaggtaatgggaatcagggtttaatgggtatagagtttcagctggagaagatgaaaaacttctagaggtggatggtggtgatggttgtgcatcaatgtagaatgtacttaatatcacagaactgtactctttaaaatggttaaccattggtaaccattgttacatttttaaaccatgataaatttttgttttatatatatgtgtttttttgttgttttttgttttttttttcttgctctgtcgcccaggctggagtgcagtggcgccatctgggctcactgcaacctctgcttcctgggttcaagcaattctcctgcctcagcctcctgagtagctgggactacaggtgtgtgccaccatgcctagctaattttttgtagtttttagtagagacggggtttcaccgtgttagccaggatggtctcaatctcctgacctcatgatccgcctgcctcggcctcccaaagtgctgggattacaggcatgagccaccgcgcccagcctttgttatatatttatagaaagagagaaagtagttgaatagaatgaagtcacccaccaagtttataaaccagtaggcttttgacatactggaggaatgtccctagataatggaacattacttctccgaacctttccttggaatgatgctcacagatttcttctggtgttggccatttggaataatgggcaagttaaaaccccaatcattgttacctcaataattaaatgtgatgcctcttgggttagggatttgtagcactcactaaagtttctttaattcttatctgtaggacaagtgttggacagccggagtcagtctccatggagattatctttgataacagatttcttctggggaatagctgagtttgtggttttgttgtaagtatagaagagctcttaattgccctgatatttaagttgacaggtatacatcatgtgcattatgttagggatcttaaataagctcaactttcctgaaacagttttctattgcaatttaaaaaatagctttacacagggaaatagatgttagtgataaagttgctaccaccagatagcttatgattatgagtatatgttagttggattggtaaacttgaccacatcttaaccttggtggtaactacttcaacctatggctgggtccgtcaattctgatgctaaatgactggacctcactttctctctactattcttgttttgtttttttctttgtgcatgcaactttcattccatattatataacaagtaaataaaaggttttatatcctggtttaaaaaaaattccaaagaagtaaacttttttataatgaagggttagaattggtaaaggagacaaaaatttaaatgtcttcataattgtaagcagttactagttaaatgcatgttttggtcttttacatgctgtttgttagaattgttcatcaataattaagaagtcttacctattcctaaatttgaatatatatttgagtgtctcatgatcagggaactgtagggatgcaaagatgtgggagacccttttttcattgagtttactgtcagtaaatatcttcatattgcaagggtgggcatgactgggaggtgaacatcagaggaagttatcccagataaaggaaaccacatgaaggatggcatagaagtttgagtatcaggctgtggtctttatgcttaatttgatcttagctgtggtttagaaagtttaattttatggctatatatagcataaactagatggtgtagaatgtaaaatggaagagatggtttcatagaaaaatacaacagggcacaagagaggccctaagttacccaatccaaaacttaactcttttacaaatttcacctactccatgttgtttataaaagtactttttaaactcagttaaatccttccatataattttacatatcatttttaaaaattccatttcaatggattcccagaagccctgtgcctttgccacaccacccttggcccctccttccctaagatgttaggtagacttttgcaggggaaatgagcatgagacactgtaaaaacccgatggctgatttaaagtggaggtcagggatgactctggtttcatgctctgtctaggggagttattagcaaataagaaatacaaggaagggtagatttggtgtacaacatagcacattcagtttagacacatgcttaagttagatggtggtgtccagctggctgcaagaaatgtgggttaggagctaagtgggtttagtaatcctctcacagagatgatggttaaaaaacatggaaatatattttagaatgttgtcaaaagtgatacctttgttgttttctgccccttgtttcagtttcaaaactctgcttcagcaagatgtgaaaaaaagaagaagctatggaaactcatctgattccagatatgatgatggaagagggtacagctttttaaattgataatagttgtttttatgtctttgtatacctttattagatattttaggtagatagagttagacttttggaaattaaaagtttaaatcctattttacaaaattaatgcattactgtaaattaaaagtcaaattgcttctgatttgataataatcagttaatctgacaaagctaaaatatacatgaaatatcccatggaaaaagtctaaattagagggtgaaaactgatggccaccattaaaatctaaagatttcattttaacatctggatttctagttgctaattaaaaacttagaagatcgccaggcacggtggcttgagcctgtaatcccagcactttgggaggctgaggcgggtggatcacgaggtcaagagatcgagaccatcctgaccaacatgatgaaaccccgtctctactaaaatacaaaaattagctgggtgtggtggtatgcgcctgtagtcccagctactcaggaggctgaggcaggagaattgtttgaacccaggaggtagaggttgcagtgagctgagatcgtgccactgcactccagcctggagacagagtgggactccatctcaaaaaaaaagccgtaaagatcaagatcaagtagcactgggctaggcttatgtttctacctggcaaaaatcagctggagctgggtttcagtggggcattactggaggtgctattcagttcatcacagtcctttcttgactcagttccttgtgtgcattatgtgtctggtccctttaagtgttttaatttttgcctcctgacctaaaatggtagtttctattttaaattgtgttttagggtcatgtgggtgctgaaaaagaaaagggtctagttgagtgcttttaaaaggagacaattcaagttgtgtctatcaaacagtagatactaactttttattttattaggccaccaggaaaccctccccgaagaatgggtagaatcaatcatctgcgtggccctagtccccctccaatggctggtggatgaggaaggtaacttcagatctgaaattcttttgtaggattttgttttgaaaacacttctgtagtaatgttttctttaagaagttgcccagcagcttataattactcagacattatttggaaatatatttgttatcttaacccttgaaaaattcactggccttgttatcaaaatgtcttttgagaaagattttataacatgtaatatgttgaggttttcacacagatccaaattaataaccagtaactaattattgtaacattttctttcaggtaaatgtctgctctaagaagcagacaaccggacatgcgcattcatagcagaaggaaaccatcaagaagtggaaggctgaccatgatgagcagtagatgaatgtgtatgtctaaacaaggactgctctgtgtcctcacagatgaatgaggtcatgctgggaattccctctgcagggaactggcctgactgacatgcagttccataaatgcagatgtttgtctcattacctttttgtatagtttattaaagtattaatatagttttaataagtaaatatttttaggttgcagaatggactcctcatctttatattcacgaaaaagcaatctgaagaaaacaaataaaagcctgtgtatttagcactgttagtgtcaccttttcaacttctgaaacactgttcattgttaactttttctcatttataaatcactgtatttattttagtagtatgcatagcatatctgtgctcttgaattaatttttatctttaacatatttgtctcatcaatctttaatacactgtgtctaatttgctaccaaatgtaattatcagggtatttataaaaccatagctaacaaaactgagctacaaaatgaaaatttactaaatagtttttaaaatcatggacttcagcctggcgcggtggctcatgcctgtaatcccagcactgtgggaggctgaggcgggcagatcgcctaagttcacgagtttgagaccagcctgcagcatgacgaaacctaaaataacaaaaattagccaggcgtggtagagtgcacctgtaatccctgctactcaggaggcggaggcaggagaatcgcttcaacccgggaggcggaggttgctgtgagcatgccactgcactcctgcctaggcaacagagtgagaccctgtctcaaaaaaataaataaaaccatgggcttccatgctatcttgacaaatttgcactctatagcatcactcaaaatactgcctattggctttaaactccatctgaatactgataactttcacattctttcactagagtggaagctctgagactaggaattttgttgtctttaccccagtcctttgaatagtgactacatgtaagatagtcatgtagtatttattggaaataaatatttattggaaaaacgaaaacagataattcctcttctggtgtttaacaggctttgaaaccaagtgttcaggtgaaagcctttttatattgatttatcagcatttattcaaccccgtttgtcgggaaatgggatgttgtggcataagataccaatattcaggataaagaagcaattacaatgcaggtttcaggataaggataacagtttgctggccacctcaattatgtgtcagattttatttattttttaatttttattttatttttattttttatttttatttttgagacagggtctcactcttatccaggctggagtacagtggctgctcactgcagccttgaccttttgggctaaagtgatctcccactatggcctccctaaacgctgggattacacgtgtgagccacaatgcccagcctgtaaatttttacacattttaaattctgacaaagtgagggatatgtataatgtatacatatatacaaagtgaggtaaatgtataatgacatttgcattatacagatacatgcaagggttcagtaaagtttggcagcttcctagattgtattgccagtgaatggcagaggcattattaaacctccaccttaccctatagcggggagaccatggcagagtctcagtaggtggttgattgttgttactgatggctcttcctgagcatgtgaaccatggtcctcttctgcctcctagcactgctgctgcaggacttgttcctcgggtcttatcccagagttctggctgcatttgacattcaggtattcttctttgcacttcagatagaatgtaaaacacaggttcttgagtactttatgcttaactcttgtctttgctactcaatagcttatgatcttgagtgaattatgccattttatcccacttcactcacctgtaaaacggggattaaatttttacctccaagagttctttatttagtatttagtcatcacatgcttattgggcacctaccatgtgctgaagataactggcaaagtctcacggagcttacattctagtgtgggagacagtgagcaggcatgataattacagactaatgcttcatgcttcaaagggaataggatgatgagagaataactgcggaaggcctgaggtgacatttgagttcagacgtgagaatgagacagctgagggaagagcatccaaggcaaaatgaacagcaagtgcaacagcccgatgacgggaaggg

SEQ ID NO: 8064 - DNA, 427 bp, Homo sapiens
gtgaactttgtcccatggtgctgaggaacaatggtacaggcttaaatggtcatccatttttggttttagaaaggccacctggttggctctgcagggcaaaatagagggctagtccctctgagacgagcgagcaggcagccattcactaacatgcgttcattccgtgagtatctgattctgtgctgtgggccaggctctgggctgtgctggcttttcagttgtgtgccagggcaggccctgctgtgagcttggtgttgttcggcacacaggctttgagacaaccagggtgcggaggttaggcctggagacagggttcatgagtcagactttctcagggggcagtggagaggagaggaggatagagccctggggaggagagcttgcctgaggaggtggggaggtctaaggggctgcagcaggaaagccc

SEQ ID NO: 8065 - DNA, 508 bp, Homo sapiens
aatactttcattttgatcttctctatgctttcctggaggctgaaatgcatctacctgatattggactcagtttcctgagaccaagactatgtgttagggtcagaaaggtgaatagctacaaaaatagatgatgagagagattattattagatagtataaccctctggaacttctaggatagtcacatactcacttgtcccgtttaaaagtgtaattaggcattttccaattggtttgctactactttcttattcaatcattatgttgtatgtaagaagagaccaaagctttaatgactttatttattttccttatctgaaataattaaacctatctttcagggaattatgctaactttttgaagtagcatatgtgaaagtcctagcatgtcatccttaagaatatgccatctacatggaatatgtgctaatatgattccttgtaccctgcacccctaaactattaatatatcaatgacttttccccctaagttttagtggaacttcca

SEQ ID NO: 8066 - DNA, 6138 bp, Homo sapiens
gaagttgtgagagggagggattaaaattaggcaactattttacaaaacaatacttgcgtgtcactttgctcagtaatgtctttttagccatgtggatttttagttcatcaagtctaattctcttgtatcctttattgcaggctacctgtgtgagtcacatgtcagtgcaatttctggaggtcaattgtagccctgaagtctcagaacaatggcaaaaagaaatacggagggcatgatacatttggtaagtgccttatgtaaaccacagaaaatgatagaggcaatttttttctttcctaaggctggtgatttattgcatacttcttgtcacggaatagataacataggaggacaggaagaaatttgctagtttacacagtgccccctgaaaataattcatcgaattgggctcctttggaaacattcacatattctgcatgtatttttaccagacacatttagcatcgtaatggcataataaaagctatcatttgggaaatatacacattgctcctatctgagtgcacagtggtgttggtaggtactgagggaggaagagacacatgtgccctgaggaagtctctgttttgtctccatgcacatttaagtcttttacacatttgagaagggactgggagaggagcatgggggaagggggctggatgtggctggcatcttctaagatttatgaactgctaaatttagaaatgtcattttgttattgccagtgaactgctagcatcttcgtatgagtcactaagaaaaaatagcaatcacctcctttgcaagagctagtatgagtaacacaagatgggttcaattaatcattttaaccactaaattcactctggataaacaaagtgtgtatcagatgatgtgccctagaaaggttgtcatccttacaaaatgctatgctctgcagctatgctcttctcattatcgtattgcaaatagttctctgaaagaaaaaactgttcaaacaaaatattaaacagcattcatttgtcattttccttcggggactaggcagcaacctgctgtggctgaaaatatgtggtcattatgaagctggtattgaattgtttgtttatctttagcaggggagggaggtttcaatgatgttactatttgattggtaatttcaggcacttctgctttctaaaagcgtatcctctgtccagaattgatattaataaatgagtgtgtaaatatgctgtttgtatgtttctttttaatgttcatataattttcagtgtcataagctcttatcacctgaggagtgatggtgagttttattttcttgttagtgtatagggttttatatcacagtgagtcaggttgcttgctctttcagaaacctgaagcatttactataaatggagtgagtcaggatgtctaagatgccttgttcactgatgacagtatgactttcgcaagtagatcagagagagatttcagtgtctgcatgtggtgtgctatctctttcatctggtcacaggaagcagcaggcactttttttttttttaacgtagagaaacctaggttctgtttctcctctttttcctgattctccatcttttctttttttccttcccattttctttctctccatctttttcttgttcttattcttctctgcactggttaataatggattcaggggactaaaaagtgacatgagaaggtaataggctacacacatctactcaaatcccccagacagataagaacctagtccacttaaaagtaacttcagataccatccttatagaaatccatgccatcacttaacaacttttacaaaatcctttattctgctatttaaacctgcttccttttataatgtgcttagagagcacaagaaatttgtcaccattttctgaaacattccttactcagactgcaaaatcactctttcagcctatttaattggaagcagaattaaagcttcattagctttatctctaaactttttatcaatttatggcactcttcagagcctcctttgcagtttttcagatcctctttaagtcagagaatgtagaactgtacatgtgtctccaaaagatatttgcccagggcaagtcaatggtaaagttcaaaaatttttaaaaagccctattcatgttcttcaaactcttatggtcacatttgccaagcagaatatgtttagtaaaggtgaggatttgctagtacaagactctggtaagggagatgacttgactgccaggaaataatacagcatgtagaatagagaaaaaacatggctatccttggatgctaccatgtttatttcatacttaggagaggagaaaaaaagcaaactttgatgaagagcggaaagctgagaatcagtgagagaagtctgttttgttggggttgttacaataacactttgcctgaagaaagtactcaacctggatgtattctgataatattgatttgtgattctttccatctaaagaatccttttggagagttaggtgaggacaggaaagtgcagagatgtttaaggagaagagttagagttagatcaaaatcttacttattcaataaactataaagttgtttttccaggcaaaaggagacaattgcggattttattattgtctgaatgaaggggctttaattgctcagatatactgctatgcttccttgcctcattaagtgcaacagtctgatcttgcagtggggaaaaaaaacaggaagaaaagtaaatggggtaaaaccatgagttaaatagttagcttatagcagtatacatccaaaacgatgtattctgatctgttctctctctctctctctgtgtgtgtgtgtgtgcgcgcgcgtgtatatgtgatctcactttttaaaaaaggtttgctttttatcccttgcttcacaaaaatattgctgaccatccaacacagtaaactaatcgatacataacaaagatagaagccaccatttattcagatcatgctacatgccaggtacttaatatatttaaagtataatatatctagtatactttatgtaattacctaatataattattttatcatttaaatgtattaccatgaatgactaactatatgtcatgctctaagttaaagatacgagccctgtgatggaggcatttctgtcgttattttacagatgaggaaagtgaagtccacagaagagactagctacagtctcacagtttgtcagtggcaaaacttagttttgaattcaagtctctctcacactaaagttgatgtttttcctaacacattcctgttactctgctggacttgtcagatttatctggtatctcaaaagattcatgtaagagaaccagagtttttcatccataacactacctccaagagagataaggacactaaattgcaatgatgtaattaaacatttttggatttttttctatcagagaagcctagagaaggtcatttttctttaaaaaaaaaaaataaataaaaataaataaaagccagagataggcaagagttgcggcttctggaattttaattaccagtctattataaatatgtcatcttggcctataatgagttatcacaatcattaactattgttgcagttattggttgtaaaataaaatgcaaagtctcagctatttaatgtatgattaatacaattcattttattgggctcttacactgtgtttgtgggtttctttctctttctctttttcgtttttttttcccactctgtctctttccttgggcattttatgtgaaccacaaaattacaggtctgtgtcttattgtactttatggttcagtaaattaggccagggtgataacctgagggaatattaataatacttgttttaacaagcctacatttataccattgtcaggagttaattgctcagttatacccctggtgctcaggattactgagtactaaaggatagtggtgggaaggaaagtgttccactttggcaaaatctacttccctaagatttgtgtttctggcagcaaggagatgattaccctgaaatacgtgaccatttattgaaccaaaaatagaaggtgttttatataggcactaagtaatacttctaaggtctgaagtcctatggagcacatacagaaaatgtttgcaagtttataaagtgtctgactctggatatctagtaacctggaaaacactactattttattataaaactgtacaccaggggttctttgtcagaacagctcccgccagatgacaggatttatctcctagaagatgttcttttgttctttgtggtcaggcgcagtggctcacacctgtattctcagcactttgggaagccaagtcgggtggattgctcgagtccaggagttcaagaccagcctgtccaatatggcgaaaccccatcattactaaaagtacaaaaattagccaggtgtggtggcacatacctgtaatcccagctacttgggaggctgagtcaggataatcccttgaactcgggaggtggaggttgcagtgagccgagattgcgccactgtactccaacctgggtgacagagcgagcatctcacaagaaaaaaaaaaaaaggtattttctttgcgagggggaaaaggcagcaaatactttcattttgatcttctctatgctttcctggaggctgaaatgcatctacctgatattggactcagtttcctgagaccaagactatgtgttagggtcagaaaggggaatagctacaaaaatagatgatgagagagattattattagatagtataaccctctggaacttctaggatagtcacatactcacttgtcccgtttaaaagtgtaattaggcattttccaattggtttgctactactttcttattcaatcattatgttgtatgtaagaagagaccaaagctttaatgactttatttattttccttatctgaaataattaaacctatctttcagggaattatgctaactttttgaagtagcatatgtgaaagtcctagcatgtcatccttaagaatatgccatctacatggaatatgtgctaatatgattccttgtaccctgcacccctaaactattaatatatcaatgacttttccccctaagttttagtggaacttccacatcttcaggtgagacctctagacagtaaccaccaaatgattgtgagaggtgaagccagctggacttcctgggtcaagtggggagttggagaacttttctgtctggctagaggattataaatgcaccaatcagcactctggaaaaatgcaccaatcagcactctgtgtctagctaaaggattgtaaaggcaccattcagtactctgtaaaaatgcacaaatcagcactctgtgtctagctaaaggattgtaaatgcaccaatcaccactctgtaaaaacgcaccaatcagcgctctgtgtctagctaaaataaacgcaccaatcagcactctgtaaaatggaccaatcagcgctctgtaaaatggaccaatcagcaggacgtggacggggccaaataagggaataaaagctggccacgcaagctagcagcggcaatcctctcgggtagccttccgctctgtggaagctttgttcttttgctgttcatgataaatcttgctgctgctcactctttgggtccgcactacctttatgagctgtaacactcaacacgagggtctgcggcttcattcctgaagtctgcgagaccaggaacccaccgggaggaacaaacaactctggacacaccacctttaagagctgtgacaatcacttgcgaaagtctgcaacttcactcctgaagtcagcaagaccgtgaacccaccagaaggaagaaactcgggacacatctgaatatctgaaggagaaaacactccagacacaccgtccttaagaactgtaacactcactgcgagggtcagcggcttcattcttgaagtcagtgagaccaagaacccaccggaaggaaccaattctggagacaattggagctttgaaaactatttaactaaattatagtgggttcagtataaaagattgttttcttccctcccttctctttttttttttccttattcctatcctgctatagtattttctgccatgttatgcacgtacatttaaaaaattactcaccaatccaataaaaaacatactgctgcctta

SEQ ID NO: 8067 - DNA, 467 bp, Homo sapiens
gtctgcgagaccaggaacccaccgggaggaacaaacaactctggacacaccacctttaagagctgtgacactcacttgcgaaagtctgcaacttcactcctgaagtcagcaagaccgtgaacccaccagaaggaagaaactcgggacacatctgaatatctgaaggagaaaacactccagacacaccgtccttaagaactgtaaccctcactgcgagggtcagcggcttcattcttgaagtcagtgagaccaagaacccaccggaaggaaccaattctggagacaattggagctttgaaaactatttaactaaattatagtgggttcagtataaaagattgttttcttccctcccttctctttttttttttccttattcctatcctgctatagtattttctgccatgttatgcatgtacatttaaaaaattactcaccaatccaataaaaaacatactgctgcctta

SEQ ID NO: 8068 - DNA, 7524 bp, Homo sapiens
gcaccccgccttgtagtgacctgtcggcacgtgtcccctcgggaagcagccagggtcctggtgcgctccaccacccccaagtaagcccgcagggctgacgccacttcatccctttccaggtctcagatctgggtccagccctaatactcttgagtattgtgcaggcctttcttgtgtcacgcggatgctttgggcgtgtagtgggtagagacctggaaccctcccctcatcctttatacccagaacccctgtggggagaatctggggcaaggtgtcaagctcgaagcagctctggatttgggtactgtgggacaccctgaatccggaacagggcatctttgagctcccctcaaaggctgagtttcttctgggcagcttcactgtctgatagccctgcacgccatacccctcggttctctggccctttgaacagagattccctaaccctgctgcttctcctctgaaagtgataaggtcccagaggcccaggatggtgctctcctggggtaaggagatgggtatgttaattttatccatcttttagtgcttagccagagcttcccgtctgagtgaaacgtgagtttctacgtaatcagaaggtaggggggtggcccacgcagctgtacatggttcagcccagccttgcagcccaggcttttccaaatctcttcctgaatccccaagcttagccaggtgtgggtaacactgcccagttttgccataggtgtccccactgtggcctataggacagccatgactttatagggaagactgatgatgaaggtttgcctatggtgtgtggcccccaccagattccttccactccccccacatgccccttgctcctaaggagactgccaggtctgttggaagctacccctgcagagtgtgtagtaggacgcccctgtctgatcccgggcaagtcacttaacctgtctaagctgcctccccgggagttgacgctgaatgtcgtggaacggagcctgtcacgtcgtgtgctacagaagtgttagcgtgtacgtaaatagggacccagaggagtgaaaccatgtcatatctgacccaccaactgacgggattgttgtgggtatcaacgaggcagtgaaggaaagtgttgtgtttgccttggctcctcccactttgtttggtgttgggaatgttactgagcgtctctgggcctcagttataccacctaaaatggagataatgccagtgcctagtttatagggtcgtgaagactaaataaagtgatgtccacaaaacactaacaccaaacctggcccacagtgctcactaagtgtcaggttgattattcaggtacaggaagctttagagaagtagcacagtttgtcaaccacctttggagataccacagaatggttacatgacttgcccagagttgcctgctggtcgattcagggctgatacccagatcttctgacttttactgtcactctcagctccttgatttctcccaagtactgaggagtcagaaagctagcctgtcatttgtttcccttgctcccaggagtgtggccatctggggccgtgtggtatttgccactcaggagacatgtccctatgacatagcagtggtgagcctggaggaggacctggatgatgtccccatccctgtgcccgctgagcacttccatgaaggtaaaggacgaagggcgcagcctgaaggagggcccctctgagctagggtgggcctcaggaaggagaatcagtgttgggcattctcatgaagtcagggtagcattggtcaaggtccttggaggcctgcctccctttttgtgctggtggggcacatggagtgccctgggaaggataatgctgcacgccctttccccgagtgcctgcagcaatgtagtgtgaggatgctgggcctttggggttccttaacacttcaggctggtcagagaggcatgtggcactttcaaggctccaggggcacgatttgggtaaaaggctttgtgatgctgccacataagtactgatgttgcactccatggaggcagtgtgatacagtgatgaagggtccaggggctctggatgggcatctttcctatgccacctattagtcccatgtccttggacaggctagttaactatcctctgcctcattttccacgtctttgaaatggggctaatgcatcctatttctgggtgttgtgagggctgggtgtgacgttgcctgtaaagcacttacccccataccctgcacttggaaaaggaaggtcatggctgcattatagccatcatcaccatttcttttcacgaagagacttcttaggagttccaggaggagatgggtgtgaattccacaaacatttattgagcatgtaggtaggtgttaggaactcctaaaagtcactgccccgcctgtccagggaacaaggactagggaacagcctgttgctcagaagtggtcatgcagatacagtgctaggagctcagtggagttctcagcctcttccagccaggggacatggggaaggctctctggaggcaggagtatctgagcagaaacttgaagggtggagaggtttggaatgtttggagagggtagggatgggagttagggagtgtgagtcctgctgtaacacaggtgtccccagcttcaccctccttccttccctggcaggcgaggctgtgagtgtggtgggctttggcgtctttggccagtcttgcgggccctcggtgacctcaggcatcctttcggctgtggtgcaggtgaatggcacgcccgtaatgctgcagaccacgtgtgctgtgcacagcggctccagtgggggacccctcttctccaaccactcaggaaacctccttggtaaccagctctttggccccctcccgccctcccacttgccagaacctcagtcccaccccatgagtgcttgtggccagccccagtgcaccctctgtctgggaaaatggtgggcattatgagtgagctagcgaaggtttgcaggctgttctcctgatggtggagagggacggatgctggactgggaggaaagagatctgggctctggtcccttctctgctactaatctaatctggtttgatctgtgaaattgaggagttggattagtcaaagcgtcacagactcaaaagccaacagaggctggaaagataaagcaaatgaatgagaagacaacagggaggggaggggaggggtctaaactgaagcgcactcgactcagctgctgcagactgtggccatgaaggaggatgggcctaacgttggctggtattctaatattttcacaagacatgtaaagcttttttaaaaaaatacatgtggccgttaaatcgatcaatttttaaattttggtaacattcaggtttttaaaaaacagtctgtttagctgtcaaaaagaaaaaaacatgagttcatctagaaacctccaactccagtccagtctaactctccttgtttcttctttctcctgtagtgaaaaaccttgctcttgttgtctacaatatgtttacttatctgttccatcctagtatacaagtaaaattgtatttgcataactttagtatatttcctctaaatatttagtacttacaaagaggaaatattggagccgtaagtaatatttagagccataagtctaggcctggtgtggtagctcgtgccagtaatcccaacacttccggaggctgaggcaagaggatcacttgaaatgggagttcgagaccagcctgggcaacatagtgagactctgcctctatttttatttaaaaaaattttttttaattaaaaaaaaagaaaggaaaatactaagtctaccttggagaggcctggcagataccacctcagccaagtgatcaaggtgaacgtcagaagtactccatacagacatcagatagctgagacactgggaaggacacatggcttttatggtattcttcccaataatgtgtaaccttaaacaattaaaagtaatggcaaaacaattaaaagtaatgacaaaaaccgcattcatttttgcaccaacccaatagtcatgagaaaacattaggtaggcctcaattgagggtcattctctaaaatcactgacctgagccagacatggtggtatgtgcctgtagtcctggctctgcaggaatctgaagtgggaagatcacttgagcccaggagttcaaggctgcagtgaactatggtcaccattacactttagcctgtgtgacagagcgagacccatctcaaaaaaataaacagtgtttatttaaaaaaaaaaaaaaaaaagccaggtatggtggctcgcacttgtaattctagcacttttggaggccagggcgggaggattgcttgagtctgggagttcaagaccaagctggacaaccatagtgaggccccatctctacaaaatattttagggaggctgaggcgggagaatcacttgagcccaggaggttgaggttgcagtgagctataatcccaccactgcactctagcatgggtgacagagcgagaccttgcctctaaaaaaacaaaaacaagaacaaaaaaaaaaactgtaaataaataaaataacctgcacttttaaaaatgtcaaggccacgaaagataaggaaagactgaggaactgacccagattggaggagatttgggagatgcgacaactaaatggaatatggagtcctagactggatattggaactgaaaaaggacattagtggaaaaactagtgcaactcatgtcaatgagttctgtagttcacttaataacagtattctaccaaggtatatgttttggttttgataaatattttttggtgacattagatacgaacataaaggaaagctggtcaaagggtatatagaattctgcaatatttaggcaagacttctgtatgtctgaaattatctttaaaaaactacacacacatccatgcaccgagcaggccaaacaaaatatgtctgtgggtctgattcattcattcattcattcattcattcattcattcattcattcattcaacaagcctttgttgcgcgcctacttggcacaaggcactgtttcaggtactggggagactgcatgaacaaaacctcaaagtcctgcccttatggagctgacactaggtcgagagaaagataacaagtgaaataagtgaactatctagtgtgttagattttgagagtgttaaggagaaaacgtaaagccaggaaagggtgtgggcagcaggtgttcatgtctagaagctcagcgtctgtcaccacgtggggtggtatccagccctaccaggccctgggggctccagggtggagatggtcctcctcccttctccagcctttctgccccctggctcacatcctcttttgctctctgactcctcaacaggcataatcaccagcaacacccgggacaataatacgggggccacctacccccacctgaacttcagcattcccatcacggtgctccagccggccctgcagcagtacagccagacccaagacctaggtggcctccgtgagctggaccgcgctgctgagccagtcagggtggtgtggcggttgcagcggcccctggcagaggccccgcggagcaagctctgaggctgtgttaccacctttggaaagaagagtgacctttttctgctgtaggaagtgatgttgaggtgacggtggcctcaggattcagggcccagcccctgcaggggcccaggctgcctctcatctccacccactgactgcagactgggctttgggctctggggcaaacttctcttcagccccatggatccttaacctggcagcccgttttggggtgctttcttgagcccccagttctctgtcccctagcactagactcagctgtattgtttttccttctggggagcccactccaactgcacagaagttctgggcctgacaggtagattccagctggaaggcaggcccgtgcctggttttgcgtctgttcccctgagggccatcgtcatcctggagcttcaatggggccttggctcctgtctgcctctcagtcagagtcagggctgacaaaggactcagcttccttagcatctcagcagaaaccttgctctgaagaccagagacagaagggacagaaacaggagtgcctcctgctgtgccaggcccatgggcagtgcaggcagatccctgaaggtcagcactcctgggtcttcatatgccaacaggggcgctcttgacactgtgccttcattttccagcccacagcctgggtctcagggatcttgaggggtagaacatgtctggttggggcttgggaataaacatgatctattgaaaaacctctgtatttatatatcaaattgtttctttttttcaggagttgaactgggaataggcaagtaccaggcaaagaaacacaccctttccttttttttttttttttttctttagagctgtggtcttgctctctcacccaggctggagtgcagtgttgcgatcacagctcactgcagcctcaaactcctgggctccaggagacctcctgcctcagcctcctgaatagctgggactacagtcgcgcaccaccacgcctggctaattttttatttttgtagaaatggggtattgctttgttgcccgtgctggcttcagccttctggtttcaagcagtcctcctgcctcagcttcccaaagtgctgggattacaggtgtgagccactgtgcccaacccagaaatacaccctttctgtgctgttttctcagcagggtgtgagctcacgggatacggtcctgccagactggccctcatagctggtcatgtgccagtcagagctgggtggggcttgcaggtcccggaaggtggtggtcttgacctggcagcagatgcttaaagaatgcctaaggtgggtggcagttggggagttcaagggtgaatgaggccagggcagcccccaggagctgaggccaactctttgagtcaggactgtgccgtgtgcccagggccttgcatgtgtgggccctcgagtgatttctactggcaggctgaaagccctgtgaggggcggctgtgggcggaggccacgcaggaagagtgcttaggagtaacttgtttctaacacctgtgtgctgagtgccaatgctgggtgtggtgttatgatatatattggttttcatccagcattcctgactcgtaactctcatagtccttgttccagtctttgttagaatactgggtatgttagggcttgggacaggcctctgacctctgggtatcctttcactaatgttcgcccacctttttcacagtgggtcctaaagaccttcccatgagagggtctcaatcctaggggaaggaatgttgatgtcatgaaccttccataaaaacccaagaggacagggttcagagagcttctggatagctgaacacctggcacttcctggagtgtggcgtgcccagggagggcacggaagctctgcactccttccccttccctcattccttgctctatgtgcatctcttcatctgtatcctttgcgatatcctttataataaaccggtaaacataagtaa

SEQ ID NO: 8069 - DNA, 360 bp, Homo sapiens
cctggatgcctgtgtgaagggagacagcctcataaaccagtccactggcctggaactcatgccctagcaagaagtgcacttctgttgtatttgagccattacatttggaatctattggtcattgcagcagaacttaccttcattaatatagcctctccctagctgggaacactataccaaatcatgtgttgggggagagaggaagaaacgaggatattcctctcttctttgaagcttacaaatttcgttggaactacgtatggaaaaggagaacatttaccaggctcttcagatctaagagttgcctgttcttcgagtgggcatactgcctctgtttctctgggctcctgagatgaccca

SEQ ID NO: 8070 - DNA, 6107 bp, Homo sapiens
tggctctcccggcaggcaggctcctgcagtaactcttgagctggctcagggagcgcacttccttctcagccagcgcgtcgccccctgcatccgtggcctccactggagctgggcaggaccctacccagtgaatctggagaaaacaaacttgggagacagacgaaagcttagggcacattggaggacagcgcagctgtggctcccatttttggagatgcagtcgaatttgagctcacagggaggtgtggttgcctcctggggatggaaaggcttcctttctccacctctgtaactggtgcttctgagaagtaaatggtatttggatcctgacctcagacgcgaatttgggtcttctgtgcttaggagcagaaagagcccaggaggggcctgttcctttacttcttgggggaaacgcaatgcgtggcctgacttctcatgacgggaaaggctactccaccttctctgtactcctggaggggagtcttgttcacatgtttaccagcggccaggacaaggaagagaaaaggtattgacattaagaggatggtttgctgaggctgtgaaacttgaacgctattagtcagtggaacctgcctggcttagggaatggctgcagcagaatcgagacgtttccgaggttctcagtcatgtttcatttgggctgctgttcttttttctgtttaaatcaaacttcaggttacgtcatgacttctgcagggctgtccttggttcctactgcagggcgcctgtgtggttgggattccttttctgtttcaagatggagctgggttccacccttggagctttgagaggctttagcagttgctgtcctgtaatacctccgttcccaagaaataccgttcacatttcgcttctttttcacactttgaataggagttaaaatgtgctttctgtagtgtttggaaaatggcaaagatatattgtaatgtgagcccgaactgttgttgataaatgtataactattgctaggtcaagaaattgtgaacaacagtgttttgcttggtccgtagctatattgtgttaaatataaactgagtttactgcccttggatgtgattctttggtttgatttagtaatttgaaaggcattggttgactagactgttttttgcccaaggaaccactttgtaattgttacgctgcttactgaagtaaactggaccatgcagtaggcatacagcatacagccagggtgttttggcaatgctgagcccactgttttacaagtgacataaaatggatgtcatatgtacaaagaatctactgagagggaaactggattacaggagagctcccttatagtcctttgtcaggggacagaatacctgggtcacactgggcttcagattgagagttgattcatgttctgagtccatatgatgagacacattacgatggaattgtcacttttgttgcctctggaactttaaaatacccgtttagtgacgtggaattaatctttattttttccgtcaccctcagccctcatttaagctatcagttggtaaccacttgggtaatctaaacctaagttgcatttatttggtcacattggtaaccaacattgcttcttaaaagttccttgcaacagaatgactataattgagataaaacattaattttgaggctttaattttgtaatatggattagtggccgggcgcagtggctcatgcctgtaatcccagcactttgggaggccgaggcgggtggatcacgaggtcaggagttcgagaccagccatggtgaaaccccgtctctactaaaaatacaaaaattagtcgggcatggtggcgggcccctgtaatcccagctacttgggaggctgaggcaggagaattgcttgaacctgggaggcagaggttgcagtgagccgagatcgcgccattgcactccagcctgggcaacgagcaaaactccatctcaaaaaaaaaaaaaaaaaaaaaaaagaaagattatggcttagtagagttactaggagtgcagtcttaggacattgactgatcttttttttcacccccaagacaaatagtggcctgccattttccagcccaggtagcttcctgggaaaagttgcttgttttatctttgactcagcctggctagttacattgtcgattatttcttccagatgatatttacctgttaaataatgtttattactctgctgatgaatgttttcagcaacgctggagaaccctaggctgcaaggggttcttcacttgttgactccatcccccacccccagtatggcatatatctctgccgtgctatcatctttattctttcctttttcattgtctcttcctgactgtcctcctttgttcattatgtctgacacatattgtggattgaaagtagaacagaaagatatactttctctaccagactaaaaagttttgagatggccctccatttctcccatgcctcacttcaccttagttgtgtttttatttatttttatattttcgccaccttcactagcgagtacatcccctcactcttgaggtgggcactgatcagtaggaaataagattaatacctggctggtgataatttggggggaagacttaattagatagagatggataatgggatggcagcagacctttccccttgtgacccttcccctcatttccaaaatacacctctagagtagataattgcttaccattaagaagagttaatggaaggtgatactctgattctttggcattggaactacattcaatccgcggtatcctcggattagttctaggacccccttctccataccaaaacctgaggatgctcaagtccctgatagaaaatggtgtcatatttgtatgtgcatattctcttgtataatttaagtgatctctggattacttaatacaatgtaaacaatatgtaaatagttgttatagactgtattttaaaaattttgtattctttataaatttttctgaatattttcaatccatggctggtgaagtcctcggatgcagaccgtgtggatacagagtgccgattttatacaggagttcacctgtaactccctgtacctatcaacagctgactccaaattagaaagaaatagagtaagggagcctcagggagagtcctagcaaaacggattcgattaaacttcagttccttgtatagtttctttagttgtttatggtccattttctattttagcatttattattctatgtagtctatccaaagacgattaagggagttccacatgttttccggaacattttgaaaagagagcttatccagtgtacagatcctaataaagtgcacattcagtgtaattttatttttttaatatcttttttaatcctatttttcttcctcttttgctcagtaaattttgtatgaaactttaaaaggacttatggcatgtaaacattatttataaagtaagtcatggttataattatttttctcctgcctccttatgtatttatttcagaaatgagccgtcagactgctacagcattacctaccggtacctcgaagtgtccaccatcccagagggtgcctgccctgactggcacaactgcatccaacaatgacttggcgagtctttttgagtgtccagtctgctttgactatgtgttaccgcccattcttcaatgtcagagtggccatcttgtttgtagcaactgtcgcccaaagctcacatgttgtccaacttgccggggccctttgggatccattcgcaacttggctatggagaaagtggctaattcagtacttttcccctgtaaatatgcgtcttctggatgtgaaataactctgccacacacagaaaaagcagaccatgaagagctctgtgagtttaggccttattcctgtccgtgccctggtgcttcctgtaaatggcaaggctctctggatgctgtaatgccccatctgatgcatcagcataagtccattacaaccctacagggagaggatatagtttttcttgctacagacattaatcttcctggtgctgttgactgggtgatgatgcagtcctgttttggctttcacttcatgttagtcttagagaaacaggaaaaatacgatggtcaccagcagttcttcgcaatcgtacagctgataggaacacgcaagcaagctgaaaattttgcttaccgacttgagctaaatggtcataggcgacgattgacttgggaagcgactcctcgatctattcatgaaggaattgcaacagccattatgaatagcgactgtctagtctttgacaccagcattgcacagctttttgcagaaaatggcaatttaggcatcaatgtaactatttccatgtgttgaaatggcaatcaaacattttctggccagtgtttaaaacttcagtttcacagaaaataaggcacccatctgtctgccaacctaaaactctttcggtaggtggaagctagacacatgaaggtaaataaaaagaaaggctgttaaatacaggaaacagttgcatgtagtaacactaatatatttaaaaataagtcaacagtaaaccactgaaaaaatatatgtatatacacccaagatgggcatcttttgtattaagaaaggaagcattgtaaaataattctgagttttgtgtttgttgtagattgattgtattgttgaaaaagtttgtttttgcgtgggagtgtgtgcctgcgtgggtgtgtgcgtgtttgggtttttttcctttaactgacaagccatcttgagtggtcatgggccactgcttttccctttgtgagtcaatacatagtgctgctgtgtgctttttttgtgtgtatttgctaatttttattaattttagtttttcattaaataaatttgacttttctgtaattcaggtttttcctttttttgtaccattttaaagttagtatcttttgatatgcatatttgtttatggtaaaaaatttataacgtgttcaatattttcttttcccccattaatcagttcattagaaatattttaaaatcagctattttgtgaagccatgagttccagaaagtaaaggtgacatcggaaaaataatcaaaagctatttaaagcatctataaggtgctctctttctgtcttctacagatgagtcacacctttgagcttaatctttgaaaggttagagaataaattgatttttataaatactgcaaatcaggcttttgtttcctttttcagatatcttggacaaatcacatattttaaaatttgttcttgtatttattggttttgcagaagaaggcatcgtcatgcacagtatttgtaattaaaagcaaatcatttgtttaaaaaggcagtttgcaaaaaatgtttttggtcttttataattctcattaaaagaatatctggcaaattaaaaaaatcttactgtgtctgctttagctctaagtttgataaaatccgaagttattttcctgtttcattccatactttaattatatagcagaaagctgtgtgttgtcatttttaagtgcggtagacttaactctaatcacagcaaataactgggtatatggcctctggattagtctttcccatgccctgcccctcttgcccacattttgattcttacaactgtcaggagaatgactaaaatgctgaccacttttcacctctttaaaaaagcacaatgatataataaattcactatttcatagcctagtggctaagagccttggttctgcaaccagacttccaggcacctaagtgccagtctcggctctaccccactaaccagctgtgtgaccttgggccccagtttcctaatgtgtaaagtggggttaaattatggtagatacttaaaacctttaaatggggtacaggtatgttacctgaaacagtgctttgctcatatcagcatccagcgaatgttagctaccattatgccttcagtaccatgtagttaactgttgctaattactttgaggcacatggcaagattctgaaattgccttctgaatggtgaaagagaattttgtgtggtttttatgggtactgtaagcctagaaagtcaatgaaaatttgggcttcacccttatcccaccactgattctggataattttggataagagtttatttctgttatc

SEQ ID NO: 8071 - DNA, 353 bp, Homo sapiens
gtgcagtggcgtgatctcggctcactgcaacctcggcctcctgggtttaagcgattctccttcctcagcctccagagtagctgggactacaggcacgtgccaccatgcccggccaatttttatatttttagtagagacggggtttcaccatgttggccaagatgttctcaatctcctgaccttgtgatccgcctgcctcccaagtgctgggattataggcgtgagccaccgcgcccggccttgcgtagccatttttatggtgaaagagaacaacagctcaaccacagatttatattcaagtctgttcattagcatgtgtgcttggaaaaagtgacttttattccatatttaat

SEQ ID NO: 8072 - DNA, 120 bp, Homo sapiens
taagaaactgccgatattcgactgttctgacctaccgaaaatagcgtggttccacctaattttaaactggtggaaatgctgaggaaggttcgatgtcgctggggtgggatggggtcaacg

SEQ ID NO: 8073 - DNA, 607 bp, Homo sapiens
gctccagctcggcctttgggtttgctgtggtgtccttgtctcctgcaggaccggccgcagcatggacgctcccaggcggtttccgacgctcgtgcaactgatgcagccaaaagcaatgccagtggaggtgctcggtcacctccctaagcggttctcctggttccactctgagttcctgaagaatccgaaggtagttcgccttgaggtttggctggtggaaaagatcttcggtgagtggaccaagaaggggcagcccccatgcggcttctttctgccacccatacccacagcccacatattctggctgcgttccagggcgatcctcaccagtagccaatgccctctggctgtctcctccttccaccttcccctcccaagacccccgggagccaccggtccctcacagcctctctgctacccgcgcaggccggggcggagaacgcatcccgcacgtccagggtatgtcccaaatcttgattcacgtgaatcgattggaccctaacggcgaggctgagatcttggtatttgggaggccttcttaccaggaggacacaatcaagatgatcatgaacctggctgactatcaccgccagctccaggcgaaagg

SEQ ID NO: 8074 - DNA, 607 bp, Homo sapiens; identical to SEQ ID NO: 8073

SEQ ID NO: 8075 - DNA, 607 bp, Homo sapiens
gctccagctcggcctttgggtttgctgtggtgtccttgtctcctgcaggaccggccgcagcatggacgctcccaggcggtttccgacgctcgtgcaactgatgcagccaaaagcaatgccagtggaggtgctcggtcacctccctaagcggttctcctggttccactctgagttcctgaagaatccgaaggtagttcgccttgaggtttggctggtggaaaagatcttcggtgagtggaccaagaaggggcagcccccatgcggcttctttctgccacccatacccacagcccacatattctggctgcgttccagggcgatcctcaccagtagccaatgccctctggctgtctcctccttccaccttcccctcccaagacccccgggagccaccggtccctcacagcctctctgctacccgcgcaggccggggcggagaacgcatcccgcacgtccagggtatgtcccaaatcttgattcacgtgaatcgattggaccctaacggcgaggctgagatcttggtatttgggaggccttcttaccagcaggacacaatcaagatgatcatgaacctggctgactatcaccgccagctccaggcgaaagg

SEQ ID NO: 8076 - DNA, 974 bp, Homo sapiens
gaatagggctacctggagcaaaccctggctccgtaggagtgatcctggggtttcctggctgctggggcggcagtctcgccctcccagtcggcctgcggttggtgggtgggggagggggcggttctcgctgccacggatccagaaggccaaattgaaccctcgttctgggatttctggctcctactcccgcaggccgcttgggtgactgtccttttttggagaggatatagagacacagctgtggcctctgcacactgctcttcttccaggctcaggaaaggccctcgcccaggatgtcgccactcagaaggccgagacccagcggtcttcaatagaagtccgggaggccgggacgcagcgttcggtggaggtccgggaggccgggacccagcgttcggtggaagtccaggaggtcgggacacagggttctccggtggaggtgcaggaggccgggacccagcagtctctccaggctgccaacaagtcggggacccagcgatcccccgaagctgccagcaaggcagtgacccagcggtttcgcgaggatgcccgggacccagttactagattatgaaggcatctcaggccctggagccagagccagtcaggggttaaagtgaaagcccgtatttccgcccagaagctggggttggggagaggatgtggattttttgttttaccctttctgttgcatggttgcaaacacaaacttgagttctaataaagaattgcaaagtggaagcccgccccccgcctcccccccgcctcacttaagtccaggaagctggggtggcgaggaaggatgatgtggattgtttttgttttacaccttctgttgaatggttgccaacacaaacttgagttctaataaataattgcatttccctaacgtctgtattttggaaggtagaggggagggaaaggcgcattcctccaacagcccagttctgccctgcgcagccctctacctcgag

SEQ ID NO: 8077 - DNA, 974 bp, Homo sapiens
gaatagggctacctggagcaaaccctggctccgtaggagtgatcctggggtttcctggctgctggggcggcagtctcgccctcccagtcggcctgcggttggtgggtgggggagggggcggttctcgctgccacggatccagaaggccaaattgaaccctcgttctgggatttctggctcctactcccgcaggccgcttgggtgactgtccttttttggagaggatatagagacacagctgtggcctctgcacactgctcttcttccaggctcaggaaaggccctcgcccaggatgtcgccactcagaaggccgagacccagcggtcttcaatagaagtccgggaggccgggacgcagcgttcggtggaggtccgggaggccgggacccagcgttcggtggaagtccaggaggtcgggacacagggttctccggtggaggtgcaggaggccgggacccagcagtctctccaggctgccaacaagtcggggacccagcgatcccccgaagctgccagcaagggagtgacccagcggtttcgcgaggatgcccgggacccagttactagattatgaaggcatctcaggccctggagccagagccagtcaggggttaaagtgaaagcccgtatttccgcccagaagctggggttggggagaggatgtggattttttgttttaccctttctgttgcatggttgcaaacacaaacttgagttctaataaagaattgcaaagtggaagcccgccccccgcctcccccccgcctcacttaagtccaggaagctggggtggcgaggaaggatgatgtggattgtttttgttttacaccttctgttgaatggttgccaacacaaacttgagttctaataaataattgcatttccctaacgtctgtattttggaaggtagaggggagggaaaggcgcattcctccaacagcccagttctgccctgcgcagccctctacctcgag

SEQ ID NO: 8078 - DNA, 974 bp, Homo sapiens; identical to SEQ ID NO: 8077

SEQ ID NO: 8079 - DNA, 693 bp, Homo sapiens
atttaatgtttccaaggttagacgttcactttttgagacgcttgagtagcttttcacttaattgactagcatgtatgggtttctttacccaggtccacaattcactacacaggtccagaaaaaaagctgatctctgaaaagcactaggagaaggcagctagagagggagaattctaattaggccggggtcctctgtggcttgaatgactgaataagtttttatagtcttcaattcagtgactgccagattcttcccaaagaaatttctagagatcaagagtaggctctttcggaagtacttgcccgtattacactttaattttacaaaccaaacaacagcaattcaaccaatcaaacaacaaaaacaatccaaagaaagagacttggacataggcatcaaggaatcatttcactttataatttaatagaacactggtgtatcattcattaattctgaaagtgagaactaaatgtaaaataattttgtaaggtttgtgaattgttgcctaggtattctggtgatgtttactttagtgattttatcattaatgaaagcaatgtgtttttttagaaaacatattattagggttcataacgttgacattctgttgtgcaatcataatctcctgttttgttttagtcatagctctacagttgaatgaattcaaagctcacctccaggccttttgctat

SEQ ID NO: 8080 - DNA, 413 bp, Homo sapiens
aaaccactgtaacatacagccaaagaagatactttgttgactgaatatgggctttttaaactctcaactgtatttttataatatcacaatcccaaagttagactaaataatgaataacacggtcaggcatggtggcttgcacctgtaatcccagcactttgggaggccgaggcgggcggatcacctgaagtcaggagttccagaccagcctggccaacatggcgaaactccatctatactaaaaagtacaagaattagctgggcgtggtggtgggcgcctgtaatcccagctactcaggaggctgaggcagtagaatcgcttgaacccgggaggtcgaagttgtagtgagccgagatcgtgccactgcacttcagcctgggcaacaagagcgagactccgtctcaaaaaaaaa

SEQ ID NO: 8081 - DNA, 436 bp, Homo sapiens
taagttgcccaggttaggctcaaggatctgcccgcgttggcctctcaatgtagtgggattacaggtgtgaggcactgggtgggcgcacccttcttaagatattccagttgtatttgtgagttccccctgtgtccagagtggcacggggcctgggccgggacgggaggtcgcagccatctcagctcagcccctgcagcagggatcacaaaggggtggccctgaggctgatggtccccagggcagggtgcagggaggagggactccctcagttaattgttacacaggtccagagtctggcctcccggagggagagcgatggggcaggagctggcaggggaggggcaggatgcccaatcaggtggtgccaggggcgggccccgctcccaggtctcaggcatcccccgcccggggaccgcctgtgccttatcacggggag

SEQ ID NO: 8082 - DNA, 6140 bp, Homo sapiens
gcccacaccaaacctgtggacgccgacccgggaccgccgctggctggctgctggctcactcgaccgtcatggagaccctgggggcccttctggtgctggagtttctgctcctctccccggtggaggcccagcagggtaggtgcaggggggcgggagggggcgtcgcgggataggggagttggtcaggtgatcaccatctcccaattttccatggcgagaaaaaggagagggggcaggaagaaaaggaagagtggcttggaggcccttctcaacccccgcagtaccgcccggcctccctctcgctgggctctgccctcctctgtaagggaccccccaccgcccacccgagcctttcccctctccagcccttctgagcacacctggctgaaccccccgccttgagctcggccccactctgagctcgggcctcctttacaagcccctccccatctgagtccccgcctcttttgtgaaccgctccttctcactcctcctcctttataaacccctccccgagcccctcctcctctgtaagcccctcccctctgggctcctccttctttataagcccctccccctgagcctctgcctcctctataagcccctctccctctgagccccctagttcacaagcctctccccatccgagccccttcctcctttgtaagcacctccttctcactctccctcctttataaacccctccccgagtccctcctcctctgtaagcccctcccctctgagctcctccttctttataagcccctccccctgagcctctgcctcctctacaagcccctcccactctgagccccctagttcacaagcccctccccatctgagcctcttcctcctctgtaagcccctccttctcactcatcctttatagacccctccctgagcccctcgtctgttgtaagcccctcccctctgagctcctccttctttataagcccctcctcctgagcctctgccgcctttataagcccctcccactctgagaccctctccccttataagcacctcccctctgagctcctcctttataagcccctccctctaagcctctgcctccttttataagctccccccaacagctcctctgttgtaagccccaaccccccagactcttctttataagccctccccatctgagccacctcctccttcataagcccctcccctgagcttgttctcctttataaaccccacccctgagccactcctttgtcataagccccgcccttctgaggtccgcctttataagcccctccccctgagcctctgcctgcattataagccccgccccttctgagccctcctgatttgtaaactccgtcccctctaagccccccttcttttataagcccctcccctctctgggcccccaggctccctcccactctggtaaggtaccctccccctctctaaaccctcccgacccccctacgccatccaggtctctgaagctccgtccctttccaataccccctctgtcggagcacccccagtgaccttctctctctccttgctagggtggtgggggaagggggtcttctgaccttttcttcctctgagtcgaacctccccaacttcctgcagccacggagcatcgcctgaagccgtggctggtgggcctggctgcggtagtcggcttcctgttcatcgtctatttggtcttgctggccaaccgcctctggtgttccaaggccaggtgggtgcccgcccccaccccgctgcccccacagccctgcccccacccccagcttcccaaccctctctggtacccccatcaccagcctcaaagtccgaaggtctcccatttccctgctgctcctccaacctctactctcagagcccagatcccgggcttgcacccgcccgtctccccaagacaacgagccaggcagcccagcccttccttgcgtcctggggttcatgagccccggctgggaggttgggacagaggctgaggctgtcacaccgcttccttccctttaccgccccctttctcctctcccgcccccttccacctttccctttatctctgcagggctgaggacgaggaggagaccacgttcagaatggagtccaacctataccaggaccagaggtactatgcgtgcggatgctgggggtctgtgtgaacccctcctcggggtgggggaatgggtgtgcgcagatgaccttgctgtcctgaatccttcaaacacattcctgccctgggatcttcacctttcctgtatcttctggcagctccttctcctcctccagtccctagtcaggggtttccagcctggccaccagccttcctgacactgtccccagccccaagtctgattcatgcttatcaccagtggagctgtcttagttgttcactaattttgagacattacgtggtgccttccagttgtgtaggcaacttagcttttgtcctggctgtgtcctcatacccagcattgggcctggaacacaggaggtgcttaataaatacctgttgaagaagactgtggtgtaggattgtgtaggtgtctgtacaaggcctaggtatgggcgacccacctggactcagtgcctcctatggctctgactgcctcccaacctgaggattcccacagaggactcagggatgcagacctccatcttccatccacccatcacccactcatccacccactcacccattcatccactcacccattcacccactcacccaccatccatccatccatcatccactcatccacccactcacccattcacccactcacccatccacccactcacccattcacccactcacccatccatccatcacccaccatccatccatcacccaccatccatccatccatcacccacccatccacccactcacccatccacccactcacccattcacccactcacctatccacccactcacccatccacccactcacccatccatcacccattcacccactcacccatccacccactcacccatctacccactcacccatccatccatcacccaccatccatccatccatcatccatccatccatcatccattcatcacccatctgttcactcacccagctgcccacccacccatctattcacctaccacttatccacccactcacccatccattcatcaccccccatccattcatcacccatccacccatcacctacccatccacccacccaccatccatccacccaccatctgtctatcatccatccatccatccatccatccatccatccatccactcacccatcccccaacccatccattcaccaacccgtccacccactcacccatccattcatcactcatccatccatcacccacccccatccattcatcacctacccatccacccacccaccatccatccaccgaccatccatgatccatccatccatccatccatccatccatccatcacccatctattcactcacccaccccccgacctatccattcaccaatccatccacccactcacccatccacccacccactcatctgttcacacacccatccatctacccacccatctatccatcagccatccattcaccatccatccacccacccatctattcatccacccatcaatccatcatccatccacccacccacccatccacccatccatccatccatccatccatccatcacctatccatccatcacccatctattcactcattcatccacccacacagccatccatccacctacccatttatccatccatccatccttccatccatccatccatccatccatccagggctgggggctctgtcttgggcaaaggcttggggacaggagtaggagagtgggagctgggaggtgaccagcctggctgggagagtctcagctgagtccaagatgtgcctgagggagaggacctgagtggtggctttgtctaagacctggctcagccccagtaaaatatgattcctactcccaggatgtactgggggatctggatcccacctgtgcacctgtacctgtagcttcctttctgccttgttcaatcctccatccatccacccaaccatccacttgtacatccatctatcagtctgcccgtgcagtcctcaccctccaaccacccatccatcagtccacctacccattagcccattgatctgtccactcactgatacacgcacccacccacctatgcgtccatcgaactatgcagtcttcactctccaactgtccatccatcagtctatctatccattagctcattgatccatccacccacctacagtctcattcatcctccatctacctatccattggtatgtcattctcttcttcctccaattcatccattcatctacttattaatctgtccctccctccatgcaaccatcaattcacccaactgcttatctactcatccatccatccacctatacattcattcattgatctatacatccatctatactcccatccacccattctccattctgcatacccccatccactgatccatcagtctctccttcctgcaatgtattcatttatcttccaattcatttattcaacctccatgcagcagtccattcatgtaactacttatctactcatccatccacccacccatccatccattcatccaccaacccattcattcatccatccacccatccatctatcatccttccatccaccatccatcaatcacccagccatcatccgcccacccacacactcactcatccattcattcgccaactcagtcacccatctgttcacccacccattcattaattcatccacccactcatccatccattcatccacccattcacttatccacccacccacccatcaattcacccaccatccatccatcacctatccacctaccatccgtccacccactcaactatccactcacccatccacccacccacccattcatctgtctactcatccattcatcatccatctatccacccacccacccatccatccatccttccaaccactcacccacctagccatccacccgttcatccagtcatccatacccccatccatcatccatccacccacccactatccacccacctgtccactcatctacccatctattccctaacttctttacacacctacccacctatccatccatccatggagcagttgagtcttagttgcaatgatgatatgcagtgtgaacctccatatcatctgtccagccactgcacccagcctcaaaagcagcctcctttgccaggagtaaactgagtcccaagaggcaacagggagcctttggcttatgtccatccatccatccacccatccatccctccatggagcaattgagtcttagttgctgtctttgtgaaatggaaatcgtgaggccgcgtagttagggttattttgaagattcactgagataccgcttgtaaaatactcatcacatgggctggctcaagtgagtggccattaaataggagtgtctctgtttcttattatggtttggggcctttgtatccctacagtgaagacaagagagagaagaaagaggccaaggagaaagaagagaagaggaagaaggagaaaaagacagcaaaggaaggagagagcaacttgggactggatctggaggaaaaagagcccggagaccatgagagagcaaagagcacagtcatgtgaagattcctggctgcctcttccaggcagtcccccagagatgcctcttctgccccctaaaagcagtgccctggacttgaagcccgtgaaatgactccatctgggattcagaatacagtgttctcaagtgaagaaggcttggaacccaccccacctccctcattgggggctctctgggcaaacatggttttcatgcacccctcttcctgagcttggtccctgcctggtgattcttcttatactcggagagcatccctggttgaggagacacccgcaatcctccacgatctcatggctccacctgcttctccccactgcctgatttcttttctctctgcctgatgtctactgaacagaacttcccctctcccatgcacccactgccagctgagagctgcttcccaatggcctgcattaaagcattcgtaacagccctttggaagggctcctgtca

SEQ ID NO: 8083 - DNA, 3758 bp, Homo sapiens
tctagatctataattttattttgatttttctaatttgttctaatgattaaatactcttaagaaaggccatgggggatggctttcatttcgttccagagactccttcagcagtcgtcatttctgtctgggtgattgagacccagcccagacctgaatgcggacactaaaaagatttaaagactttgagagtcccccagctttctgaccctggcttttgtggagaggtctgggaagatgggagatagtgagctcaaagaaggagaagataatggcgtatgtcccacattttctcccagggtatggcagcctccctaatacccttataagctaggaagctcctaggatgctgtagctcagtcaccatttagtaatgtctggagagatttgtggttgtcctaagagtgggagggtgctgcaggcctctcctggaggccaggaatgctgctaaacaccctgggtcagcagtgcaagggtgaggaaccctgctctggactgttggtgctagactgttaaggggtttttaaattttgctttgttttgcttccctattgcttgtaaagaaaacagttaagtttactgtgtcatttattcatcgttacttctgtatttccagtcaagcttttgtctccagcattccagtgaaatgggttgatcagtctcttcttgaaacattttccggggtttgcttctggaataccactctcctttttctcatcctttttctttcctggctcttctgcctcttcctgacttggtggtataacctagggctcaggtctcacctctcagatgagggctctgagttcatacagccctttggatctcctggtttttttctgacagaatctgttttggttttgtttgtgttttgaatgatactaagggtaataaaaattcttatttgatatacaaatttctcagaagattggcatttagtattcagctttgctatgcttaattacttcattttcagaagaagtatacgatttataaagtatatgatatggaagttataaacattaacatcacataattaaagaaacatacccattttagagattgaagagggtgatttgtggcttcacaaaaatagaataatcactctagctaccattatttctttcatatttgaagtttttctatttctttctaggtttgtcaagggctatttaatgagttactagaaaatgggatttctgtgtggcctggttatttggaaactatgcagtcctcattggaacaactttattcgaagtaagaattgtattttcattaaagagtgtatttattcaagagtttttgattatgtttatgaattacagaaacaaatctcttctaaatttatatataaaatataattttaaattattcctcagtttcccttttacagaactatgtgcatttagttaattgcctcagcagggaacagtattcagcaagtatgtttgagcacatgctgtatgtagttccaagacttaatgtcatgaagtatgtatacctcagcttatccacttatggatgaaagtatgtatgtagagagcatgtgttgaatcaagactgaaggaatatgagtggaatgcctttctttgctggcattgtggtccattctgagactgagtggaagggaattctattctggagggatggtctgttctagtcttctaagggattggcacctctgttcacccaattgctcaagacagagaaactggctatcatccttaactcctccctcttcctcattctctacatccagtctatcatcaaatgctgtcagcttgcttcctaaatgtatctcatccatctctgtcttcgctgccactacccaagttagagtcaccaatatctcttgcctggattattgaaatcatctcctaattgagctctctgtgtctagtctcaccccatgctatttcattaattgttgtttttaaataatccattcttgttattttttttaagctttttgtgttgaatatgtatcttttgggtgaaaagttgtgaaccattgtgttttgatcttcagttctctgaacatttgttaaaatacaccttccaggctgggcgcagtggctcacacctgtaatcccagcactttgggaggttgaggcgggcagatcacctgaggtcaggagttcaagaccagcctggccaacatagcaaaaccccgtctctactaaaaatacaaaaaattacctggccatggtggcttgtgcctgtagtcctagctacttgggaggctgaggcaggagaattgcttgaacccaggaggcggaggttgcagtgagctgagatcaagccactgcactccatcctgggtgacagagcgagactccttctcaaaaaaaaaaaaaaaaaacacctttcagatgatgtccaaagaaaagtagttttctataattagagcatctaatggttttattatgtgtaaaatgaaggggcagcacttgaactttcttgtcctctcaggttctcaattcttatcctttgagccatgtggacattgtcaagttgcagttgttctttatatggtaaaggttttattgtcccaggatatttttatgaaattattattaaacacgtactatgttttattcactttgctatagtggtgaacaacacagaaaaatgtatcattctttttttttaagacagagtctcgcactgtcgcccgggctggtgcaatggcgtgatctcggcttagtgcaacctctgcctcccgtgttcaagcgattctcctgcctcagcctcccgagtagctgggattacatgcgcctgccaccacgcccagctaattttttgtagttttggtagagatggggtttcactatgttggccaggctggtctcgaactcctgacctcatgatccgcccatctcagcctcccaaagtgctgggattacaggcatgagtcaccacgcccagccatactattcttgttaagcttatattctagtaggacaaaatagacaataaataaacagagaaataaaaagtttctgatggagtcctacaaaggaaataaacagtaatgagatagtgtgacttggtaagcatacagaaggtcagccgtgcatctatctgtttggttattgctgaactagaagctataagctagctactcaataaaggaaacatgattttggtataatttgttataccaaattgcatctttattataatattgtttattgtaagagacttcagtctaaaataattgttcttggattgcatccaagaaccaaaaggctgaggttattatgcggttcttctgtgatatcaccccaaatgatgtgttgaggtaccagtgtttattctcagattttattttcttttatgacttttcagctctagcaataagttagaaactgtctgaaaatattactttaaatacaattcagaaactttaaaaatgttgggtttttttggtccacccttaagccctgagtctgtgactcttgagagtgcatgaacactgaattacagctggcaacgtggaggaatttattatttacatttgtgctcatgtgtctgtttaactacttttttcttaggtatgatgaaatgagtattctcttcacagttttggttactgaaactactttggagaatggattaatacatctgagaagcagagacaccacaatgaaggaaatgatgcatatatccaaattaaaagactttttgattaagtatatatcatcagctaagaatgtatagatttttatatttgtataataaatattcttctctcctaa

SEQ ID NO: 8084 - DNA, 155 bp, Homo sapiens
catgcctgtaatcccagcactttgggaggctgaggcgggcatatcacgaggtcaagagatcgagaccatcctggccaacatggtgaaaccccatctctactaaaaatacaaaaattagctgagcgtggtagcgtgtgcctgtagtcccaggtact

SEQ ID NO: 8085 - DNA, 7709 bp, Homo sapiens
ttttaaagcttcacgttatttatttatttactttaaagcctcactttaatgttaaaggtaaatgtaaatatagtataacaaggaagctcaaaatttgcataaagttttaagataaaataggagactccaaaaaagtgttactttcggcaggccctagggatgctatggtgggaagtttgagtcataccttagcattctttctaaagcattctgtcctaatcctctgtatggagaaaagccagcttcctggatgtaccccaaatcctgggaagtagggggcaggagctggactccctccaagcactaagggcaggcatggttgggaacagggaggtgagccagacagccagaggcgaacgggctggcatgccaagcgtcctagttaatgcccagctgagcctgggtgaagaaggatgggggtgtgggaagacaccccccaccaaccgccaaagacaggcgcacaccagccagtctctcacttccctttttatttcctctaagacttgcaagcagcagcaccagagagggaacctgccctcctggccctggaaggggccgacccccaacccctaacccaggacacagctggcacctcaggcccctttccttctgaaaggagggctgtgtctctctcacattcacacatacacagacacatgcatgtgtgcacactcatggcacatgggacctcaggggtagcctgtttgccgatccccccaagaggtaccaggaggcagaccgctagaaggagataagaggcaccctggtctcctccaacccaaggaggaagaaagctcaacccctctaggatagggactgtcttcagtcaatggagcgttgacttagggggcgtttttgaaggttttttttcctcctttttgcagtctttacaaaaatagaacttctcttggtatttataaatctacggccatggctctatgtgcatgttacaggtagaaaagccatatggggcactccttttggttgctcaggccttgattgcctgtcatccaggtcccttggtctgagaagtctatgcggtcacctcagagccgctaagcaccttcagtgggcccatcccattggcggcgtactcctgctggagccgggcacggtaatagaagaggtaggaaggcaacaggaatcccaggagtgagaatagcaggaggcccagattcacctttagggcaaggagagagaaacagagtcaagtaggtagtcatctgcccttagcctcccacagggaggagaaggcggccatttttctccaggtcctgagccagaataaatacagctagtacttattatgtgtagtcattgttccaccagtatctcacttaatgttcagcaattctgcaaagtggctgagatgagacttctcaggtataacaagtggcagggcctggtgggtgcccacaccatatggcactcactaggtaggtatgaggaaggcacagcactgtaggagtctgggctggtcaggctgctcccgaaatggggccttctgggctcacccctctgacctttggagatgttaaccaatgggatcccgttcagggtggcgagaggaggctctcagacacagttcaaggaactgggatgcacagcctggtggacagaaggcttggaaggcccaggacacgcgggctctgactcggttcacatcccactctgcattactcactgtgtgactttgggcaaataatggcaattcttactgagtgcctccttctcagggctgttgtggcgaagatgtaagttaaaaaaaagtatgcatcatgcttagcacatagtgagtgcttggtaaatagaagcagttatttcatcacaattctttgggaggagggtttacgtgtgggtggccccacagggccagatgaaagatcagcgtcagggaggcagatgagttcaatgtaaggaaaagacttactaacagcagcagggctgcctcgtgcaggagtgggtgccctaccactgagggtatctaagctaagagggaagggtcccctttcaggggtgctggagacaggatcccacactaggtagaactggattggaccaatggtgcctgaacacaggcccaagagtcaggactggccacttcacaaagcacctggagtttactaaaaacagactcctaggaggtcaggcactgtggctcacgcctgtaaccccagcactctgggaggccaaggtgagaagatcatttgaggccaggagtttaagactagcctgtgcaacatggcaagaccctgtttatctgtacaaaatttttttttaaaaaattagccaggtatggtagccatcacctgtggttgcagctactcagaaggctggggccggaggatcgcttgagcccaggaatcagaggctgcagtgagctgtgattttaccaccgcactccagactgggcaacagaacaagacaccttctctacaaaaaaaaaaaaacaataggcgccgggcgcgggggctaaggcttgtaatcccagcatttgggaaggctgaggagggcaaatcaccgaggtcgggagatcgaggccatcctggctagcaccggtgaaaccccgtttttacttaaaatcccaaaaaaaaaaaaaaattagctgggcgtggtggtgggcgcctgtggtcccagctacttgagaggctgaggcaggagaatggcatgaacccgggaggcggagcttgcagtgagccgagatcgcaccactgcactccagcctgggcaacagaatgagactccgtctcaaaaaataaaaataaaaataaataaataaataaaataacaataaattaaaaacaaaaacagactcctacggtcaggctgagatatcctgattcaggggactggggaatctgtatttttaacactccgtgaggggttctaaaaggcagacaacttggaaacctgcagattagagacctctgaggtgcctctggctgagatgagtgagggatggcaccacatacaaggccctacccctgccccccaggagagtggctcctgctccccccacaccaaccctcgctctcacccagaagggctctcctttcaggggtcccaccatcgccatgaaaagtggctgctgaagcaaggcgaacacagcactgatgagggactgcaggcctgtcagcgtcccaaagtggttggatgggaacctgtccacgagacggggagtatcaggggtgtgtggccctctccagcccaggccagcacctctcctatcccctccccaccatggtccccgctggccaggcagggtggtgcttaagcgttcgggctctttgcatgggctctttggtccccagccttgagggcaaatgctccaacttcagggccactgagctgggttctcacacctcctgtatgtgtgatattggcaagtggctcaaactccctgagccccacttcctccactaataacagggatggcattgacctcgcaggactgtccactgtattctgtcaacaaacatttagctgagaacctactatgtgccaggcactgctctaggtgctggagataccacgatcaagcaagtcaacagattcctgccatcgaggaggtggcattcccatggagcaggtggcggtcagacaataagcaagagataggcagagtgttagtgataaacgctgagaaaaaccaagcagagaagcgggcagtagggaggttgcaattgtacatgggacagccaagggaggcctcactgagaagaggacagtcagggaaagacctgaagaaggagagaaggtaagattgggcaccttgcagatatctggagaagaatgttctagaaacagggactagtacatgcaaagatgccaagcagggaacacacttgagacttccggagcactaggaagcactgtggctgtggcagagtgaacaatggaggagggggagctagaggggagtgaagtgctggggccagagcttgcagggctttttaggccatagtaaagcctttggcttttactctgagacagatgagacaggacaccacagagtgatgtgaagagacttatgtcctgacaggtgactgcagcccctgtgttaaaaatagactgagacagcggggccagggcagatgtgggagactaaaggctgccacaataatccaggctagagatgttggtggctaggactggagaggcagcagtggaggtgacaagaagggtcagatttggggtgtgtagaagctgctgctggctgtactgaggacggagtgaacatggagtgtgagggagagaaacatcaaggaaactccagggttctggcttgagcagatgaaggaaagagagctgccctctgccgagaccgctgcagtgaggctgaactcagggagtgatggtcaaggatcctgcctgctgcctgcaccaacggagcacttgataatggttgtcattttgtcatcattattgtaatgtcctgttactccatcacatacacaggggagagtccctcagcagcgcccagcaggggaaaccaggagagagatgcaagtggggactgtccaacatgaagaggaaaattataaggcaaatggctgcccttgggaaatttcttcagggtgggcatggaggggaggccattctgggggccgtttcaaacagcagacatagaaccaaagtgtcatcaagccaggtatttcagcttcctctaagggaagactccaacagggggagtcaattacagcaggataggctgcctttaaggaagtgagctccctgccatcagagggtctcagagagaggtgcattaggggatgcctggggccctcccaacccttccctggggttctctgatcacggttgcaaagctcaggaaggcatttcagcccaacagactcacactgcagcatagagactcccacaggctgagtggaagaaacctcgaacaatggtgtgcaggacaaaggtcacaaactaaaaccaaaaagagagagtgaagaggttaggagagtgtgtggaggctggaggaaggaggggtagggcgaagaggccaactgggcctcaattcccaccccctcgccaacccaatctactagaaacacttcctggagaacccggaaaatagatccagatcagaagaccagaactgcgcttcctggaaggcaggtgctggatggaccatccctttggaggagcctcgggaggcagggagaggggaaggatgaaggtgggtacctggaggtgtaagttgttgatgagacaggtgatgccaaaacccacaagcagcaggttggtcagggtgaaggcactgatggcattggtgagcttttggatcttgcagtagcgtggtctgatggatttggtagcaaccccgtccctgaggagtacgggaagtcactggctgctgcctctacgttcccaggactccctggttcttggcctggcccctcccccttcagatgtgccttcgatgtcagggcagcagaaaacacagaaatccatgtttctatgggaaacccatagaaacccacgttctctagctccatgtttctcaaagtgttgctcccctacccaatgacacacgcatcaaagcgggtgctttcttaacatgcagattcacaggcctcatctcggccctcagaatctcagcggggatatctgcaaatctgcatttggacaaatatcccccactaagtgattctcatgcacacttgaaggtttgagaaccaaggatgggaaggaaggtgggaagtgggaagctctcacaccgtctctcatcagaagtcctcaggaaggtgtccctgccctagacataagcagatgccctcctggggacagcagcttggcctgactgtccagcgcttcctctctccggcacaatcaagggcactgaggccagcccaggagagaggtcagtaggctggggtgaggacaggcggcccatgtgtcctggacagaagggccctgctaggggaccctcaccattaggagcagagggtagaggaggaaggctcagtgccagggccaggctctgctagcagggagggaggccactggatttccttctctcccagtctctttctcccatcctcttaggataaacagggactgtttggatgaacacaaaaagagcaaaagcagtcacagaatctgggttcaagactccatggtgaatcccagctactcgggaggctgaggcaggagaatcgcttgaacctgggaggcagaggttgcagtgagctgagatcgtgccactgcactccagcctgggcgacagagcaagactgtctcaattaaaaaaaaaaaaaaaaccctcaatggtggtctccagccaacaagacagccctcaaggatcctgcctcctggtattcccctgctttgtccagtctccttccacagtatatcagggttgctctgtgcctataatagaacgtaacagaagtgatggtatgctacgtctgagattatgtgagagaagatacggggtctctgtcgcttagccctcttgctcaagggaaagcaggtgctgtgtcctgagcagccctatggagaggccatgggggtaattgaactgacatagattctccaaccccagtcagcccttcagatgactgcagccctggctgacagcctgactatgtcttcatgagagactgtgactcagaatcagccggctgagtctctccctgatttctgactgtcagaaactgtatgagatgagaagtgtttgttgttttaaaatgccaagccttggggtgatttgttatacagcaataaatatctaatataccaactctacctattctagccctaacaagactttagcgtgtacccttataacacaggttctggaggctgccactgaaagctgtgtgatcttgggtgaatgacctaactgtgcaaccctgtacctcggtttcctcaactgcaaaatgaagatattaacgcatctacctcaaagaggtgttgtaggactaaacaaggcaaggtgccaagtgcacagtcagcactctgcattagctattcttattattaagcaagccaggtcccttcctagcctcagtttcctcatctgtaaaatggggaggtacccctgatctcctagggttcttgggagaaagcaacaagctgctggatgtaaacgcacagagaaaatgaaaagcactgcctgaccacttgctgtcaccatccctgtacaggcaggtcacctggcatctccgaggacagtgccctgagttggggcgtccacgcagtccttgatccgccagtccatgatgtagccaatgagggggcaggtgagaaggcacaacagctgcatggccccgaagacggaggagtagaacccaactgggcaggatgggaagggcagtggggtcaggaactggcactcagtggacactatcaccccttccagcggaggccagagagcaccaaaatagccttcctctgaacccagactcttacatcccacaaaagggttacctgggtgggcccaggcctagaggagtcccgccccctgagaagcgggttgcagtggggtgggcgtgagccagggccctgctttcatagccctacctgtctctgccaccttttgttgctgttcatttgtctctgtgggtagggaaacgtatggtgaggggagctcagccagggtgacccgcctgtgcccccaacccccaggggcctcagcggtgcctcaccatgctcctggccaccagtcacaaggtactccagcatcttgttcacagcag

SEQ ID NO: 8086 - DNA, 3160 bp, Homo sapiens
ttttaaagcttcacgttatttatttatttactttaaagcctcactttaatgttaaaggtaaatgtaaatatagtataacaaggaagctcaaaatttgcataaagttttaagataaaataggagactccaaaaaagtgttactttcggcaggccctagggatgctatggtgggaagtttgagtcataccttagcattctttctaaagcattctgtcctaatcctctgtatggagaaaagccagcttcctggatgtaccccaaatcctgggaagtagggggcaggagctggactccctccaagcactaagggcagggcatggttgggaacagggaggtgagccagacagccagaggcgaacgggctggcatgccaagcgtcctagttaatgcccagctgagcctgggtgaagaaggatgggggtgtggggaagacaccccccaccaaccgccaaagacaggcgcacaccagccagtctctcacttccctttttatttcctctaagacttgcaagcagcagcaccagagagggaacctgccctcctggccctggaaggggccgacccccaacccctaacccaggacacagctggcacctcaggcccctttccttctgaaaggagggctgtgtctctctcacattcacacatacacagacacatgcatgtgtgcacactcatggcacatgggacctcaggggtagcctgtttgccgatccccccaagaggtaccaggaggcagaccgctagaaggagataagaggcaccctggtctcctccaacccaaggaggaagaaagctcaacccctctaggatagggactgtcttcagtcaatggagcgttgacttagggggcgtttttgaaggttttttttcctcctttttgcagtctttacaaaaatagaacttctcttggtatttataaatctacggccatggctctatgtgcatgttacaggtagaaaagccatatggggcactccttttggttgctcaggccttgattgcctgtcatccaggtcccttggtctgagaagtctatgcggtcacctcagagccgctaagcaccttcagtgggcccatcccattggcggcgtactcctgctggagccgggcacggtaatagaagaggtaggaaggcaacaggaatcccaggagtgagaatagcaggaggcccagattcacctttagggcaaggagagagaaacagagtcaagtaggtagtcatctgcccttagcctcccacagggaggagaaggcggccatttttctccaggtcctgagccagaataaatacagctagtacttattatgtgtagtcattgttccaccagtatctcacttaatgttcagcaattctgcaaagtggctgagatgagacttctcaggtataacaagtggcagggcctggtgggtgcccacaccatatggcactcactaggtaggtatgaggaaggcacagcactgtaggagtctgggctggtcaggctgctcccgaaatggggccttctgggctcacccctctgacctttggagatgttaaccaatgggatcccgttcagggtggcgagaggaggctctcagacacagttcaaggaactgggatgcacagcctggtggacagaaggcttggaaggcccaggacacgcgggctctgactcggttcacatcccactctgcattactcactgtgtgactttgggcaaataatggcaattcttactgagtgcctccttctcagggctgttgtggcgaagatgtaagttaaaaaaaagtatgcatcatgcttagcacatagtgagtgcttggtaaatagaagcagttatttcatcacaattctttgggaggagggtttacgtgtgggtggccccacagggcagatgaaagatcagcgtcagggaggcagatgagttcaatgtaaggaaaagacttactaacagcagcagggctgcctcgtgcaggagtgggtgccctaccactgagggtatctaagctaagagggaagggtcccctttcaggggtgctggagacaggatcccacactaggtagaactggattggaccaatggtgcctgaacacaggcccaagagtcaggactggccacttcacaaagcacctggagtttactaaaaacagactcctaggaggtcaggcactgtggctcacgcctgtaaccccagcactctgggaggccaaggtgagaagatcatttgaggccaggagtttaagactagcctgtgcaacatggcaagaccctgtttatctgtacaaaatttttttttaaaaaattagccaggtatggtagccatcacctgtggttgcagctactcagaaggctggggccggaggatcgcttgagcccaggaatcagaggctgcagtgagctgtgattttaccaccgcactccagactgggcaacagaacaagacaccttctctacaaaaaaaaaaaaacaatagggccgggcgcggtggctaaggcatgtaatcccagcactttgggaggctgaggagggcagatcacgaggtcgggagatcgaggccatcctggctagcacggtgaaaccccgtctctactaaaaatccaaaaaaaaaaaaaaaattagctgggcgtggtggtgggcgcctgtggtcccagctacttgagaggctgaggcaggagaatggcatgaacccgggaggcggagcttgcagtgagccgagatcgcaccactgcactccagcctgggcaacagaatgagactccgtctcaaaaaataaaaataaaaataaataaataaataaaataacaataaattaaaaacaaaaacagactcctacggtcaggctgagatatcctgattcaggggactggggaatctgtatttttaacactccgtgaggggttctaaaaggcagacaacttggaaacctgcagattagagacctctgaggtgcctctggctgagatgagtgagggatggcaccacatacaaggccctacccctgcccccaggagagtggctcctgctccccccacaccaaccctcgctctcacccagaagggctctcctttcaggggtcccaccatccccatgaaaagtggctgctgaagcaaggcgaacacagcactggtgagggactgcaggcctgtcagcgtcccaaaaggggttggatgggaacc

SEQ ID NO: 8087 - DNA, 1737 bp, Homo sapiens
ttttaaagcttcacgttatttatttatttactttaaagcctcactttaatgttaaaggtaaatgtaaatatagtataacaaggaagctcaaaatttgcataaagttttaagataaaataggagactccaaaaaagtgttactttcggcaggccctagggatgctatggtgggaagtttgagtcataccttagcattctttctaaagcattctgtcctaatcctctgtatggagaaaagccagcttcctggatgtaccccaaatcctgggaagtagggggcaggagctggactccctccaagcactaagggcagggcatggttgggaacagggaggtgagccagacagccagaggcgaacgggctggcatgccaagcgtcctagttaatgcccagctgagcctgggtgaagaaggatgggggtgtgggaagacaccccccaccaaccgccaaagacaggcgcacaccagccagtctctcacttccctttttatttcctctaagacttgcaagcagcagcaccagagagggaacctgccctcctggccctggaaggggccgacccccaacccctaacccaggacacagctggcacctcaggcccctttccttctgaaaggagggctgtgtctctctcacattcacacatacacagacacatgcatgtgtgcacactcatggcacatgggacctcaggggtagcctgtttgccgatccccccaagaggtaccaggaggcagaccgctagaaggagataagaggcaccctggtctcctccaacccaaggaggaagaaagctcaacccctctaggatagggactgtcttcagtcaatggagcgttgacttagggggcgtttttgaaggttttttttcctcctttttgcagtctttacaaaaatagaacttctcttggtatttataaatctacggccatggctctatgtgcatgttacaggtagaaaagccatatggggcactccttttggttgctcaggccttgattgcctgtcatccaggtcccttggtctgagaagtctatgcggtcacctcagagccgctaagcaccttcagtgggcccatcccattggcggcgtactcctgctggagccgggcacggtaatagaagaggtaggaaggcaacaggaatcccaggagtgagaatagcaggaggcccagattcacctttagggcaaggagagagaaacagagtcaagtaggtagtcatctgcccttagcctcccacagggaggagaaggcggccatttttctccaggtcctgagccagaataaatacagctagtacttattatgtgtagtcattgttccaccagtatctcacttaatgttcagcaattctgcaaagtggctgagatgagacttctcaggtataacaagtggcagggcctggtgggtgcccacaccatatggcactcactaggtaggtatgaggaaggcacagcactgtaggagtctgggctggtcaggctgctcccgaaatggggccttctgggctcacccctctgacctttggagatgttaaccaatgggatcccgttcagggtggcgagaggaggctctcagacacagttcaaggaactgggatgcacagcctggtggacagaaggcttggaaggcccaggacacgcgggctctgactcggttcacatcccactctgcattactcactgtgtgactttgggcaaataatggcaattcttactgagtgcctccttctcag

SEQ ID NO: 8088 - DNA, 489 bp, Homo sapiens
ccaatctttccagcccaccaatcccttgcccagtgtttctataaaataagggccttttgcatctgatttaagtaggaagctgattcctgagcccctcagatctgctgaatcagatagctaagggggccctggaatctgcattttagcaagcggaggtgggttatgaagcactccaaagtttgagacacgcctcaaaggtggagtggttctgtggggggcagaaaggaaaatgcaaagggggaaggggtcacacttggggaaggtttcagacaataccgagtggaaagggtgatgccaggtgtggggagtaacagatagaggaggcaaagtgagtggagaccaagccagaccggggaggagggggccacagccaaggtgagacaggtcagcagccagaaaccgaagcagacacttgcagggtgcaccccgccctctcttcgtggcaatctgagaccgaggacgtggagaccctggagagcccccaacctt

SEQ ID NO: 8089 - DNA, 487 bp, Homo sapiens
ccaatctttccagcccaccaatcccttgcccagtgtttctataaaataagggccttttgcatctgatttaagtaggaagctgattcctgagcccctcagatctgctgaatcagatagctaagggggccctggaatctgcattttagcaagcggaggtgggttatgaagcactccaaagtttgagacacgcctcaaaggtggagtggttctgtggggggcagaaaggaaaatgcaaaggggaaaggggtcacacttgggaaggtttcagacaatacgaagtgaaaagggtaatccaggtgtggggagtaacagatagaggaggcaaagtgagtggagaccaagccagaccggggaggaggggcccacacccaaggtgagacaggtcagcacccagaaaccgaagcagacacttgcagggtgcaccccgccctctcttcgtggcaatctgagaccgaggacgtggagaccctggagagcccccaacctt

SEQ ID NO: 8090 - DNA, 6093 bp, Homo sapiens
cacgaccggactctcaaactctgggatctacgcagcaaagtctgtgaggaaattcagtctctctgtctgtgtatatgcttagatgttagcgtggaggtgtgtgtttgcacgtcagagcctgcatttatgtaatatagtttgaatttcagatctggcttcatgtttagaggggcactgaggatagtgatagtttttcttgtttaaagcttcatttaagtgagtaactctgacaagtcagtggttagagggtggcagcattatgtaaacagccacgttggtgcctctgcttgattaatgatgtttgcatttctttcaggcataaagacagtgtttgcaggatccagttgcaatgatattgtctgcacagagcaatgtgtaatgagtggacattttgacaagaaaattcgtttctgggacattcggtatgatacccaagctcctgactggaggcacataagagtctccacagtaatggttctgtacatgggttgtgcttttaagatctcaggacatggcagaaatgagtttcggtacacgtatagtgttagcttattaacacttggctgttctttcccatgaagtagactgtggagcttagcaatcatttattgagcatgcagtgagtgctaggcccttcaccagctggcaggtaagaaaaggcaaacaggatactctttctacctttaggtaatttaaactgtagtagggaaggcagaacgcaaaagtcagtgactagtgtgttgaagtggaggcagctacgtttgttccagtgtgttaaagaatgcctctccagatttctccggagacgtgagtaggattcacacggcaggaaagccactcaaacttttgagtgtgtgtctggtggctgatacatggcaagtgagcaggaaacagggcagaagccagtgagggggctatgaggggttgaaatcaggttgccacaggcttgataagccattgtcaaatcactcgatcttgtaagtcgttgggtgtttagcaaggaaatggttgctttgcaggagtctagtagacgactttggtggcattttgagagggcatattagggaataggaaaccaatagagttgataaggacctaagttcaagtcagtagaggaacatgtggaggagagaatctatttgaaggagaatttggacagggcttattgacaggttggaggaaggggaagacaggatggagagtaaatgaggacagcctcccagcagggttgtagagagggtgggggtacagggcctgtggtgatagatgatgctttgaaacacagcatggcaccagaaagtcctgacaatgctcatggttcctggacaccacttcacattttattcataatctttagtttgcttttaaaacctgaaattggaacttgaaagatggaatttgagagttaagttggatgttcgaagtctcttagtccatcccataatttgacaggtgaagaccctgagtcccaaggaagtggagtagcttgcttcaagctgcatatttagcaacaataagataaattcttgcttagttaaggtgggaggtaggaaaaggtttcattgaaagcctacaacaaaatcatcacagaacaggtcagcaccccctttggctatgaatgtcaccaacagggccctgcccagggtggctgttagccaccctggacatgggccacagcacagagaagaagagggaggtgcgtagggccgtggctctgccctggctttcctggccccatatctggaggtggagggccacagagccacagtgaatagggcagaaaacctgcaagaggctagagttacacttacaaggcagcccaggcccactaatgcaggtttctttgccaactttatccaaaagttgaaatcacatcactgaaaataatacgaattgggtagtagccctagttagctcatgctgatcagaaaccgatgggcgattgttgtcattccaaaaatggatgaggaaattcttaccaacttcagagttctagtctgggaatgactgtcttagggtctgttgatgggaaagtaagaaaagcagtcacaggttattagaagactgggaacacattgactgcgctggcagagcgttgcatgctagttgaattgcagtgccttttttttcctccacggcatgatgtgaagtagttctggcctacgttacatttctcagatctgttctccctcttagatcagagagcatagttcgagagatggagctgttgggaaagattactgccctggacttaaacccagaaaggactgagctcctgagctgctcccgtgatgacttgctaaaagttattgatctccgaacaaatgctatcaagcagacattcaggtaactgaagatgtgctggttgcatgaagaccagaggcccagccctgctctcttaacgtgctgcgtggcctgagctccctcagtgacagtgccctgttgtttgtttcagtgcacctgggttcaagtgcggctctgactggaccagagttgtcttcaggttagtagtgacccaccccccgccaatttggttcatcacaaagagtcctgcatgggcattttcccactggggatatagagctaaattttgttcagtgcccaacctatgtttccaggagtgtgcctgtaagttcataattgcaggccaccattattgtctcttcctttccagtgttccttttgtgattacatgaacctaacgtgttgtaccaaaaaataacagttggctggttgctttgttgtgggtgagcccattaggttcacttctcatcactcattcacgcaagagctgttggagagcctttagaaaagggcaggagtggccgtgggcctggggcgggactgaaaaggctttttggagaagggtgtgcaggtggtctgcagttttctgctccttgttcccttcttccatgtatcctgcttcttccaaatacctttccaggctcagttgctaagatgtttcttttcttccctcctctctttgaggcatgtaacaaggcagtccatgggctgaaacccttagctatgtggaggttggctttgatctccctatatgttgttttgttgaagtctgtagatggttaaggacttggagccccaagaagcaatgtgatgccactgttcattagccggacggggctgaaatactggggaaaagcagatttggctggaagggccatgactagcacacattctgaggtctgggtacacaggagtggtcatcagtgaagaacaaacattccttcttgggaaaaaggccacagagatgctgaattgggggtggggaattgacaacctttcttttcttactgtcttctgtagccctgatggcagttacgtggcggcaggctctgctgagggctctctgtatatctggagtgtgctcacagggaaagtggaaaaggttctttcaaagcagcacaggtaagatgaaccctgtctcagccccccgttgcgttgtgagcaaggcctttgacttcatctcaggggtcatccggtttagacctcagtcggcgctgtgagggcactgtccgcccacctgctcggctggctgagctaggtcagtggagagaagctggggccactcacacagcacagcaggccacagtctacagagtacgccaggtagagcggttagagtggcagccgctggagaaagggttatagaaacacatccctgactctttggttatgtccacgtcctctgtgtctccttccccttccctactctccttcctttccgcctccctgtctcccttggaagtccctgttgtcagtgcatttcagtgcattgacgtgtcctaaacactgatctccacacaccttcttttatcttccacctgataggcaggccccagacccccttttttcctagctttgttctgcccacacaagcccacctgctagttggaacccagataccattttccttcagaacctctctccctgtccttgggcagcagcaactgctcccagacctaaccagtgctgaccaccactgcccggctcttcagaggcatgtgtactgtctttccagctcactcagagctcctctcttagggagagtgtgataaggcctgactgccagaggggccaaactcccttcatcccagcatgacttaattaagtacaccactggattttttctgaggtcttttgcatgttagtgagctcctgccttgtcgcgggcacagtgccagagagtaaaatggaagttggaaaaattaggactccctgaatgcacaagcttctggtgtttggtttaccaagatctcatcccaaatgttctgaaacttggtgcttttctgatctctcctttgaagctcatccatcaatgcggtggcgtggtcgccctctggctcgcacgttgtcagtgtggacaaaggatgcaaagctgtgctgtgggcacagtactgacggggctctcagggctgggaggaccccagtgccctcctcagaagaagcacatgggctcctgcagccctgtcctggcaggtgatgtgctgggtatagcatggacctcccagagaagctcaagctatgtggcactgtagctttgccgtgaatgggatttctgaagatttgactgaggtctctcttggcctggaagaataacactgaaaaaacctgacgctgcggtcacttagcagaggctcaggttcttgccttgggaaacactactagctctgaccttccatacctcacttgggggagcacagggccccgctgggcctcctcaccaacggcagtgccaaaatcagcccccacatcaaggtggtgttctctgtgctttctctcgtccttccaaagtcggttctggcctaacgcatgtcccaacaccttgggttcatttgcccggtgaactcactttaagcattggattaacggaaactcccgaactacagacccctccctggtgggttgcatgaatgtgtctcattactgctgaaatgtcctcacatctctttcactgttcttcagagctttctggctctctttcccccacaaaattcgacatatttaaaaatctccgtgtggctttaaaaaatggttttttgtttttttgtttttttgaggtgggagaggatgtgtgaaaatcttttccagggaaatgggttcgctgcagaggtaaggatgtgttcctgtatcgatctgcagacacccagaaggtgggtgcacactgcatgcttgggggtgccaagggattcgagacctccaacatacttgtctgaaggtggtgattctggccatggcccctctgccaagcctgtgtgcgatgcccttggtgctttagtgcaagaagcctaggctcagaagcacagcagcgccatctttccgtttcaggggttgtgatgaaggccaaggaaaaacatttatctttactattttacctacgtataaagttttagttcattgggtgtgcgaaacaccctttttatcacttttaaatttgcactttattttttttcttccatgcttgttctctggacatttggggatgtgagtgttagagctggtgagagaggagtcaggtggccttcccaccgatggtcctggcctccacctgccctctcttccctgcctgatcaccgctttccaatttgcccttcagagaacttaagtcaaggagagttgaaattcacaggccagggcacatcttttatttatttcattatgttggccaacagaacttgattgtaaataataataaagaaatctgttatatacttttcaaactccatgcctcttggtgattattttattctcccttatccttagaaaggggaaagaaagtgatttctttgtttacctggtagttatttgtaaacaacggctagtactttttaacggtcttttttcattcatcatgtaagctccattccacaaagtatctctctctgtaaacaccagtgttccagtttcatgtcgcgcaaatcttaacggacattggaaagatgtttcttcagaacattaccagctgcagtagaagagcccagcacggattgctcttcagccctctgcacggagcctctctccagtgaactgccgcagcagagaggcattcacttgtggtggctcagattcctgaca

SEQ ID NO: 8091 - DNA, 536 bp, Homo sapiens
ggcatccaacagcttagtcacaaagggatttgattgttgggagtgctggtatctgtggctatgatctgccttgttcaagctgagacctctgattgaaaatcccccaggggttttaattgtttacataaggagtcctgatgtttccttttgtaaattatgcctgtggtgaccttgtctagtctgactttaaatatggaactgactttcagcagcatggcgcaacatcgaggctttaaaaattctttaatttgatataattcagacatagaaaaattacaaaaacagtacagcaggtatctgtggtagagctgatttcaaattcaagattgaggatggggagcacgtgaagcttggtgctagtgatgttgaatttttgtttttaatgttatttttagtgggagttttatccttttggtcttgatacctcacctttggccaacactcaaagataggcttcctatgagatacatggcccctggataagactcagtgaatgaaattgttgcttcttgtcctgtttgggatgtgtgtgtgtg

SEQ ID NO: 8092 - DNA, 1532 bp, Homo sapiens
tactgctgaacagtttatgtagtgacttttgttgcaggggtgggtttagagttctttttatgtaggtttttaaatgattttattttgaactgaatctccatttgcacagcacagcagacacacaagaactacagcgcattaaaaacagcatgtgtgctggcgggggcctggctttctcattagaaaaaaatatgtttgacaggttatgaagggtaaaacaaaaataattgcaagaactaccgtgcccttctgaccccatgggggccttccctatcccatgattccattttggggagtagaggtagggagggggcagcagttacaagtgctttgagctgtcaactcacattttactttgacctggttgggcaagaaaggagagacaaacttccctagtcaggtatctaggaagaagcctcagctactgtttctgtttaaggtctctggggtagctcttggagccaacagagaatagatggggtaggaatagggatcctggccctatccctttggattttgagttatacctgggtataggaagcagcttcttcgcaatgcctgtgggatctgaggatgacagaaaaacctaagctgtggggtggggcaaatgctataaagtaccagtaggttctggtcatcaatgtggtcctccctcctctctacattattaacccttaaggtgaagcaatggagaagaaaattaattaacctgaactgtcttggacagaaccctttcctctccctctccactagctccaaggcttattaagtacctaatgtcaacaacatggccccattccccttgcccagatggacccttcccacccctgtctatacccagagagcaggaggcaggactgattagctccactggatcccagatgcttgaggttctcattctttgagggtcactttcgaaagctgttttctgggataaacaaagtacgccttcgcagtttcctgcctgatccttcctccagcaagtaggtcacatcaatggctgaaaacagaaccaaggaggctcatcaaaataccaatctcctactccttattccagatttgagctctaaggagagcacacgaactcaatgattccttttctgacctataagcaatttagcccatcctccaaccctacgtgaaaaaggtggttctttagaggagatcatctcaccttccagtttcactaccaagatacaactaaaagcaagcctataaaagaactataccattttcttagaatactttggatgctgaaccagtaattacaatttttttccattccctctcatttcgcatttatcttaaaccctagatatgaacctgattcttcttaccattttttccagggattttttcaaggagattgagcaagatctggttgagtcgttcccgttggttatgccgtcgttcctcaggggtacaggttgactggggttcttgactactttcctctgtttttttttcaccctcactgacgttagcagtggccccttcccgttctggctcctccaggctgggtatctcattgg

SEQ ID NO: 8093 - DNA, 1532 bp, Homo sapiens; identical to SEQ ID NO: 8092

SEQ ID NO: 8094 - DNA, 472 bp, Homo sapiens
attatatataggtagtcttgggcctataggtaatctctttggggcttttaaaagaaatatacaaagattttcctacctttctgtgtattcttacaaataaatgttaagactcatggcctggggaaggaggagaaactcattaagggagcaaattgcagggagattcctgaagaatcagtctctgagccagtccaggcactttaattttgtctggccctggcattattattgtaactgagtagaaggccatgagatcatagcctctccatagctcccgatagccatcaaaggtgactggcttctattacttttgaagtgacaaccacatttgaagatggtatagactgaccactgattgtcaaaactagtccaaaataaaaccattcatccatacttacttctgccacataacttgcagatgccctgcagcaaaaataaattagctctaaattttctgttgagcacagtcttc

SEQ ID NO: 8095 - DNA, 1869 bp, Homo sapiens
tttcatatgtaagagttaagtggttttttttctttattcaagtaatcatttagactctaatacatgataatggacaaccatgtgacaaagtactgtagtgtatggtttggtgtagcctccttgcctctaggatgggattttttccaggtgattcttcaggatctgacatcgatgcccaacacaggctttccaatggcaatgcatgagttctagaggtcactgccccatctttcttcaggtgctgtgtgccattttctcccacccattttatcctccattacttataaaaaccccactctaaaattcaacctatgttataaaattaacaaaatcaggagttagtacacatttttccacaatgataaaattaagactcataatgtactatcttgtttcgtctaacttttggaggatttatataatctctaaagagtcagagtaatacataacacaaaacatgcaaagaaccttatcactgggtgtatgtaatacgctgggaattgctaaagtactcaaaagcttaattttcttggaatagcaactgtccactgaaaactatagtattcaaacaaaaggttatgtgttaatacatgaaaatacagtacctgatttggcataaattgtgagatctttttcactagtaaagtgcttaattaagaaacatttttccactattagatttaatttgtcaaaggcacaaaatatctttgtctctctctttaaagtattagttttttaaattatggtactgcccatttaaattttacttaatcagaaagctttactgtttttttctctcagcaattaaaaaaaaactacttgaagaaaaacatttaatttttattttcaaaatgttgccataaacatacatacaacactgaatttgatcccctccattggctgtctgtgtgccaggaagcacttgtgacagaaaacatatataagcttagggtaaaagtttataaggaatcaaaatatcttccaaaaagagggggtaggggcaagaggaatcaataagtttaaaaatcataactttcattttataaaaaatagtttgaataattttcttataaatctttaatgcttacaaaagcaggaaatacatttaaaatagtctttttaacacagattcatttgtacaatgtggtcataagaaaaataactaaaatgacatttcagtagtctatattcttttctcagcaaattccacataaaatttaactaatttacaattcaaaataagattttaactgccaacaatgtcagactagttgtggttagtacctgaatatcaagctcttctccattttatatattgtaccaaaattttaaatacagctcagcagtgataggtactaataacaatacctgactacatggttaccacccgtgactactgcattgcagcttaaaacatgctttggtcagtaaatttaaaagatatacatcaaataacaaggccagaaaagttgttttagaatttcctgaccttaagtaaactttaaatacattgacaaggcaaaaaaaaaatatgatcaaatatacagaaaggtttctattttttcaaccatttggcattttatattattaatttcgctgtttaaaataatattttatactcctgtgcactgattatcattgctctccgaattaaaactaaactacaattaccttgctagaatgtccagtagcatatatattaattgttccttttgcatttccacgaagatgatccttcatcctgtaactttttaaattttggaccaagaaagaaccaccaaccaaatccaatgaaaacacaaataatggactccacataataaccatccagggctgtaacacatgagccacccagttttttgcaaagct

SEQ ID NO: 8096 - DNA, 150 bp, Homo sapiens
ctgggcgcagtggctcatgcctgtaatcccagcactttgggaggccgaggcgggtggatcacttgaggtcaggagttcaagaccagcctggccaacatggtgaaaccccatctctactaaaaatacaaaaattagccgggtgtggtggtg

SEQ ID NO: 8097 - DNA, 8387 bp, Homo sapiens
gttaatgaatccaaaactattttaaagctttgcgattttgggtcggcttcacatgttgcggataatgacataacaccttatcttgtcagtagattttatcgtgctcctgaaatcagtaagtttcttaatgttctttgacctgggccatcatatgtggtggaaaccgcatacttaatgtctaagcactgttttccatcacacttcagcagctgcacgagttcattcatgaggaagggaaccatagcaagttcatcctcctcaggtggaatgaaggtagttgtgacaggagtcttgatcatgtcgggcaagagtagcaaaacagttgtggaaaatcctcgactttagaagactgctcttgattattcaaggtctgattatcacatttatggattgtatgggacctttgttttttcctgttgccttggttgaggctgattagcacctccaccaaaggcgaaatgagaaaagagaagaaatacatattttcttttgccctttaagttcctcccccacacctccattttttaaggtttttaagtttgagtctctattaagaattagtgggaaagaacacaaaactaattgtcaaactaaggcatgaagatggtggttatagtctaagctaaggtagccagcccctcattagtggaaataaaaattaatagtcgtcagttttctttatcctcgtatattaaaactttgattttgttttcagttataggtaaaagctatgactatggtatagatatgtggtctgtaggttgcaccttatacgaactctatactggaaaaattttattccctggcaaaaccaataaccatatgctgaagcttgcaatggatctcaaaggaaagatgccaaataaggtaagacgttagcatgagcttctttaaggtcttagtttcttattaactgacaagactgctgacacttgctcaccactagtgagctataaaacaaaaatttcagaaaggtgggtagatggctatcatgatttcttagggtctttcccttttctggtgttttaaattagtggttctaatcagccaagcgctaaggataagagaactttttcaatgatggacagagagcagcaatattttggggatacacccttatgggtaaaagtttcaaaatgtttggaagacagaatggaaaaagatgtaagttgaattaggtaaaatacaagaacatgcttagtggtcagagaatgaataggtgaatattagatattgtaagaggaacttgatgttaattaatttattaaagattggaggttatttgagaaagtaaggtacctttcttggtaccttttcttatttaatatctttctaactcaccgctgatacttcagctataatgctagtttctgtttaacatgaagcaagaatgtaagcatttattaaagtatctgagggccataacttagctttttttttttttttttttgagatggagtcttgctttgtcgcccaggctggagtgcagtggcgcgatctcagcttactgcaagctctgcctcccgggttcatgccattctcctgcctcagcctcccgagtagctataggcatgagccaccgcacccggctgtaacttagctttttaagatttcagcctatttgctgaatttctaaagatttacacatttttcgtaaaggtcagaaaactgtatggttttcagttgtgttttgttgttgttgttgttttgagactggatcttgctctgtgtcccagactggagtacagttatagctcactgcagccttgaaccgaacccctgggctcaagcagttctcctgcctcagtctccaatgtagctgggactacaggcatgtgccaccacaaccagttaatttatttaataatttttttgtagagatggagtttcactatgttgaccaggctgatttgtacatattgtccaaattctattaggttggactttttttagaataagttacataaaaatgagctatgttggtattagttttaatgaagtctgacctgtatcagggctgttggaacataattagtaaagtggcattaggttccctaactgccaaggagaaaaaacctgagttttgtgatatttttaggaagaaataatttaaagtctttgttgactctccaattttaaatagtgaaaggacaatttgatgttataattgttttaagtcactgcctggacaaatataatttcatgttattaagtagttttaggtacagcattggtatttgcttttgcaaagatgttaatgaattcctgggatcaagggaatctgagatcaaacaaacctacagagactaaataacatacttatttgacttattgtatattaattaaattgttagtaggcctgtttcataatagttcaaaacccaagtttttgttttgttttgtagatgattcgaaaaggtgtgttcaaagatcagcattttgatcaaaatctcaacttcatgtacatagaagttgataaagtaacagagagggtaagtgttttaaatgcagcatgcaatagttattttattgttaactgagtactaaatcatacgagctggtgaattaaaaaaaaaacaaaaacccaaaagtaagtatttcctttttgctgtcgaccaattcctaaataaaacacatcagaccatggaaaagatggagggattttaaaatgtttttctagcataattaatttatttttattataggtcatatttaggccctcgtcacatcttctttggattactttcttggtctggcttcccatccagctttcttattgctgctagagtgatgtttctgaaaacatatctggtcatgttcctgtccctgcttaaaaacctttgttggctccctgttacctatgaaataatatttaagttcctcagaatgacaaatccaactgctttcttcagttttcagacctctcttcagtacattcagaacccccacctttccacatttggccagaaggcgtgctggttcagacctttgtgcctttgctaacagacctccctgagcttagtcatttcctgtgctgcctcacccccaaccccctaaaagatgtatcatcttcaagcctcagctgaaatacacattctgtatgagccttttgaaaactcccagattgaagtaatgatttccttatttttgtcccattattatagcatatgtccctgtctttgtcagagcacttaataatacttcagggtattaacttattcacatgtctgtcacttaccacttcaaggtagggaaagtacagtgcaaacagctcatgcttatcttattgtaaattttcattgctaacttggagttgacttttttttttcttttttgagactgagtctcgctctgtcacctgtcacccagggtgaagtgcaatggcacgatcttggctcacagcaacctctgcctcccaggttcaagcaattctcatgcctcagcctcccgagtagctgggattacaattgtgtgccaccacgcctggataatttttgtatttttagtagagatgggttttgcagtgttgcccaggctggtctcgaattcctgagctcaagtgatccacctaccttgggcttccaaagtgctgggattacaggtgtgagccaccgcgcccagcccagagttggcatcaactttttcatttaagttttttggttaccttttaaaaagatgtacagcatagaggaaaccacagcaaagttttaaatgaatagatgatgatgatacagtcatgcgtcacataaccacagcatacactcacacacatctagggtaagtagtatggccttttgcttctaggcctgaactgtaagttggtggactgaatactgtaggcacttttgcaagtggtaagtgtatgtatgtatctaaacatagaaaagggagagcaaaaatacggtattccaatcttaagggaccactgtcatatatgcagtctgtcattgcccaaaatgtgcactgtgtgtatatattttgtatgtatatgcatgtttttaatatttttgatagaccccaaaacaatctgatttaagttgtatatgcttagtaacttatttagagatacgcattttaaaaattatttttaggagaaagttactgttatgagcaccattaatccaactaaggacctgttggctgacttgattgggtgccagagacttcctgaagaccaacgtaagaaagtacaccagctaaaggacttgttggaccagattctgatgttggacccagctaaacgaattagcatcaaccaggccctacagcacgccttcatccaggaaaaaatttaaacaagatgaagaaactccaagggtttgagtaaatacaaagactgaagaaatttcacagcagtttattaatgtatataaacttataaatatttctccagcaaatttgaggaagcatgatatatttgaattaacaccaagggtgatatttcttttagagatgttagttaatctgttttgtgtcttacgtgaaatttcactgtagactgttttaaattgccaagactgcacaaaattacagtgctaatgtatatggttgcagttcacataaagacaaaagcatctgttatgaaatgagtagtaatattgggtggttgatttgttcttagcagacttggcttcattttggtcttgagataaaatggccagcataaatgctgtttatattcacgttttcctaggtgtgtgtgtgcaggccacagcagcatgcccttggtgtagtcagtgccgaaaggggtctgttccttcttgagcctgcctgcagggatggtctccttttaaagcaggttgtgtgcagcattcagtacactgaaggtaagctaaaccatcaacatctctggtgttttaagatgttattttattggaacaactgacaaatgagggatgttagctttgtggcagaattccctgcatgtgtgataactgatcttgttttattttttggcattgcaactgtggcatagttacaatttctgtttgttcatcacatttaaaattggaagagaacgcgcttgatggatagagcgccttcagtgtactgtttcttattaactttactttttttaaatcaacttgctatagactttatatacattttgttaaatatagttcctagtgacatagaaacgatgcgtagttttcatttactaattacaaatgttgaggcctaattctgaaagtcctcatatttaaaggctagacaaagtaatgaaatttttaactatttgtatgtcattttgaaagtgtactgctttatggtaaaagtgtttttcatttgttcattgttttcattatttgtgatcatgttgtctttcaatacaggcataaaccttccactcttgaacaaagcagctgctttttaaaagcggtaattgcttctttaccttttatttcttttgtaaatgaagcttttctttaagaatgtgactttaaagtgttgtctattgcataaaacagttgacactcacttattgtaaagtgaagattgttctactgcatgtgaagtggaccatgcagatttctgtatgttctcagtatgcatcactagataataaagtcttttgtgaacaaggcatttgtagccatttttaaaagtttttgtcttcagtgctggtaagtcaggtaaaccataaatagttaaaagcaaccttttgtttttttcctgaaagtttttaattgaaagtattattagttaaagatgtaaacctagccaaaattaccagtttattaataattaggatcctaattatttcaaaaaatcctacaaatattgtcagctttcagtgtagtgagattattcctgtaggttatggggtataattcaagatttaactaatgtttctgctattttctcacttttccttttgatggtgcggaaagagaaaaaggaaacggggcacaggccattcgacgccttctccaagggtctgatttgctgagacaccgcttcaccttcttaacaggttatttctgacagcatgtgtagataaacatttagcaacaatttaagacaaaatcgtttaaatcagcttggttttgcaacacaaaggaatttgtattattaacatggtagaagagaatttttcagaaatatgtgtaatctttgctgtttggggggtaaaattaatgcttgtctccctgaggaatatggaaaataatcagattttaggggtttaaataatatttttaaattgtaaatgggatttttttattcacccaggcacctaattacaacaagcatgcacattttggtgcattcaagaatggaaaatcagaatagcagcattgattcttctggtgggttttgctccatttaaagacatgaaatgaactacagccaggaaggtgatagatgatataataagccacctctgaacctacaccccgtctcttcacggtttagacttactaaaataaatacaaggtgattttcatcttcaggtagagtgaagccttttaattaaggcgtcacaggtgcagctattctaccttaatgaaatgggtagtgattttcccaccattatttatttcggtgataatatgctgcatattcaagtctcttgtagttattttcacccaaagtagttgacaatttgatgcttctggtgatgttttatggcttcattttatgtaattttttaagtaagttccactagaaacagttcatcttataccttcaaaactgttacctgttctttaaaaaacaaagttgcttgttacttgttctttgtgttttaggtgcagctcagtggaagatgatgacaaccagaagacatgagctaaggtttctgtcctataaaagatttattaaaaaacaatccttcatttattttttgtctaattttttagttttcagcattatgatttgggttttattggtgtttggtatttagaattagtgctgttgtggagtgcgtctgtaaagtgcttgttttatcatacttcctgcctctcccctcccccagtttctcctcccctaaaataaaaatagtggtcaactttagtaatataaaaggctgctggatgctgagattccacataacacatggttgtcaaaattggatgttaaggattcttagaaaaacagcaaccaccagaatagcatatatctaaaagtagtcttcagctttaggcagatgcaaaagaatacaaactggaatattaagaatactgttcaactcctttagtatctgttccccaacttaccctgtagaaacctcgttattaaccagtgttccagtcttaaagtagacaaaatattcagagccattttttttaagggaaatgaaaaagatactctgggttttttatactccccaatttagcatatctagactacctatttgaaaggaaccctatcaactgtcttatgtacgttacatgattttcctacactctgtaattttgctgaggtgcaatttggaactctgcaagacctactagattgaatttatttagtgaatgctcctgaataaatgtgcattcctcttttagagtagctgtatgcttttcaaatgctatctgccgtgaattttttgcttttattatactttatggcaaaagtgatatcaagtgattgtcagacttgagggctcatagaagtgttaggtacggctctcaaagatgttacagttttttctagggttgggagaatagttgagatctggaaagcatagacattttttacactctggatagactttattcttgaagatcatcagaaatgaggttggaatttcgaggttttgagcagggggagcatcttatattcacccttaaatcgttattaatacatcctgttttcttcattccctgatagctatctcatttcactctactgtctcaaaattttgttttaaaataatagaaatgttttgccattattaagtaccactttattcctaacaaaaataagtactcaggacttttttttcaaaatgaaatatttatgtactgttttatggtatgtggtagagtaagtaaaatgtaatgttctcagttttgttccatatttgcattcctcttatgctttacctgtattttatcatttgtaagcagaactctagctatatggggtagaaataaaatctctgagatgaaacaaaggaatcaacatgataaaatttaggcgaagtagttaagaaatggcccttttgaatgttgaagataggaaagaaagccatatattcaaatatgtaattttcctcatttagttataatgacatctttaccaattgggcttcataaatgtgtttctttcttaatagtatcctagttccagcatatattcaacatgaattttatcattctcctcctaatggaatgtcttccttatagaaatgttcacgacaaattcatttgtgttttttacatgtc

SEQ ID NO: 8098 - DNA, 31949 bp, Homo sapiens
aaaagaaaagagattattgatgcttctgataaagagggtatgtctccagcaaaaagaactaaacttgatgatttagctttgctagaagacttggaaaaacagagagccttgattaaggccgaacttgataatgagttaatggaaggaaaggtccagtctggtatggggctcattttgcaaggttatgagtctggctctgaagaagagggggaaattcatgaaaaggcaagaaatggaaataggtctagtactagatcttcaagtacaaaggggaaacttgaacttgtggacaataaaattactacaaagaaacgaagtaaaagcagatccaaagaacggactagacataggtctgataaaaagaaaagtaaggggggtattgaaatcgttaaagagaaaacaactaggagcaagtcaaaggagaggaaaaaatctaaaagcccatccaaaagaagtaagtctcaagatcaagcaaggaaatcaaaatcccctacccttagaaggcgatctcaagagaaaattggtaaggccagatctcctactgatgataaggttaaaattgaagataaaagtaaatcaaaagataggaaaaaatccccaattataaatgaaagtagaagtcgcgatcgaggtaaaaaatccagatccccagttgatttaagaggtaaatccaaagacagaaggtcacggtccaaagagagaaaatcaaaacggtctgaaactgataaagaaaagaagccaattaaatctccctctaaagatgcttcatctgggaaagaaaataggtcacccagcagaagacctggtcgtagtcctaaaagaagaagtttgtctccaaaaccacgtgataaatcaagaagaagcaggtctccacttttgaatgatagaagatctaagcagagcaaatccccctcgcggacactgtctcctgggagaagagccaagagccgatccttagaaagaaaacgacgagaaccagagaggagacgactttcttctccaaggtaacttgtgtacaaaatgttaaagctttttaccagtgcatgagattttaaacggaaaactagaacttgtggaccattaaaaatgaagtagtaagtaaaaataaaaataaatgaagtagtaatgagtttcataattttaagtaacccaatccattaaccatgttaatatttgcacttttttcgatgagtattttaagtataggtgtttaacaaatactgagcttgatgatagaattgggttttttcacattcttgatttaatacctagtttgctaaggcactcctttcaatccatgtaatttggctgataaatcttcattgggggcgtttagagagaggattattacttcatgaacagtgtaggctgaaactcttaactttgaaaagggggaaaggtaatcagtttaacaattgtgttctgttcattctcttgtatttgcatgagttttaaattttaacagtataaatagaaaccaataccaatattttttggtccccaaagtataattaaaatggaaaattttgtattaatacatataatctcattgttgaaaagtagtatctcttaagcttaagaagaatagtatatgaaattattttgtactatttgaataatatattgtcttagttcttataaatcctcatgtgattatcttaactcatgaggtgaaggggctctcatacctaatttataaatgaaatagaatcagagaatgtatataatttacgtaggatcatagaacggaagtatttgcggggaggagtgtttataccacttaaactactttagaaacagatttcttaatgtcttttttgtatttagtatttaagtattatgaaattgccagctaggttttgcttattaaaagagtattggcttatactatataaggatgttattaattcctagccgtttactgtgttcataataatattttctgtgaatgggtataaatataaactcaccctgaaagtgaagtcatcatattttcagagaaatttcaaattttatttccaagtgctgtgtcttaagagcgtcttgattctttacttctgagtggcactgtaatgaaatagcccctttttcctttggcttcctggattgaggcagtgattagttttactgattctgttatctcaagtgcttcttaattatcttggtggtctttcagtttgctttgtttgaagagcaaattctgaggagtttattaaggactagagctgagtatttgaaacaaaaatatttttttaaattacagaagtgatgcatacttacttattaaagagaaatccaaataagcctgtaaattgtctcccttttcatttctccactaccactccttagaaatttactttatcttaggtctttccttgtacagacaataacatgaatataagggaatttttttttttaacaaaactggagtcatattattcatattcacatgtggcttgcttttttcaggaaacatttctgcgacaaaacatatagattgtttttcattctgcctgacagcaactggtatttcagtgtagatgtattatagtatcattctcctattgaaactgatgaaaaatttaggttggttccagtttttcactattatatgcgaagatgtgccttggttatatgtgaggtttctttatagaatagactcatagaagtggacttgcaaagtctcagagtatgtacatttacattgtagaaagttattgctaaatttccatccaggaaagttaggtcaatttctacttctacttctatgactatgtgaactgccccttttcctgaaactgtattaggaaagtttaggaaaacctttattaccaggataccatatagtattttgtcactcttaaaaacagaacaaaaaacccaaaaattgttttaatcgaaatttcttaggtgactagtgagggtgaacatttttattttctttatttttatttatttattttattttattttattttttgagatggggtcttgctctgttgccaggctggagtgcagtggcgtggtctcggctcactgcaacctctgcctcctgggttcaagcgattctcctgcctcagcctcccaagtagctgggattacagacacgcaccaccatgcccagctaatttttgtatttttagtagagacagggtttcaccatgttggccaggctggtcttgaacttctgacctcgtgatccgcccacctcggcctcccaaagtgttgggattacaggcctgagccactgtttattttcattgcattttagcagacaacactctgttctttttatactagtttactttatcccatccatttatatatacatatatatacacatatatgtgtgttgtttttgttttgttttgttttgtttttttgagatggagtctcgctctgtcgcccaggctggagtgcagtggtgtgatcttggctcactgcaacctctgcctcctgggttcaagcaattctcctgcctcagcttccccgagtagctgggactacaggtgtgcgccaccacgcccggctaatttttttttttttttttttttttttttttttttgatatttttagcagagatgaggtttccccacgttggccaggctggtctcgaactcttgacctcaggttatctgcctgccttggcctcccaaagtgttgggattacaggcgtgagccaccgcacccagcccatttatattttttaactggtcttttgaggctgtgcgtgtatgtgagcagattaaataaaagagtttcctcagatggccctatcaagaagtaagcactaccaagaagtaagcactacagatctgaatcaaagtctaccttgctcattttggctggatcagagaaggattcttgggttctgtataccgtgctgaaacatgcaaggcaggttgtgtttttaggtttttattaaatgaggaaggcaagttgcagtggctcacgcctgtgttccagcactttggggaggctgagacgggtggatcacctgaggtcaggagttcgagactagcttgaccgacatggagaaatcctgtctctactaaaaatataaaattagctggacgtggttgctcatgcctgtaatcccagctactcaaggctgaggcgggagaatctcttgaagccgggagacagaggttgcagtgagccgaggtcacaccattgcactacagcctgtgcaacaagagcaaaactccatctcaaaaaataataataataataaatgaggaaaatactgtaatattatttgattatggagacaaacctatttacaatctgactgttcagattgaatagttgtgaccaaacctggaataacattaagaaatgttcaaaacctgttttaaaaaattaagctgtagaaaggcctgttgtaatacaaatatcacattaaacaagagtaaaactcactgaaaggtacttgtgtgataagtgttgaaaagttgggtttttgtggggtttttctggggagactggaggcagggtcacactctgtcacccaggctggagtgcagtggcatgatctctgctcactgcaacctctgcctcccaggcttacacaatcctcccacttgagcctccctattagttgggactataggcacatgccaccacacttggctaattttgatattttttgtagagatagggtttcgccatgttacccaggctggtctcaaactcatgagcttaagtgatccatctgcctcagcttcccacagtgctgggattacaagtgtgagccaccacacctagctattgtttttgtttttttgagacaagttctcactctgtcacttgggctgcagtggcacaaacacagccactgcagcctcaacctcatgggctcaggcggtcctccctcagcctctgaaagtgctgggattgcaagtgtaaaccattgtgcctggcctattatacttgacattaaaaagaagatttttgcccgggcatggtgggtcacacctgtaacctcagcacttttggaggccaagggagaaccacttgaggccaggagttcgagaccagcctgggcaacatagtgagacccccatcactacaaaacaaaatattagtcaggtgtggtggcatgcccttatggttccagctgctcaggggggctgaagtggaaggattgcctcagcctgggaggtcaaggctgcagtgacccgtgtttgcgccactgcactccagcctgggtgacagagttagaccctgtctcaaaaaaaaaaaaaaaaaaaaaagatccttaattggagaaatgtcaggatgtagaaagaaaaagtcgtcaatgaaaatggaatatttgagtaaatggagtattatactcacttggggaggttttatttgagttggtttatttgaaattagaatcagtgactttaccggtatgaataacctttagtaatttttcaaactgtgggaccagaggaaataagacctttcattgtttgcctgcaataacaccaaaatatcactgtagtcacctgagtaagttttgttacaaaacacattaatcaaagttcactttctttaggctaatgtgccttttcttacagatgttctttgcatatagaaaaaaatcatttactttgatttatatttcttttaacttgcatttgatccccttaagaacacgacctcgagatgatatcctcagtagacgtgaaagatcaaaagatgccagccccatcaatagatggtctccaacccgaagaagaagtagatctcccattagaaggaggtctcgttccccactcagacgtagcaggtctccaagaagaagaagcagatctcctcggagaaggtaaagacatttcatccttgtgattcattaaactctgaatgtttttgaaccaccagtgagctcacttggtaggttttcttttagaccagttttctctgaaaaatcgtagttgtgttcccatagtttccttttaccagcaatctctacacatgggttttcttttatatcgtttcctttgaattttaaacaaatcattgctcatttaggatgcaataaaattagtcttttaaaaataggacttttttctctcttttatcaatcaatactaaatgagccagacttagggatttttttttttttttaaccagcaaggtagatcatgtagtagtaaatatatagcccagtttcttacattttatattaattttgcatattgatagttactgtagacttaggcaaaggcctatttaatttgccatagaaaccattttatctgaagcatatgtagtcagtaataggttaaaaaggtggtttataaagcagggaatcattttttaaaattcatacatacatgaaatattttaatataaaacataaatgggtatttgtttgccaatcttttaacatttttaattgaagtaataaatgaatataatttttaagaaacaaaggcttatattatagccatctttacatatctctcagaatttttgtatgctgtattcctagaaatggaaatgcatggtctgagtgcactctggtcaatgaggggttttattttattttattttattttattttttgacagtctcactctgttgcccacgctggagtgcaatggcgcgatctcactgcaacctccacctcctgagttcaagcaattctgcctcagcctctcaagtagctgggactagaggtgcccatgccaccatgcccagcttttttttttttgtatttttctaaatagagatggagtttcactatgttggtcaggctggtctcgaactcctgaccccaaatgatccgctcgtcttggcccactgcacccagccacaatgagggtttttaatactaccgcttactcatgtttcgcttttgcctaatttcatcacacttttttgttcttctagagtcagtataatcattgtgatcctgtatgtattcattgctgagcaaatagttgggagaggagggaagagaggacctcccttctgacactgctagtcttcttgctccaagctgatctcaagacttgcttttttctctcttccctttttataaaaaatgtcttgtgttctgaaatttattatgtgcctcggtatgtagatctttatccccatttattttgctaattactagataggccctttaaagcagggagtttatggccttctgggaaatttttgtgcttttttttttctttctttctttctttctgttttttccaattggaccttctatattgttccacgtattaacattttattcatgttttctggaaatagtattttctgtctctcagacaatagcgaggttattgtgtgagatttttgttctttatagttttctttgctatattgtgtttcttcccagattccttttgctgcatgtttacttttcatttgaagacttttctcacacagctggatccttcattgctgcctattctgagttaatatttaggtactgagaaagctgaatgggatttttcttctattgtgacagtgtaggacttgtcagctagtggttatcacttcagagtaattagatatttttggatattagtgactgtagatgtattttcttgggctatgagttttccggaatcctttcatttcctcctgggaaatagacctggctaccagtagagttctcttccttcataatgtaaacttccttataatctgtctatctttggtatgtgcctctcagcatctggagtgaccaacccttctctagaaagcaaatcttaagtgttctgctagaatgtgaagggagtggttgacattttccactgagttggggaggggactgtaccgagtctggctgtttataaaggctttcaaccaattctgtcctcagctcttacctcacaccatcttgcagaggatagggagtctccaattcctgaggctttctgggggtgttgtgacatgttctgactgtttctgatttaccttgtgtgttcatgttggaccaatattcagctcaatttgatctgttactattctttactccaatttgcacattctaagattttattctcatctctgctatcatctctcttgacattctccttgcctgagggttttcctcccctccccaccccacccctcccttcccctccgatctttctcttttctctctctcctctcccctctcccttctcctcttttcttttctttcttgaggtaggatcttgctctgttacccaggctggagtgcagtgtgatcacgactcactgcagcctcaacctcctgggctcaaggaatcctcccggtagctgggactataggcacgcaccaccacacccagctaatttttttgtatgttttgtggagacagggttttgccatgttgcccaggctggtctcaaactcccgagctccctgcctgccttggcctcccaaagtgctgagattatatgtgtgtaccactgcacccagcccccagtttttttttttttaagtactcatttactgtcatgttagtgaggtttctttaagttgagctcattgaaacatgcatataacttacataaagtaaaatgctttttgttgtaaagttgtgtgaattttgacagacacataagtcacactcaagttagagaacgttttcatcactccaagttcccttttgccccttttcggtctctcccttcactccagtgcctgtgtatacaaccgtggtgctgtacgaatacaaagaaacagtaggtatttatccccatagagcttatattcaagttcaagttcatatccatgggaagaatttcttagttcagagtttgataaggagtaggtatgttttagttatcttcagctaagctggttatctcagtctttctgatgttctgttcttttacttaaaattttcaaacgacctttttaaaaaatagactatattttagaagagttttaggtttacagcaaaattgagtagaaagtagaatttctatatatcccctgtgcccacacatgcatgcctttcccactttgacatttaaaaaaatgtatacctgtcttttcttctttaaatagggacagaggtcggaggagcagatcacgcttgcgaaggcggtctcgatcacgcggtggtcgtagacgaaggagcagaagcaaagtaaaggaagataaatttaaaggaagtctttctgaaggaatgaaagttgagcaggaatcttcgtctgatgataagtaagaatagaacttacccataactttgtttttccagtttagagaagtcttatttgacttggaaattgttaaataatatccacctaaatattataagtggctccattaatttggctctgaatttaaaagttagtcttttgtgaatattgtgtaggttgtatcacagagttagtaagcggttttctgaatgtaggtgtttcagctttggctggagtgaacattgggccttcattttattgtgagcctaccctttgtttttattatgaacaatacatacattagtcctgccggccagagttactagattttgggaggaattttctataaaagtttagaactttgagtttgtgttagatgatacatactttgcaattgaggctattttgtgatgagtgtcctttttacaacatgaaaatgtagaaacatttcaagtgtctaatacaattgtggggacatttttccctgtctctacaaaaaatacaaaaattagccaggcctggtggcacacgcctgtagtcaggaggctgaggtgggaggatcacttgaccctggggggagaaggttgaagtgagcttgatcacaccactgcactccagcctgagcaaaaagagtgagaccctgtctcaaaaaacaaaaataaataaaatgcagacttgattgtctaagtggaatatctcaaaaataaatgggacaaatctagagccattctcaacaggaggttattagcctccctggggacatgtctgaggacatttcttgtgattgttggctagaggccagggatactgcattctacaatgcacaggataaccccccacacacacacacaaaaagaactatccatatcaaaaaacaaatcatgctaaggatgaaaaaccctgattaaaaccaggtgattaaagttggatgggagaagggcattctacatagattctgatagaatcagagtatagtttgcctattcttctgcagcgaacattcagcaggtaagatcattgaaaaagttgcactgggaaggatcataaagattgtggaggtggtatttgagggttagtgcggagggttgggggcagtgttgcggagtagagccacattccccttcagattatatgcaaatatttgcatgtgcatttttgatagggaagtacgggtatagctttcttgagctttcaggcggttctgacatccagaaaaggtagcaatttacttatcttacccttgccatcattttataggtgagaaaactaaggctagataggtaaagtgactttactaaggtcatggaaaaactagtggcaacttttgtaaacctggagttatttcttttattcccaattttggtgccatgaaatagatgagaagaaaactgagacaaaggttaggttacttccccacattccaaaccaggcagttaactgagatggtttggaaacaaaagtaataggacttaagacttttgctctaacttactgatacctacattttcctgcctttaactttaaaatgtataaggggtatggttttagaatctcttaagggtgtttgaatttttctttaagccttgaagactttgatgtagaggaagaagatgaagaagccctaatagaacagagaagaatccaaaggcaggcaattgttcaggtatgtgattttaatgaaaaataaccattattgtagtaaaagatttttttgctttaacaaaaatgtagcattaataacagttgaacaggtccttagaaaaggatagtatatataaaattatctttgtgaagtttgaaaaaatgatctttttttagttactaaaactgagatggttgctctttgttggttatacatagaattctggttgtttatacatagaattctgatgtaaacctcttctgtaaaacatgagaatctgaagtttgctttctttttaagttaatgaacacgtatgagtatagaataaactggaggaattttatttagcaaaaaattatgcatgttactgtgtgaataaagtaaatattttaatatttagtaatggcaagttttgtaatgtgaatatggtggtttaaatgaaacatttgaaaaataattttaagactagagccagatgatgaagaagattgggtggggaaagaatgttatacaaagatcttgatacagccatttaattataaggtttggtgacttggaaggttgtcagctcttccttcgaagacaaaaggagaaaacagctgtggcagcttacctaaacacacatagcaaaccataaatcaggtaatagtgtgccacgttggagtgaaggacagaacttgcatcaccagaaaggaagtagggcaaaactaattccggaggaagcttacttttctgggacactggtaaaattgtagttaataaactgatatccctgaagatgtggatgaatctttttttattcttgctcaggtccacaaccccttacctccaacccttggggccatatgtgctttggaactcagaaatttttgagttttagaaaggtgatatggtgcatctattatgtgccatcagtggggtctgcagcagaccccataatcaaacacgttaatatttctacagtgaggcatactgtagtagtcacactggggagaaaataagacaataaatggtgcctcatctgatcaggtccagtgctgccacctgatgaatgtgcactgaagaaagaaaaactttttcagatttttgtgaatttagaaattacataagggattgcagatttgattgaaccaataaataccatttggtttgttacattatttgatacgttctcttaacttttcactgcagcaactcttagccatgaatgtatttggatagcatccaattttatgaaagtattatcttctgtattgttattacagaaatataaataccttgctgaagatagcaacatgtctgtgccatctgaaccaagcagcccccagagcagtacgagaacacgatcaccatctccagatgacattctggagcgagtagctgctgatgttaaagagtatgaacgggaaaatgttgatacatttgaggcctcagtgaaagccaagcataatctaatgacagttgaacagaataatggtgagagagttttgtcctggcgacgcttttctctgaattgttagctctgtaactttataataagagacgttatttggggtgggattaggaaaagtaaaagattagacatgttgcttctgctgaatattgcagtaatataatattaaatatgtccttagaaatgttctctataaatgtgtttttattagttcacatatcctgaatagtatactgaactctcacatattcgttaccttttgttttgcttgctattttaaagcaaatccaattatgattttattccccttctgggtacttgtttgtgtctctgtcagttaagaacattaatgttttaaaacattaaataagaggtttccactttttggttaccccaaaagatagtttgtataggaaaggcagggtaaatacatgtttattattttctttatttaccaatttttagaatacagttggtgtcctaacaacctccagagatgtctaatgagattttgactgttttgttaggtgttcatcatttggtgtcattatgtgcttgatgtgtttcgatctggtgctgttatttttctttctgaagctagattggtctctctaactgggttggggaaaggagccctttttcagttgatttctcttgtccttttgccccagccctttagtattcaatatagctttcttactttctagaacaggaaccagcaaactttttgtctaagaggttagatagtaaatggttgagcctttagtaattatattggccttttcctttacagttccatatagtgaacttgttggagggcagaacctgccacagacaatatatggttattattattattattatttttttttttttttaagagacagagtcttgctctgtcaccgaggctggagtgcagtggcgcgatctcagctcactgcaagctccgcgtcccaggtccacaccattctcctgcctcagcctcccaagtagctgggactacaggcgcctgccaccacgcctggctaatttttgtatttttagtagagatggggtttcaccgtgttagccaggatggtctcgatctcctgacctcgtgatctgcctgtcggcctcccaaagtgctgggattacaggcgtgagccaccacgcccagctgacagtacactgttgaacggacatggctgtgttccagaaaaaactttggcactgaaatttgaatttcatctaattttcacttgccacaaagtattctgttcccccacccccgaacacttacaaatgtaaaagtaggccatacagaaagaagcagccagctagatttggctcacagtctgtatatagtttaccgactcctgctctagcaagatgcacaggtttatcttgtgcatgtcctgcccagagcagaatcagctatttctccaaggatccctggttccatttaataggaaatgccatttagacatcacagcacacttactagtgtctgtaatttctgggcctttgcactggacaaagttaggaagtagatactcttttggaaaggaggagtttacacagatattgccaatttaaaattgagattattggggtttattaacttatgattttatatttctatctcttattacagtgaaaaatttagttcttaacatgattacagataggttatcttgaaacttatacacattagatatcagtatgattatcattactacatatactaactgtggcttaaaatttcagtggttgtttttaggatacattctaagttgtataggcacaattctctgtcttttaaaatcatttgaaatctctgtatggtatgccacaaatttgataggcttaggtttattttcatttgcttttgttttttaggaatcatctttttttcttaataatacattctttcatgtatgcatgtatgtgtgtatatgttgtatcctacctacacacacaaaaccaaactatacatacttagatcgatatacttttcctcactcctttttataggctccgccatagtttattcagtcagactttgatatttgaattgtgtccagtttctgtctattcattgggtactgattataatggtgttgtgcattaagtcattctttaattcttggccactgtgttttacgatagttccctagaagtgggattgctgggtcagaagagggagtgaatatataattttgctatgtattaccaaattccactcttttataagggttgtaccattttgccgtctttctgagtgcttgtatatccagagccttgttaacagaatgttgttgtacttttggatgtttagctagtatcagaggtcagaaattgatacctcattgtagttttaatttgcatttcccttaatgtaagtgataatgagcatgcattcatatggttaaagcgactggatttttttttctagaaaatccttttattttttagccaggttttctgtgggattattggacttttaaagggagagatacatagagatttagatctatagttgaaatattaaccttttgggatttaaggtgcaaataacatgttttaaagatgagcttttattttaatgtgaagtcattgcttagctattagcttattcatgtaaactaagaatagtaaaagttaacattgggtctttcaacttttttttttttttttgagccagagtccaattctgtcgcccaggtggagtgcagtggcgtgatctcagctcactgctacctccctctcccaggttcaagcaattctcctttctcagcctcccaagtagcttggattacaggcacctgccaccatgcccgactaatttttgtatttttagtagagatggggtttcgccttgttggccaggctggtgtcaaactcctgacctcaggtgttccacccacctcagcctcccaaagtgctgggattacaggcgtaagccaccatgcccggccggtctttcagctttctgaaatgcactctgttactaaaaagtgaatacctttatgtatcataaatgttaataaagtgattctaaattgaatactgttgggaaactgatgtgcaagagggcaaaaaagtttgaattactattaatgacttcccattcacttattttgtgttttaaatcatctcttcacttttcaaacattaatgctaatttcctttaaggttcatctcagaagaagttgttggcacctgatatgtttacagaatctgatgatatgtttgctgcgtattttgatgtaagttattttaaatcaagtgttaaaacaaaaaaaaataacaaatatattggtgcgtatatacatatagagaaagaagaataaagcaaatgtaataaatattttgaacagtgtgggtgaaaggaatctgaaaactctactagttttgcatcttataagtctaaaattaatgtcaaaaattttaagacaggtatggcagaacaatttgagagctttataaaagtcaaacaccaaatgataaacatgtcatttgtacagtattgtgtatttaaatacatacacatacatgtggtagttaggtgccataaggagataacagtattttctaggtctttattagaatagactccactttggggcctctatattatattagtaggtgattgagaacttattaatagaatattgaagaattggaaatgttataaggagtagattaagaaattttggtgatttcaccacttttttcttaaatttttattgatgccttatgttggaaaagtcttaaactatgaacgtggtcaaacttggggacattttcaatataaatttcaaaggacatgagaaataagaggccttcataagaggaggtagagaagataaatgtaacagggaaaataaaaatgtggtaagataaatagtcatgtatatgtacacacacacacacacacacacacacacacacacacacacacacagagcaataggaacaccaacctataaatgaattaggagaggatgaaatgagtattgacccagttttggtgtcagtactcatttgcttggttgatattgaagagtcttctgggtatcttggagagtaaggtgcaataaagaatcatcagaagggcctggcacggtggctcacgcctgtaatcccagcactttgggaggccgagacgggtggatcacgaggtcaggagatcgagaccatcctggctaatacggtgaaaccccatctctactaaaaatacaaaaaaataagccggacgtggtggcgggcgcctgtagtcccagctactcgggaggctgaggcaggagaatggcatgaacccgagaggcggagcttgcagtgagcggagatcgcgccactgcactccagcctgggcgacaaagcaagactccgtctcaaaaaaaaaaaaaaaaaaagaataatcaggagtaccatatattcttatttttcaattttccacgtagtgtcaactagtgcagccagtgacttactacatttcatgcatgtatgggaagaatggtataacaaatggtataacagctatagaaatttgtatctggttttgagttattttcttttttttctcttttgttttgagatagggtctccctctgtcctagactaaagtgcagagtgcagtaattagtgacatcatggctcaccgcagccttgaattcctgagctcaagcgatcttcctgcctcagcctaccaaggagctggggctacaaacacatgccactacacctggcgctttttttttgttttttaatttttagtagagaaggggtgtcactgtgttgcccaggctgggaggggtttttgttttttttttttagtgttattttgaatcaagatactttggtctcatgtttcagctatgttggatttacataagtgatagtaagaatttatttaatttggaataaaatgcttttattaaattatatctggtgttacccttttgtgttttaaaggaagtgcgttaaatgtctgacaagtgggtaaactgttcatgttgcctctttaatttcagagtgctcgtcttcgggccgctggcattggaaaagatttcaaagagaatcccaacctcagagataactggaccgatgcagaaggctattatcgtaagttcacattttatattaactttagagttcattgtaacaccatgcaaaagcatgctgcttgatgcaatcacagattattggagaactctgaaaaatcacatcacagtgccatctttaaaaattgtggcacatccaacagctgcatgaactcgtgtgtattctaaaagcagcccagaaacatcacaaatggagtgaggtaaagtcttgatgtacaacctaaatatattcaaaattattttcagccatgagatagtcttccagaaggaaggggtacgtcacttactcgtcttgatctgaaaccaagaaaaacgacaaacaggaaactttggatgccagtcatgcggtatttgtcatgcgggactacaattggaaaaacttaatgttaaaatcatcagcagttgataggacaacaggaactcttgtagtgatctgaagtaggcatgcagcttctaaccacactctgatagagtgatcagtggaggcatggctttgattcttcattgtgtctaggaaaccaaatagtagagatttaacacaatttttaaatgactgcactgtgtttcctactttctgattctatttattatagtcagaattctaatttttcaatttgcctttttaggtgtgaacataggtgaagtcctagataaacgttacaatgtgtatggctacactgggcaaggtgtattcagtaatgttgtacgagccagagataatgcaagagccaaccaagaagtggctgtaaagatcatcagaaacaatgagctcatgtaagttcagaagacgtgaggaaacctttaacagtacggatacttacagaagaacatatttttaaactatttttttaaagtgatacatgatagaatgtgtaaaacaagtattgcaattataaagtaatggaaacagttgttttttttttttttttttttttttttgagacggagtctcgctctgtcgcccaggctggagtgcagtggcgcaatctcggctcactgcaagctccgcctcccgggttcacgccattctcctgcctcagcctcccaagtagctgggactacaggcgcccgccactacgcccggctaattttttgtatttttaatagagacggggtttcaccgttttagccgggatggtctcgatctcctgacctcgtgatccgcccgcctcggcctcccacagtgctgggattacaggcgtgagccaccgcgcccggccaggaaacagttgtttttgactggattttaaaattatagccatatgtcatatgtactggaacaacaggctgattatttttaattcagtgcattttagtacctactgtatgcaccaataacaacttaaactccttccctctattgtctgtcttatgccgtcctttgctttatctgaagacgagttgagaaatgaaaggatcatgttgattagctgtcactatggtgacctgcaaaaaagtgaaaatttatcagagtgatgagaatctgtctttttttaatttgttcctgttttcctccaatagaaagttaattgccatatctgtgtgttttaataccacacactgagctggtattaaaatgaatttaatgtgtttgaaatgttggaaataagtgttaagtttagattgccctaggcttagaaaggaccttgttttgatgggaagccccaacttctgtatttagctgcttactataaaatgtagcttattgacaaattgtaacaagaatttcctcagataaccaagtgttaaaatttgataaggcatccattactatgttctgtttttttgttgttgtttgtttgtttgtttgttttgagacagggttttgctctgtcacccaggctggagtgcagtggcatggtggcatgatctcggctcactgtaacctctgcctcctgggttcaagggattttgcttcctcagcctcccaagtagctgggattacaggcgcccaccaccacgcccagctaattcttgtattttcactagagacagggtttcgccatgttggccaggctggtcttgaactcctgacctcaagtgatccacctgcctcggcctcccaaagtgctgggatcacaggcatgagccactgcacctggcccattactgcattcttaaaggaaccaagactagtgtgcagtgtggttccattttgttaaaaataatgtcaagatgtgggttttgttttgtttttttgtttgtttttgtttgtttgtttgtttgagatggagttttgctcttgttgcccaggctggcgtgcggtggtgagatctcagctcaactgcaaaccctccgtctcccgggttcaagccattctcctgcctcagcctcccgagtagctgggactacaggcacccgccaccacccttggctaatttttgtatttttagtagagacagggtttcgctatgttgaccaggctggtcttgaactcctcacctcaagtgatccacccacttctgcctcccaaaattctgggattacaggcatgagctaccgcgcctggcctgttttgagataaaatatacaagattgatattccttcaggcaaaatcaaaattttttaaaaatcaaaataagatgggtttgttcctcaatgtttctgttttgtgcagtgattattttggaaattaactctatgtatgataatgatagttgactaactataaagtgttatgtgaatgatatatagagacaccatttctcagtagatttattagtacttaaaaatatacagacttctcccacacatcacctgatcgtcatactggggctagcaaatacattatttagtgctcctaaattctgtatatattcaattttaccccaatttttttttttattttaggcaaaagactggtttaaaagaattagagttcttgaaaaaacttaatgatgctgatcctgatgacaaatttcattgtctgagactcttcaggcacttctatcacaagcagcatctttgtctggtattcgagcctctcaggtacaatgtcaaaacgtgtgcattaaattgcaaatttaacttcttcatctttacgatctcattttggataaatgctgtaacagattttctgcgtatttgatttgttttatccacacagctctggtttttgtttttaacttgtggttaacagctagtctttgttgttgttgttgttgttgttgttgagacagtctcactctgttgctcctcccggagtacagtggtgcagtcttggctcgctgcaacctccacctcccgggttcaacagagagtctctcttaaaatgaaatacttcaaggaaggaatttttatcttcaacagtgtggctttgttgtgttttcagatgtgaatctattctaaaatcgaaatgggagttttaccttgcatatctttcttcttacctatttagaaaatttgaatttattcagaaactgtgttatatacatacaatttgatatgctctcctttcaatataaaatgatttatcaaatgtgggggtggttcttacatatttttattttgcgcttgattttactttatgcttgcaaatgtttttgcctttttatatttccattttgcattttaactcctattttgttttctttttttaattttctcctaaaagcatgaacttacgagaggtgttaaaaaaatatggtaaagatgttggtcttcatattaaagctgtaagatcctatagtcagcagttgttcctggcattgaaactccttaaaagatgcaatatcctacatgcagatatcaagccagacaatatcctggtaagtcaaacagccaagctgcgctgtacatcttgaacatacatttcacttcttactagcagtaatattattactatgagaaacgacatcttagaagcatagttcagtatattaataacctatttcaaatgactaatacttttttatctttcttggaaatcggacagtgaaattttattgacaagtatgaagaaaaaggaaatgtacaattgtccctttttttctcttttgactgatagatttaaagtgtgcaccaatcctggaatgctttactgtagtaatgagtttcttctgttatctttagaaaaatgctgcacatgttgctgttttgaaataaggagtgtccgtactcttctgtttgctaattttatagctccctaagctgtggctcctgggggctcaaacacaataaagctcagttgtggttaggtattatatttaaaggcatcgcttttgaagtttattttattttatttttaaactttcaagttcaggggtacatgtgcaggcttgttacataggtaaacttgtgtcatggagggtttgtacccacttttcctgatcctctcccatctctcaccctccagcctctgacggaccccagtgtgtattgttcccctgtgtgtccatgtgttctcaccttttgaaaccttaattctcttcgactagtgacttctggtggtaacagcagatttcacaatgtatatgtttttaaaattttgaaatacatacatattatcatagtgatgtgattaatgcacacacacactcctcccctccctggccccattactttaccctgttttgtggccttcagtttgggtcgtgttcgcaacttggagaattccagcttatatgctggtaacattctgcatttcatttttttaaaatgggttctctttatcagttctcctacagttgatgcctaggagagatcctgaagactaaaagctaagcgtgtaaggtgttctttattgggaactcttggagctataacaaaataaatacttttgattttttcttttgttttttttgttttgttttgttttgttttgaggtaaggtcttgttctgtcacccaggctagagtgcagtggtgccataatggctcactgtaacctccaactcctaagcccaagcagttctcctgcctccgcctccccagtagctgggactacccacaggcacatgccactgtgactgcctaattaaaaaaaattttttttagagatgaggtttggctggtctcaaactcctgggctcaagcaatcctcctgctgcagcctcccaaagtgctgggattataggtgtgagctaccatgcttggccaagataaattctttaaaaaatggtgatctcattaaagtttaaggagtttttttttaatcaataactaagctatttaattcatatttctttttcttttttgttaatatcttaaaatatttcctttatttccttccagacaaccacattagtaatgaggtgtattccatttttatgtttggtctgaattattattgtattgtatatctaatgtaacttggagttaggggagctgagtaatttcattgaaatggtaggtacattaaaaatgaagtataaatttgtgtggccaatttcatagttgatttttacctcagttttttttatgagacacagccttgccctgttaccaggctggagtgcaatggcgtgatctcggctcactgcaacctccaactccctggttcaagcatttctcctgcctcagcctcccgagtaactgggattacaggcaggggccaccacgcccagctaatttttgtattttagtagagacggggtttcaccatgttggccaggatggtcttaatctcctaacctcgtgatctgcccgcctcgtcctcccaaagtgctgggattataagcgtgagccaattttttgttttttaattgtgaaatacatggttcatgtcaaagaatatgcaaaacatgtacaatttaaaaggtcatttacagtgagcgtctttgtgaccattgtggaggttaaagaataacacatttgccagtgtcacagaagaaactcttgtttttaaaacctaatgctaaactagtataggttttcacatacatttaagaaatgttttcccgtcttcctggggaaggaaaaaatagaccttaatgacggagctgatttttgttaatgaaaatccaaagcctttagctcgtaatttcaggtatcagtgtggtttaagtaccacattcctcatgacaggagcagaagttgtgtagcaaactgaagtgcatatgagtatggataccctgctattctttaaggcattttagccagcccaagagttccactgatggattctaattttaaaatggttcttaagttttctgtgggtattgaaactgcttaagtagctgaattcagcttacactttaaaaagttttaaaataacttttctattttaagatgcttttctgattcccaagatgaaaagaatagtaatcaatgtgggagttaaaaataatcatttctgttcctattaatagcttaactctggatatcatttataatagtccagtctccccatagagactgcctaaggctatagtgttatgctgctttggggtgggagcagtaggccaagttcaagtcccaactcggaatttgtgtgtgtctcttttgaaggggggaagggactctggaatatgaattatcttcacttgttaatcctgaacatgcctctgactcatgagtggcagcagtcatgggagcaactccagcctttctcagcagatgtcactattactgtgtatgttgaagtatttacaaaggaaaaaagaaacaaatgactaatatagagttcatgtttatcagttttgccagatatatttaacattttcttgactaataccttctttatatttgagggatttaatattttttagacttgaagtgattgctaaatttgggatcatatagcagcttcggatgaagaatattttgtttttgtccaagtttattctgaatcacccttctgctttcattgccattgtaattctctggcaactgaaagttaagtctgattccttagttataaaacttgactttattcaggtattcagggtctttttagaagatgctttgcttcatgaaattagatttttctctcagtaccccacccttttaaaaatgcagttgttaaaattaaatgtactttgtgatatccatttcctcactgaaaacagtttttactcattgtaatgaatatttgatacatattaacttttcatagttaggaaattgaattaaaaataaatagaaaaggaatttttaaatgaatgtctttgttctcagtattggaattaataaaacttttcaaagccaataatttttatttatttgtattaattattcctggcttgaattaaattcccttgaaaaaatgttttgcaggttaatgaatccaaaactattttaaagctttgcgattttgggtcggcttcacatgttgcggataatgacataacaccttatcttgtcagtagattttatcgtgctcctgaaatcagtaagtttcttaatgttctttgacctgggccatcatatgtggtggaaaccgcatacttaatgtctaagcactgttttccatcacacttcagcagctgcacgagttcattcatgaggaagggaaccatagcaagttcatcctcctcaggtggaatgaaggtagttgtgacaggagtcttgatcatgtcgggcaagagtagcaaaacagttgtggaaaatcctcgactttagaagactgctcttgattattcaaggtctgattatcacatttatggattgtatgggacctttgttttttcctgttgccttggttgaggctgattagcacctccaccaaaggcgaaatgagaaaagagaagaaatacatattttcttttgccctttaagttcctcccctacacctccattttttaaggtttttaagtttgagtctctattaagaattagtgggaaagaacacaaaactaattgtcaaactaaggcatgaagattgtggttatagtccaagctaaggtagccagcccctcattaatggaaataaaaattaatagtcgtcagttttctctatcctcgtatattaaaactttgattttgttttcagttataggtaaaagctatgactatggtatagatatgtggtctgtaggttgcaccttatacgaactctatactggaaaaattttattccctggcaaaaccaataaccatatgctgaagcttgcaatggatctcaaaggaaagatgccaaataaggtaagacattagcatgagcttctttaaggtcttagtttcttattaactgacaagactgctgacacttgctcaccactagtgagctataaaacaaaaatttcagaaaggtgggtagatggctatcatgatttcttagggtctttcccttttctggtgttttaaattagtggttctaatcagccaagcgctaaggataagagaacttgttcaatgatggacagagagcagcaatattttggggatacacccttatgggtaaaagtttcaaaatgtttggaagacagaatggaaaaagatgtaagttgaattaggtaaaatacaagaacatgcttagtggtcagagaatgaataggtgaatattagatattgtaagaggaacttgatgttaattaatttattaaagattggaggttatttgagaaagtaaggtacctttcttggtaccttttcttatttaatatctttctaactcaccgctgatacttcagctataatgctagtttctgtttaacatgaagcaagaatgtaagcatttattaaagtatctgagggccataacttagctttttttttttttttttttttgagacggagtcttgctttgtcgcccaggctgcagtgcagtggcgcgatctcagcttactgcaagctctgcctcccgggttcatgccattctcctgcctcagcctcccgagtagctataggcatgagccaccgcacccggctgtaacttagctttttaagatttcagcctatttgctgaatttctaaagatttacacatttttcgtaaaggtcagaaaactgtatggttttcagttgtgttttgttgttgttgttgttttgagactggatcttgctctgtgtcccagactggagtacagttatagctcactgcagccttgaaccgaacccctgggctcaagcagttctcctgcctcagtctccaatgtagctgggactacaggcatgtgccaccacaaccagttaatttatttaataatttttttgtagagatggagtttcactatgttgaccaggctgatttgtacatattgtccaaattctattaggttggactttttttagaataagttacataaaaatgagctatgttggtattagttttaatgaagtctgacctgtatcagggctgttggaacataattagtaaagtggcattaggttccctaactgccaaggagaaaaaacctgagttttgtgatatttttaggaagaaataatttaaagtctttgttgactctccaattttaaatagtgaaaggacaatttgatgttataattgttttaagtcactgcctggacaaatataatttcatgttattaagtagttttaggtacagcattggtatttgcttttgcaaagatgttaatgaattcctgggatcaagggaatctgagatcaaacaaacctacagagactaaataacatacttatttgacttattgtatattaattaaattgttagtaggcctgtttcataatagttcaaaacccaagtttttgttttgttttgtagatgattcgaaaaggtgtgttcaaagatcagcattttgatcaaaatctcaacttcatgtacatagaagttgataaagtaacagagagggtaagtgttttaaatgcagcatgcaatagttattttattgttaactgagtactaaatcatacgagctggtgaattaaaaaaaaaacaaaaacccaaaagtaagtatttcctttttgctgtcgaccaattcctaaataaaacacatcagaccatggaaaagatggagggattttaaaatgtttttctagcataattaatttatttttattataggtcatatttaggccctcgtcacatcttctttggattactttcttggtctggcttcccatccagctttcttattgctgctagagtgatgtttctgaaaacatatctggtcatgttcctatccctgcttaaaaacctttgttggctccctgttacctatgaaataatatttaagttcctcagaatgacaaatccaactgctttcttcagttttcagacctctcttcagtacattcagaacccccacctttccacatttggccagaaggcgtgctggttcagacctttgtgcctttgctaacagacctccctgagcttagtcatttcctgtgctgcctcacccccaaccccctaaaaaatgtatcatcttcaagcctcagctgaaatacacattctgtatgagccttttgaaaactcccagattgaagtaatgatttccttatttttgtcccattattatagcatatgtccctgtctttgtcagagcacttaataatacttcagggtattaacttattcacatgtctgtcacttaccacttcaaggtagggaaagtacagtgcaaacagctcatgcttatcttattgtaaattttcattgctaacttggagttgactttttttttcttttttgagactgagtctcgctctgtcacctgtcacccagggtgaagtgcaatggcacgatcttggctcacagcaacctctgcctcccaggttcaagcaattctcatgcctcagcctcccgagtagctgggattacaattgtgtgccaccacgcctggataatttttgtatttttagtagagatgggttttgcagtgttgcccaggctggtctcgaattcctgagctcaagtgatccacctaccttgggcttccaaagtgctgggattacaggtgtgagccaccgcgcccagcccagagttggcatcaactttttcatttaagttttttggttaccttttaaaaagatgtacagcatagaggaaaccacagcaaagttttaaatgaatagatgatgatgatacagtcatgcgtcacataaccacagcatacactcacacacatctagggtaagtagtatggccttttgcttctaggcctgaactgtaagttggtggactgaatactgtaggcacttttgcaagtggtaagtgtatgtatgtatctaaacatagaaaagggagagcaaaaatacggtattccaatcttaagggaccactgtcatatatgcagtctgtcattgcccaaaatgtgcactgtgtgtatatattttgtatgtatatgcatgtttttaatatttttgatagaccccaaaacaatctgatttaagttgtatatgcttagtaacttatttagagatacgcattttaaaaattatttttaggagaaagttactgttatgagcaccattaatccaactaaggacctgttggctgacttgattgggtgccagagacttcctgaagaccaacgtaagaaagtacaccagctaaaggacttgttggaccagattctgatgttggacccagctaaacgaattagcatcaaccaggccctacagcacgccttcatccaggaaaaaatttaaacaagatgaagaaactccaagggtttgagtaaatacaaagactgaagaaatttcacagcagtttattaatgtatataaacttataaatatttctccagcaaatttgaggaagcatgatatatttgaattaacaccaagggtgatatttcttttagagatgttagttaatctgttttgtgtcttacgtgaaatttcactgtagactgttttaaattgccaagactgcacaaaattacagtgctaatgtatatggttgcagttcacataaagacaaaagcatctgttatgaaatgagtagtaatattgggtggttgatttgttcttagcagacttggcttcattttggtcttgagataaaatggccagcataaatgctgtttatattcacgttttcctaggtgtgtgtgtgcaggccacagcagcatgcccttggtgtagtcagtgccgaaaggggtctgttccttcttgagcctgcctgcagggatggtctccttttaaagcaggttgtgtgcagcattcagtacactgaaggtaagctaaaccatcaacatctctggtgttttaagatgttattttattggaacaactgacaaatgagggatgttagctttgtggcagaattccctgcatgtgtgataactgatcttgttttattttttggcattgcaactgtggcatagttacaatttctgtttgttcatcacatttaaaattggaagagaacgcgcttgatggatagagcgccttcagtgtactgtttcttattaactttactttttttaaatcaacttgctatagactttatatacattttgttaaatatagttcctagtgacatagaaacgatgcgtagttttcatttactaattacaaatgttgaggcctaattctgaaagtcctcatatttaaaggctagacaacgtaatgaaatttttaactatttgtatgtcattttgaaagtgtactgctttatggtaaaagtgtttttcatttgttcattgttttcattatttgtgatcatgttgtctttcaatacaggcataaaccttccactcttgaacaaagcagctgctttttaaaagcggtaattgcttctttaccttttatttcttttgtaaatgaagcttttctttaagaatgtgactttaaagtgttgtctattgcataaaacagttgacactcacttattgtaaagtgaagattgttctactgcatgtgaagtggaccatgcagatttctgtatgttctcagtatgcatcactagataataaagtcttttgtgaacaaggcatttgtagccatttttaaaagtttttgtcttcagtgctggtaagtcaggtaaaccataaatagttaaaagcaaccttttgtttttttcctgaaagtttttaattgaaagtattattagttaaagatgtaaacctagccaaaattaccagtttattaataattaggatcctaattatttcaaaaaatcctacaaatattgtcagctttcagtgtagtgagattattcctgtaggttatggggtataattcaggatttaactaatgtttctgctattttctcacttttccttttgatggtgcggaaagagaaaaaggaaaacggggcacaggccattcgacgccttctccaaggggtctgatttgctgagacaccagcttcaccttcttaacaaggttatttctgacagcatgtgtagataaacatttagcaacaatttaagacaaaatcgtttaaatcagcttggttttgcaacacaaaggaatttgtattattaacatggtagaagagaatttttcagaaatatatgtaatctttgctgtttggggggtaaaattaatgcttgtctccctgaggaatatggaaaataatcagattttaggggtttaaataatatttttaaattgtaaatgggatttttttattcacccaggcacctaattacaacaagcatgcacattttggtgcattcaagaatggaaaatcagaatagcagcattgattcttctggtgggttttgctccatttaaagacatgaaatgaactacagccaggaaggtgatagatgatataataagccacctctgaacctacaccccgtctcttcacggtttagacttactaaaataaatacaaggtgattttcatcttcaggtagagtgaagccttttaattaaggcgtcacaggtgcagctattctaccttaatgaaatgggtagtgattttcccaccattatttatttcggtgataatatgctgcatattcaagtctcttgtagttattttcacccaaagtagttgacaatttgatgcttctggtgatgtttatggcttcattttatgtaattttttaagtaagttccactagaaacagttcatcttataccttcaaaactgttacctgttctttaaaaaacaaagttgcttgttacttgttctttgtgttttaggtgcagctcagtggaagatgatgacaaccagaagacatgagctaaggtttctgtcctataaaagatttattaaaaaacaatccttcatttattttttgtctaattttttagttttcagcattatgatttgggttttattggtgtttggtatttagaattagtgctgttgtggagtgcgtctgtaaagtgcttgttttatcatacttcctgcctctcccctcccccagtttctcctcccctaaaataaaaatagtggtcaactttagtaatataaaaggctgctggatgctgagattccacataacacatggttgtcaaaattggatgttaaggattcttagaaaaacagcaaccaccagaatagcatatatctgaaagtagtcttcagctttaggcagatgcaaaagaatacaaactggaatattaagaatactgttcaactcctttagtatctgttccccaacttaccctgtagaaacctcgttattaaccagtgttccagtcttaaagtagacaaaatattcagagccattttttttaagggaaatgaaaaagatactctgggttttttatactccccaatttagcatatctagactacctatttgaaaggaaccctatcaactg

SEQ ID NO: 8099 - DNA, 32186 bp, Homo sapiens
  SITE (1161): n equals a,t,g, or c
aaaagaaaagagattattgatgcttctgataaagagggtatgtctccagcaaaaagaactaaacttgatgatttagctttgctagaagacttggaaaaacagagagccttgattaaggccgaacttgataatgagttaatggaaggaaaggtccagtctggtatggggctcattttgcaaggttatgagtctggctctgaagaagagggggaaattcatgaaaaggcaagaaatggaaataggtctagtactagatcttcaagtacaaaggggaaacttgaacttgtggacaataaaattactacaaagaaacgaagtaaaagcagatccaaagaacggactagacataggtctgataaaaagaaaagtaaggggggtattgaaatcgttaaagagaaaacaactaggagcaagtcaaaggagaggaaaaaatctaaaagcccatccaaaagaagtaagtctcaagatcaagcaaggaaatcaaaatcccctacccttagaaggcgatctcaagagaaaattggtaaggccagatctcctactgatgataaggttaaaattgaagataaaagtaaatcaaaagataggaaaaaatccccaattataaatgaaagtagaagtcgcgatcgaggtaaaaaatccagatccccagttgatttaagaggtaaatccaaagacagaaggtcacggtccaaagagagaaaatcaaaacggtctgaaactgataaagaaaagaagccaattaaatctccctctaaagatgcttcatctgggaaagaaaataggtcacccagcagaagacctggtcgtagtcctaaaagaagaagtttgtctccaaaaccacgtgataaatcaagaagaagcaggtctccacttttgaatgatagaagatctaagcagagcaaatccccctcgcggacactgtctcctgggagaagagccaagagccgatccttagaaagaaaacgacgagaaccagagaggagacgactttcttctccaaggtaacttgtgtacaaaatgttaaagctttttaccagtgcatgagattttaaacggaaaactagaacttgtggaccattaaaaatgaagtagtaagtaaaaataaaaataaatgaagtagtaatgagtttcataattttaagtaacccaatccattanccatgttaatatttgcacttttttcgatgagtattttaagtataggtgtttaacaaatactgagcttgatgatagaattgggttttttcacattcttgatttaatacctagtttgctaaggcactcctttcaatccatgtaatttggctgataaatcttcattgggggcgtttagagagaggattattacttcatgaacagtgtaggctgaaactcttaactttgaaaagggggaaaggtaatcagtttaacaattgtgttctgttcattctcttgtatttgcatgagttttaaattttaacagtataaatagaaaccaataccaatattttttggtccccaaagtataattaaaatggaaaattttgtattaatacatataatctcattgttgaaaagtagtatctcttaagcttaagaagaatagtatatgaaattattttgtactatttgaataatatattgtcttagttcttataaatcctcatgtgattatcttaactcatgaggtgaaggggctctcatacctaatttataaatgaaatagaatcagagaatgtatataatttacgtaggatcatagaacggaagtatttgcggggaggagtgtttataccacttaaactactttagaaacagatttcttaatgtcttttttgtatttagtatttaagtattatgaaattgccagctaggttttgcttattaaaagagtattggcttatactatataaggatgttattaattcctagccgtttactgtgttcataataatattttctgtgaatgggtataaatataaactcaccctgaaagtgaagtcatcatattttcagagaaatttcaaattttatttccaagtgctgtgtcttaagagcgtcttgattctttacttctgagtggcactgtaatgaaatagcccctttttcctttggcttcctggattgaggcagtgattagttttactgattctgttatctcaagtgcttcttaattatcttggtggtctttcagtttgctttgtttgaagagcaaattctgaggagtttattaaggactagagctgagtatttgaaacaaaaatatttttttaaattacagaagtgatgcatacttacttattaaagagaaatccaaataagcctgtaaattgtctcccttttcatttctccactaccactccttagaaatttactttatcttaggtctttccttgtacagacaataacatgaatataagggaatttttttttttaacaaaactggagtcatattattcatattcacatgtggcttgcttttttcaggaaacatttctgcgacaaaacatatagattgtttttcattctgcctgacagcaactggtatttcagtgtagatgtattatagtatcattctcctattgaaactgatgaaaaatttaggttggttccagtttttcactattatatgcgaagatgtgccttggttatatgtgaggtttctttatagaatagactcatagaagtggacttgcaaagtctcagagtatgtacatttacattgtagaaagttattgctaaatttccatccaggaaagttaggtcaatttctacttctacttctatgactatgtgaactgccccttttcctgaaactgtattaggaaagtttaggaaaacctttattaccaggataccatatagtattttgtcactcttaaaaacagaacaaaaaacccaaaaattgttttaatcgaaatttcttaggtgactagtgagggtgaacatttttattttctttatttttatttatttattttattttattttattttttgagatggggtcttgctctgttgccaggctggagtgcagtggcgtggtctcggctcactgcaacctctgcctcctgggttcaagcgattctcctgcctcagcctcccaagtagctgggattacagacacgcaccaccatgcccagctaatttttgtatttttagtagagacagggtttcaccatgttggccaggctggtcttgaacttctgacctcgtgatccgcccacctcggcctcccaaagtgttgggattacaggcctgagccactgtttattttcattgcattttagcagacaacactctgttctttttatactagtttactttatcccatccatttatatatacatatatatacacatatatgtgtgttgtttttgttttgttttgttttgtttttttgagatggagtctcgctctgtcgcccaggctggagtgcagtggtgtgatcttggctcactgcaacctctgcctcctgggttcaagcaattctcctgcctcagcttccccgagtagctgggactacaggtgtgcgccaccacgcccggctaatttttttttttttttttttttttttttttttttgatatttttagcagagatgaggtttccccacgttggccaggctggtctcgaactcttgacctcaggttatctgcctgccttggcctcccaaagtgttgggattacaggcgtgagccaccgcacccagcccatttatattttttaactggtcttttgaggctgtgcgtgtatgtgagcagattaaataaaagagtttcctcagatggccctatcaagaagtaagcactaccaagaagtaagcactacagatctgaatcaaagtctaccttgctcattttggctggatcagagaaggattcttgggttctgtataccgtgctgaaacatgcaaggcaggttgtgtttttaggtttttattaaatgaggaaggcaagttgcagtggctcacgcctgtgttccagcactttggggaggctgagacgggtggatcacctgaggtcaggagttcgagactagcttgaccgacatggagaaatcctgtctctactaaaaatataaaattagctggacgtggttgctcatgcctgtaatcccagctactcaaggctgaggcgggagaatctcttgaagccgggagacagaggttgcagtgagccgaggtcacaccattgcactacagcctgtgcaacaagagcaaaactccatctcaaaaaataataataataataaatgaggaaaatactgtaatattatttgattatggagacaaacctatttacaatctgactgttcagattgaatagttgtgaccaaacctggaataacattaagaaatgttcaaaacctgttttaaaaaattaagctgtagaaaggcctgttgtaatacaaatatcacattaaacaagagtaaaactcactgaaaggtacttgtgtgataagtgttgaaaagttgggtttttgtggggtttttctggggagactggaggcagggtcacactctgtcacccaggctggagtgcagtggcatgatctctgctcactgcaacctctgcctcccaggcttacacaatcctcccacttgagcctccctattagttgggactataggcacatgccaccacacttggctaattttgatattttttgtagagatagggtttcgccatgttacccaggctggtctcaaactcatgagcttaagtgatccatctgcctcagcttcccacagtgctgggattacaagtgtgagccaccacacctagctattgtttttgtttttttgagacaagttctcactctgtcacttgggctgcagtggcacaaacacagccactgcagcctcaacctcatgggctcaggcggtcctccctcagcctctgaaagtgctgggattgcaagtgtaaaccattgtgcctggcctattatacttgacattaaaaagaagatttttgcccgggcatggtgggtcacacctgtaacctcagcacttttggaggccaagggagaaccacttgaggccaggagttcgagaccagcctgggcaacatagtgagacccccatcactacaaaacaaaatattagtcaggtgtggtggcatgcccttatggttccagctgctcaggggggctgaagtggaaggattgcctcagcctgggaggtcaaggctgcagtgacccgtgtttgcgccactgcactccagcctgggtgacagagttagaccctgtctcaaaaaaaaaaaaaaaaaaaaaagatccttaattggagaaatgtcaggatgtagaaagaaaaagtcgtcaatgaaaatggaatatttgagtaaatggagtattatactcacttggggaggttttatttgagttggtttatttgaaattagaatcagtgactttaccggtatgaataacctttagtaatttttcaaactgtgggaccagaggaaataagacctttcattgtttgcctgcaataacaccaaaatatcactgtagtcacctgagtaagttttgttacaaaacacattaatcaaagttcactttctttaggctaatgtgccttttcttacagatgttctttgcatatagaaaaaaatcatttactttgatttatatttcttttaacttgcatttgatccccttaagaacacgacctcgagatgatatcctcagtagacgtgaaagatcaaaagatgccagccccatcaatagatggtctccaacccgaagaagaagtagatctcccattagaaggaggtctcgttccccactcagacgtagcaggtctccaagaagaagaagcagatctcctcggagaaggtaaagacatttcatccttgtgattcattaaactctgaatgtttttgaaccaccagtgagctcacttggtaggttttcttttagaccagttttctctgaaaaatcgtagttgtgttcccatagtttccttttaccagcaatctctacacatgggttttcttttatatcgtttcctttgaattttaaacaaatcattgctcatttaggatgcaataaaattagtcttttaaaaataggacttttttctctcttttatcaatcaatactaaatgagccagacttagggatttttttttttttttaaccagcaaggtagatcatgtagtagtaaatatatagcccagtttcttacattttatattaattttgcatattgatagttactgtagacttaggcaaaggcctatttaatttgccatagaaaccattttatctgaagcatatgtagtcagtaataggttaaaaaggtggtttataaagcagggaatcattttttaaaattcatacatacatgaaatattttaatataaaacataaatgggtatttgtttgccaatcttttaacatttttaattgaagtaataaatgaatataatttttaagaaacaaaggcttatattatagccatctttacatatctctcagaatttttgtatgctgtattcctagaaatggaaatgcatggtctgagtgcactctggtcaatgaggggttttattttattttattttattttattttttgacagtctcactctgttgcccacgctggagtgcaatggcgcgatctcactgcaacctccacctcctgagttcaagcaattctgcctcagcctctcaagtagctgggactagaggtgcccatgccaccatgcccagcttttttttttttgtatttttctaaatagagatggagtttcactatgttggtcaggctggtctcgaactcctgaccccaaatgatccgctcgtcttggcccactgcacccagccacaatgagggtttttaatactaccgcttactcatgtttcgcttttgcctaatttcatcacacttttttgttcttctagagtcagtataatcattgtgatcctgtatgtattcattgctgagcaaatagttgggagaggagggaagagaggacctcccttctgacactgctagtcttcttgctccaagctgatctcaagacttgcttttttctctcttccctttttataaaaaatgtcttgtgttctgaaatttattatgtgcctcggtatgtagatctttatccccatttattttgctaattactagataggccctttaaagcagggagtttatggccttctgggaaatttttgtgcttttttttttctttctttctttctttctgttttttccaattggaccttctatattgttccacgtattaacattttattcatgttttctggaaatagtattttctgtctctcagacaatagcgaggttattgtgtgagatttttgttctttatagttttctttgctatattgtgtttcttcccagattccttttgctgcatgtttacttttcatttgaagacttttctcacacagctggatccttcattgctgcctattctgagttaatatttaggtactgagaaagctgaatgggatttttcttctattgtgacagtgtaggacttgtcagctagtggttatcacttcagagtaattagatatttttggatattagtgactgtagatgtattttcttgggctatgagttttccggaatcctttcatttcctcctgggaaatagacctggctaccagtagagttctcttccttcataatgtaaacttccttataatctgtctatctttggtatgtgcctctcagcatctggagtgaccaacccttctctagaaagcaaatcttaagtgttctgctagaatgtgaagggagtggttgacattttccactgagttggggaggggactgtaccgagtctggctgtttataaaggctttcaaccaattctgtcctcagctcttacctcacaccatcttgcagaggatagggagtctccaattcctgaggctttctgggggtgttgtgacatgttctgactgtttctgatttaccttgtgtgttcatgttggaccaatattcagctcaatttgatctgttactattctttactccaatttgcacattctaagattttattctcatctctgctatcatctctcttgacattctccttgcctgagggttttcctcccctccccaccccacccctcccttcccctccgatctttctcttttctctctctcctctcccctctcccttctcctcttttcttttctttcttgaggtaggatcttgctctgttacccaggctggagtgcagtgtgatcacgactcactgcagcctcaacctcctgggctcaaggaatcctcccggtagctgggactataggcacgcaccaccacacccagctaatttttttgtatgttttgtggagacagggttttgccatgttgcccaggctggtctcaaactcccgagctccctgcctgccttggcctcccaaagtgctgagattatatgtgtgtaccactgcacccagcccccagtttttttttttttaagtactcatttactgtcatgttagtgaggtttctttaagttgagctcattgaaacatgcatataacttacataaagtaaaatgctttttgttgtaaagttgtgtgaattttgacagacacataagtcacactcaagttagagaacgttttcatcactccaagttcccttttgccccttttcggtctctcccttcactccagtgcctgtgtatacaaccgtggtgctgtacgaatacaaagaaacagtaggtatttatccccatagagcttatattcaagttcaagttcatatccatgggaagaatttcttagttcagagtttgataaggagtaggtatgttttagttatcttcagctaagctggttatctcagtctttctgatgttctgttcttttacttaaaattttcaaacgacctttttaaaaaatagactatattttagaagagttttaggtttacagcaaaattgagtagaaagtagaatttctatatatcccctgtgcccacacatgcatgcctttcccactttgacatttaaaaaaatgtatacctgtcttttcttctttaaatagggacagaggtcggaggagcagatcacgcttgcgaaggcggtctcgatcacgcggtggtcgtagacgaaggagcagaagcaaagtaaaggaagataaatttaaaggaagtctttctgaaggaatgaaagttgagcaggaatcttcgtctgatgataagtaagaatagaacttacccataactttgtttttccagtttagagaagtcttatttgacttggaaattgttaaataatatccacctaaatattataagtggctccattaatttggctctgaatttaaaagttagtcttttgtgaatattgtgtaggttgtatcacagagttagtaagcggttttctgaatgtaggtgtttcagctttggctggagtgaacattgggccttcattttattgtgagcctaccctttgtttttattatgaacaatacatacattagtcctgccggccagagttactagattttgggaggaattttctataaaagtttagaactttgagtttgtgttagatgatacatactttgcaattgaggctattttgtgatgagtgtcctttttacaacatgaaaatgtagaaacatttcaagtgtctaatacaattgtggggacatttttccctgtctctacaaaaaatacaaaaattagccaggcctggtggcacacgcctgtagtcaggaggctgaggtgggaggatcacttgaccctggggggagaaggttgaagtgagcttgatcacaccactgcactccagcctgagcaaaaagagtgagaccctgtctcaaaaaacaaaaataaataaaatgcagacttgattgtctaagtggaatatctcaaaaataaatgggacaaatctagagccattctcaacaggaggttattagcctccctggggacatgtctgaggacatttcttgtgattgttggctagaggccagggatactgcattctacaatgcacaggataaccccccacacacacacacaaaaagaactatccatatcaaaaaacaaatcatgctaaggatgaaaaaccctgattaaaaccaggtgattaaagttggatgggagaagggcattctacatagattctgatagaatcagagtatagtttgcctattcttctgcagcgaacattcagcaggtaagatcattgaaaaagttgcactgggaaggatcataaagattgtggaggtggtatttgagggttagtgcggagggttgggggcagtgttgcggagtagagccacattccccttcagattatatgcaaatatttgcatgtgcatttttgatagggaagtacgggtatagctttcttgagctttcaggcggttctgacatccagaaaaggtagcaatttacttatcttacccttgccatcattttataggtgagaaaactaaggctagataggtaaagtgactttactaaggtcatggaaaaactagtggcaacttttgtaaacctggagttatttcttttattcccaattttggtgccatgaaatagatgagaagaaaactgagacaaaggttaggttacttccccacattccaaaccaggcagttaactgagatggtttggaaacaaaagtaataggacttaagacttttgctctaacttactgatacctacattttcctgcctttaactttaaaatgtataaggggtatggttttagaatctcttaagggtgtttgaatttttctttaagccttgaagactttgatgtagaggaagaagatgaagaagccctaatagaacagagaagaatccaaaggcaggcaattgttcaggtatgtgattttaatgaaaaataaccattattgtagtaaaagatttttttgctttaacaaaaatgtagcattaataacagttgaacaggtccttagaaaaggatagtatatataaaattatctttgtgaagtttgaaaaaatgatctttttttagttactaaaactgagatggttgctctttgttggttatacatagaattctggttgtttatacatagaattctgatgtaaacctcttctgtaaaacatgagaatctgaagtttgctttctttttaagttaatgaacacgtatgagtatagaataaactggaggaattttatttagcaaaaaattatgcatgttactgtgtgaataaagtaaatattttaatatttagtaatggcaagttttgtaatgtgaatatggtggtttaaatgaaacatttgaaaaataattttaagactagagccagatgatgaagaagattgggtggggaaagaatgttatacaaagatcttgatacagccatttaattataaggtttggtgacttggaaggttgtcagctcttccttcgaagacaaaaggagaaaacagctgtggcagcttacctaaacacacatagcaaaccataaatcaggtaatagtgtgccacgttggagtgaaggacagaacttgcatcaccagaaaggaagtagggcaaaactaattccggaggaagcttacttttctgggacactggtaaaattgtagttaataaactgatatccctgaagatgtggatgaatctttttttattcttgctcaggtccacaaccccttacctccaacccttggggccatatgtgctttggaactcagaaatttttgagttttagaaaggtgatatggtgcatctattatgtgccatcagtggggtctgcagcagaccccataatcaaacacgttaatatttctacagtgaggcatactgtagtagtcacactggggagaaaataagacaataaatggtgcctcatctgatcaggtccagtgctgccacctgatgaatgtgcactgaagaaagaaaaactttttcagatttttgtgaatttagaaattacataagggattgcagatttgattgaaccaataaataccatttggtttgttacattatttgatacgttctcttaacttttcactgcagcaactcttagccatgaatgtatttggatagcatccaattttatgaaagtattatcttctgtattgttattacagaaatataaataccttgctgaagatagcaacatgtctgtgccatctgaaccaagcagcccccagagcagtacgagaacacgatcaccatctccagatgacattctggagcgagtagctgctgatgttaaagagtatgaacgggaaaatgttgatacatttgaggcctcagtgaaagccaagcataatctaatgacagttgaacagaataatggtgagagagttttgtcctggcgacgcttttctctgaattgttagctctgtaactttataataagagacgttatttggggtgggattgggaaaagtaaaagattagacatgttgcttctgctgaatattgcagtaatataatattaaatatgtccttagaaatgttctctataaatgtgtttttattagttcacatatcctgaatagtatactgaactctcacatattcgttaccttttgttttgcttgctattttaaagcaaatccaattatgattttattccccttctgggtacttgtttgtgtctctgtcagttaagaacattaatgttttaaaacattaaataagaggtttccactttttggttaccccaaaagatagtttgtataggaaaggcagggtaaatacatgtttattattttctttatttaccaatttttagaatacagttggtgtcctaacaacctccagagatgtctaatgagattttgactgttttgttaggtgttcatcatttggtgtcattatgtgcttgatgtgtttcgatctggtgctgttatttttctttctgaagctagattggtctctctaactgggttggggaaaggagccctttttcagttgatttctcttgtccttttgccccagccctttagtattcaatatagctttcttactttctagaacaggaaccagcaaactttttgtctaagaggttagatagtaaatggttgagcctttagtaattatattggccttttcctttacagttccatatagtgaacttgttggagggcagaacctgccacagacaatatatggttattattattattattatttttttttttttttaagagacagagtcttgctctgtcaccgaggctggagtgcagtggcgcgatctcagctcactgcaagctccgcgtcccaggtccacaccattctcctgcctcagcctcccaagtagctgggactacaggcgcctgccaccacgcctggctaatttttgtatttttagtagagatggggtttcaccgtgttagccaggatggtctcgatctcctgacctcgtgatctgcctgtcggcctcccaaagtgctgggattacaggcgtgagccaccacgcccagctgacagtacactgttgaacggacatggctgtgttccagaaaaaactttggcactgaaatttgaatttcatctaattttcacttgccacaaagtattctgttcccccacccccgaacacttacaaatgtaaaagtaggccatacagaaagaagcagccagctagatttggctcacagtctgtatatagtttaccgactcctgctctagcaagatgcacaggtttatcttgtgcatgtcctgcccagagcagaatcagctatttctccaaggatccctggttccatttaataggaaatgccatttagacatcacagcacacttactagtgtctgtaatttctgggcctttgcactggacaaagttaggaagtagatactcttttggaaaggaggagtttacacagatattgccaatttaaaattgagattattggggtttattaacttatgattttatatttctatctcttattacagtgaaaaatttagttcttaacatgattacagataggttatcttgaaacttatacacattagatatcagtatgattatcattactacatatactaactgtggcttaaaatttcagtggttgtttttaggatacattctaagttgtataggcacaattctctgtcttttaaaatcatttgaaatctctgtatggtatgccacaaatttgataggcttaggtttattttcatttgcttttgttttttaggaatcatctttttttcttaataatacattctttcatgtatgcatgtatgtgtgtatatgttgtatcctacctacacacacaaaaccaaactatacatacttagatcgatatacttttcctcactcctttttataggctccgccatagtttattcagtcagactttgatatttgaattgtgtccagtttctgtctattcattgggtactgattataatggtgttgtgcattaagtcattctttaattcttggccactgtgttttacgatagttccctagaagtgggattgctgggtcagaagagggagtgaatatataattttgctatgtattaccaaattccactcttttataagggttgtaccattttgccgtctttctgagtgcttgtatatccagagccttgttaacagaatgttgttgtacttttggatgtttagctagtatcagaggtcagaaattgatacctcattgtagttttaatttgcatttcccttaatgtaagtgataatgagcatgcattcatatggttaaagcgactggatttttttttctagaaaatccttttattttttagccaggttttctgtgggattattggacttttaaagggagagatacatagagatttagatctatagttgaaatattaaccttttgggatttaaggtgcaaataacatgttttaaagatgagcttttattttaatgtgaagtcattgcttagctattagcttattcatgtaaactaagaatagtaaaagttaacattgggtctttcaacttttttttttttttttgagccagagtccaattctgtcgcccaggtggagtgcagtggcgtgatctcagctcactgctacctccctctcccaggttcaagcaattctcctttctcagcctcccaagtagcttggattacaggcacctgccaccatgcccgactaatttttgtatttttagtagagatggggtttcgccttgttggccaggctggtgtcaaactcctgacctcaggtgttccacccacctcagcctcccaaagtgctgggattacaggcgtaagccaccatgcccggccggtctttcagctttctgaaatgcactctgttactaaaaagtgaatacctttatgtatcataaatgttaataaagtgattctaaattgaatactgttgggaaactgatgtgcaagagggcaaaaaagtttgaattactattaatgacttcccattcacttattttgtgttttaaatcatctcttcacttttcaaacattaatgctaatttcctttaaggttcatctcagaagaagttgttggcacctgatatgtttacagaatctgatgatatgtttgctgcgtattttgatgtaagttattttaaatcaagtgttaaaacaaaaaaaaataacaaatatattggtgcgtatatacatatagagaaagaagaataaagcaaatgtaataaatattttgaacagtgtgggtgaaaggaatctgaaaactctactagttttgcatcttataagtctaaaattaatgtcaaaaattttaagacaggtatggcagaacaatttgagagctttataaaagtcaaacaccaaatgataaacatgtcatttgtacagtattgtgtatttaaatacatacacatacatgtggtagttaggtgccataaggagataacagtattttctaggtctttattagaatagactccactttggggcctctatattatattagtaggtgattgagaacttattaatagaatattgaagaattggaaatgttataaggagtagattaagaaattttggtgatttcaccacttttttcttaaatttttattgatgccttatgttggaaaagtcttaaactatgaacgtggtcaaacttggggacattttcaatataaatttcaaaggacatgagaaataagaggccttcataagaggaggtagagaagataaatgtaacagggaaaataaaaatgtggtaagataaatagtcatgtatatgtacacacacacacacacacacacacacacacacacacacacacacagagcaataggaacaccaacctataaatgaattaggagaggatgaaatgagtattgacccagttttggtgtcagtactcatttgcttggttgatattgaagagtcttctgggtatcttggagagtaaggtgcaataaagaatcatcagaagggcctggcacggtggctcacgcctgtaatcccagcactttgggaggccgagacgggtggatcacgaggtcaggagatcgagaccatcctggctaatacggtgaaaccccatctctactaaaaatacaaaaaaataagccggacgtggtggcgggcgcctgtagtcccagctactcgggaggctgaggcaggagaatggcatgaacccgagaggcggagcttgcagtgagcggagatcgcgccactgcactccagcctgggcgacaaagcaagactccgtctcaaaaaaaaaaaaaaaaaaagaataatcaggagtaccatatattcttatttttcaattttccacgtagtgtcaactagtgcagccagtgacttactacatttcatgcatgtatgggaagaatggtataacaaatggtataacagctatagaaatttgtatctggttttgagttattttcttttttttctcttttgttttgagatagggtctccctctgtcctagactaaagtgcagagtgcagtaattagtgacatcatggctcaccgcagccttgaattcctgagctcaagcgatcttcctgcctcagcctaccaaggagctggggctacaaacacatgccactacacctggcgctttttttttgttttttaatttttagtagagaaggggtgtcactgtgttgcccaggctgggaggggtttttgttttttttttttagtgttattttgaatcaagatactttggtctcatgtttcagctatgttggatttacataagtgatagtaagaatttatttaatttggaataaaatgcttttattaaattatatctggtgttacccttttgtgttttaaaggaagtgcgttaaatgtctgacaagtgggtaaactgttcatgttgcctctttaatttcagagtgctcgtcttcgggccgctggcattggaaaagatttcaaagagaatcccaacctcagagataactggaccgatgcagaaggctattatcgtaagttcacattttatattaactttagagttcattgtaacaccatgcaaaagcatgctgcttgatgcaatcacagattattggagaactctgaaaaatcacatcacagtgccatctttaaaaattgtggcacatccaacagctgcatgaactcgtgtgtattctaaaagcagcccagaaacatcacaaatggagtgaggtaaagtcttgatgtacaacctaaatatattcaaaattattttcagccatgagatagtcttccagaaggaaggggtacgtcacttactcgtcttgatctgaaaccaagaaaaacgacaaacaggaaactttggatgccagtcatgcggtatttgtcatgcgggactacaattggaaaaacttaatgttaaaatcatcagcagttgataggacaacaggaactcttgtagtgatctgaagtaggcatgcagcttctaaccacactctgatagagtgatcagtggaggcatggctttgattcttcattgtgtctaggaaaccaaatagtagagatttaacacaatttttaaatgactgcactgtgtttcctactttctgattctatttattatagtcagaattctaatttttcaatttgcctttttaggtgtgaacataggtgaagtcctagataaacgttacaatgtgtatggctacactgggcaaggtgtattcagtaatgttgtacgagccagagataatgcaagagccaaccaagaagtggctgtaaagatcatcagaaacaatgagctcatgtaagttcagaagacgtgaggaaacctttaacagtacggatacttacagaagaacatatttttaaactatttttttaaagtgatacatgatagaatgtgtaaaacaagtattgcaattataaagtaatggaaacagttgttttttttttttttttttttttttttgagacggagtctcgctctgtcgcccaggctggagtgcagtggcgcaatctcggctcactgcaagctccgcctcccgggttcacgccattctcctgcctcagcctcccaagtagctgggactacaggcgcccgccactacgcccggctaattttttgtatttttaatagagacggggtttcaccgttttagccgggatggtctcgatctcctgacctcgtgatccgcccgcctcggcctcccacagtgctgggattacaggcgtgagccaccgcgcccggccaggaaacagttgtttttgactggattttaaaattatagccatatgtcatatgtactggaacaacaggctgattatttttaattcagtgcattttagtacctactgtatgcaccaataacaacttaaactccttccctctattgtctgtcttatgccgtcctttgctttatctgaagacgagttgagaaatgaaaggatcatgttgattagctgtcactatggtgacctgcaaaaaagtgaaaatttatcagagtgatgagaatctgtctttttttaatttgttcctgttttcctccaatagaaagttaattgccatatctgtgtgttttaataccacacactgagctggtattaaaatgaatttaatgtgtttgaaatgttggaaataagtgttaagtttagattgccctaggcttagaaaggaccttgttttgatgggaagccccaacttctgtatttagctgcttactataaaatgtagcttattgacaaattgtaacaagaatttcctcagataaccaagtgttaaaatttgataaggcatccattactatgttctgtttttttgttgttgtttgtttgtttgtttgttttgagacagggttttgctctgtcacccaggctggagtgcagtggcatggtggcatgatctcggctcactgtaacctctgcctcctgggttcaagggattttgcttcctcagcctcccaagtagctgggattacaggcgcccaccaccacgcccagctaattcttgtattttcactagagacagggtttcgccatgttggccaggctggtcttgaactcctgacctcaagtgatccacctgcctcggcctcccaaagtgctgggatcacaggcatgagccactgcacctggcccattactgcattcttaaaggaaccaagactagtgtgcagtgtggttccattttgttaaaaataatgtcaagatgtgggttttgttttgtttttttgtttgtttttgtttgtttgtttgtttgagatggagttttgctcttgttgcccaggctggcgtgcggtggtgagatctcagctcaactgcaaaccctccgtctcccgggttcaagccattctcctgcctcagcctcccgagtagctgggactacaggcacccgccaccacccttggctaatttttgtatttttagtagagacagggtttcgctatgttgaccaggctggtcttgaactcctcacctcaagtgatccacccacttctgcctcccaaaattctgggattacaggcatgagctaccgcgcctggcctgttttgagataaaatatacaagattgatattccttcaggcaaaatcaaaattttttaaaaatcaaaataagatgggtttgttcctcaatgtttctgttttgtgcagtgattattttggaaattaactctatgtatgataatgatagttgactaactataaagtgttatgtgaatgatatatagagacaccatttctcagtagatttattagtacttaaaaatatacagacttctcccacacatcacctgatcgtcatactggggctagcaaatacattatttagtgctcctaaattctgtatatattcaattttaccccaatttttttttttattttaggcaaaagactggtttaaaagaattagagttcttgaaaaaacttaatgatgctgatcctgatgacaaatttcattgtctgagactcttcaggcacttctatcacaagcagcatctttgtctggtattcgagcctctcaggtacaatgtcaaaacgtgtgcattaaattgcaaatttaacttcttcatctttacgatctcattttggataaatgctgtaacagattttctgcgtatttgatttgttttatccacacagctctggtttttgtttttaacttgtggttaacagctagtctttgttgttgttgttgttgttgttgttgagacagtctcactctgttgctcctcccggagtacagtggtgcagtcttggctcgctgcaacctccacctcccgggttcaacagagagtctctcttaaaatgaaatacttcaaggaaggaatttttatcttcaacagtgtggctttgttgtgttttcagatgtgaatctattctaaaatcgaaatgggagttttaccttgcatatctttcttcttacctatttagaaaatttgaatttattcagaaactgtgttatatacatacaatttgatatgctctcctttcaatataaaatgatttatcaaatgtgggggtggttcttacatatttttattttgcgcttgattttactttatgcttgcaaatgtttttgcctttttatatttccattttgcattttaactcctattttgttttctttttttaattttctcctaaaagcatgaacttacgagaggtgttaaaaaaatatggtaaagatgttggtcttcatattaaagctgtaagatcctatagtcagcagttgttcctggcattgaaactccttaaaagatgcaatatcctacatgcagatatcaagccagacaatatcctggtaagtcaaacagccaagctgcgctgtacatcttgaacatacatttcacttcttactagcagtaatattattactatgagaaacgacatcttagaagcatagttcagtatattaataacctatttcaaatgactaatacttttttatctttcttggaaatcggacagtgaaattttattgacaagtatgaagaaaaaggaaatgtacaattgtccctttttttctcttttgactgatagatttaaagtatgcaccaatcctggaatgctttactgtagtaatgagtttcttctgttatctttagaaaaatgctgcacatgttgctgttttgaaataaggagtgtccgtactcttctgtttgctaattttatagctccctaagctgtggctcctgggggctcaaacacaataaagctcagttgtggttaggtattatatttaaaggcatcgcttttgaagtttattttattttatttttaaactttcaagttcaggggtacatgtgcaggcttgttacataggtaaacttgtgtcatggagggtttgtacccacttttcctgatcctctcccatctctcaccctccagcctctgacggaccccagtgtgtattgttcccctgtgtgtccatgtgttctcaccttttgaaaccttaattctcttcgactagtgacttctggtggtaacatgcagatttcacaatgtatatgtttttaaaattttgaaatacatacatattatcatagtgatgtgattaatgcacacacacactcctcccctccccggccccattactttaccctgttttgtggccttcagtttgggtcgtgttcgcaacttggagaattccagcttatatgctggtaacattctgcatttcatttttttaaaatgggttctctttatcagttctcctacagttgatgcctaggagagatcctgaagactaaaagctaagcgtgtaaggtgttctttattgggaactcttggagctataacaaaataaatacttttgattttttcttttgttttttttgttttgttttgttttgttttgaggtaaggtcttgttctgtcacccaggctagagtgcagtggtgccataatggctcactgtaacctccaactcctaagcccaagcagttctcctgcctccgcctccccagtagctgggactacccacaggcacatgccactgtgactgcctaattaaaaaaaattttttttagagatgaggtttggctggtctcaaactcctgggctcaagcaatcctcctgctgcagcctcccaaagtgctgggattataggtgtgagctaccatgcttggccaagataaattctttaaaaaatggtgatctcattaaagtttaaggagtttttttttaatcaataactaagctatttaattcatatttctttttcttttttgttaatatcttaaaatatttcctttatttccttccagacaaccacattagtaatgaggtgtattccatttttatgtttggtctgaattattattgtattgtatatctaatgtaacttggagttaggggagctgagtaatttcattgaaatggtaggtacatttaaaaatgaagtataaatttgtgtggccaatttcatagttgatttttacctcaattttttttatgagacacagccttgccctgttaccaggctggagtgcaatggcgtgatctcggctcactgcaacctccaactccctggttcaagcagttctcctgcctcagcctcccgagtaactgggattacaggcaggggccaccacgcccagctaatttttgtattttagtagagacggggtttcaccatgttggccaggatggtcttaatctcctaacctcgtgatctgcccgcctcgtcctcccaaagtgctgggattataagcgtgagccaattttttgttttttaattgtgaaatacatggttcatgtcaaagaatatgcaaaacatgtacaatttaaaaggtcatttacagtgagcgtctttgtgaccattgtggaggttaaagaataacacatttgccagtgtcacagaagaaactcttgtttttaaaacctaatgctaaactagtataggttttcacatacatttaagaaatgttttcccgtcttcctggggaaggaaaaaatagaccttaatgacggagctgatttttgttaatgaaaatccaaagcctttagctcgtaatttcaggtatcagtgtggtttaagtaccacattcctcatgacaggagcagaagttgtgtagcaaactgaagtgcatatgagtatggataccctgctattctttaaggcattttagccagcccaagagttccactgatggattctaattttaaaatggttcttaagttttctgtgggtattgaaactgcttaagtagctgaattcagcttacactttaaaaagttttaaaataacttttctattttaagatgcttttctgattcccaagatgaaaagaatagtaatcaatgtgggagttaaaaataatcatttctgttcctattaatagcttaactctggatatcatttataatagtccagtctccccatagagactgcctaaggctatagtgttatgctgctttggggtgggagcagtaggccaagttcaagtcccaactcggaatttgtgtgtgtctcttttgaaggggggaagggactctggaatatgaattatcttcacttgttaatcctgaacatgcctctgactcatgagtggcagcagtcatgggagcaactccagcctttctcagcagatgtcactattactgtgtatgttgaagtatttacaaaggaaaaaagaaacaaatgactaatatagagttcatgtttatcagttttgccagatatatttaacattttcttgactaataccttctttatatttgagggatttaatattttttagacttgaagtgattgctaaatttgggatcatatagcagcttcggatgaagaatattttgtttttgtccaagtttattctgaatcacccttctgctttcattgccattgtaattctctggcaactgaaagttaagtctgattccttagttataaaacttgactttattcaggtattcagggtctttttagaagatgctttgcttcatgaaattagatttttctctcagtaccccacccttttaaaaatgcagttgttaaaattaaatgtactttgtgatacccatttcctcactgaaaacagtttttactcattgtaatgaatatttgatacatattaacttttcatagttaggaaattgaattaaaaataaatagaaaaggaatttttaaatgaatgtctttgttctcagtattggaattaataaaacttttcaaagccaataatttttatttatttgtattaattattcctggcttgaattaaattcccttgaaaaaatgttttgcaggttaatgaatccaaaactattttaaagctttgcgattttgggtcggcttcacatgttgcggataatgacataacaccttatcttgtcagtagattttatcgtgctcctgaaatcagtaagtttcttaatgttctttgacctgggccatcatatgtggtggaaaccgcatacttaatgtctaagcactgttttccatcacacttcagcagctgcacgagttcattcatgaggaagggaaccatagcaagttcatcctcctcaggtggaatgaaggtagttgtgacaggagtcttgatcatgtcgggcaagagtagcaaaacagttgtggaaaatcctcgactttagaagactgctcttgattattcaaggtctgattatcacatttatggattgtatgggacctttgttttttcctgttgccttggttgaggctgattagcacctccaccaaaggcgaaatgagaaaagagaagaaatacatattttcttttgccctttaagttcctcccctacacctccattttttaaggtttttaagtttgagtctctattaagaattagtgggaaagaacacaaaactaattgtcaaactaaggcatgaagattgtggttatagtccaagctaaggtagccagcccctcattaatggaaataaaaattaatagtcgtcagttttctctatcctcgtatattaaaactttgattttgttttcagttataggtaaaagctatgactatggtatagatatgtggtctgtaggttgcaccttatacgaactctatactggaaaaattttattccctggcaaaaccaataaccatatgctgaagcttgcaatggatctcaaaggaaagatgccaaataaggtaagacattagcatgagcttctttaaggtcttagtttcttattaactgacaagactgctgacacttgctcaccactagtgagctataaaacaaaaatttcagaaaggtgggtagatggctatcatgatttcttagggtctttcccttttctggtgttttaaattagtggttctaatcagccaagcgctaaggataagagaactttttcaatgatggacagagagcagcaatattttggggatacacccttatgggtaaaagtttcaaaatgtttggaagacagaatggaaaaagatgtaagttgaattaggtaaaatacaagaacatgcttagtggtcagagaatgaataggtgaatattagatattgtaagaggaacttgatgttaattaatttattaaagattggaggttatttgagaaagtaaggtacctttcttggtaccttttcttatttaatatctttctaactcaccgctgatacttcagctataatgctagtttctgtttaacatgaagcaagaatgtaagcatttattaaagtatctgagggccataacttagctttttttttttttttttttgagatggagtcttgctttgtcgcccaggctggagtgcagtggcgcgatctcagcttactgcaagctctgcctcccgggttcatgccattctcctgcctcagcctcccgagtagctataggcatgagccaccgcacccggctgtaacttagctttttaagatttcagcctatttgctgaatttctaaagatttacacatttttcgtaaaggtcagaaaactgtatggttttcagttgtgttttgttgttgttgttgttttgagactggatcttgctctgtgtcccagactggagtacagttatagctcactgcagccttgaaccgaacccctgggctcaagcagttctcctgcctcagtctccaatgtagctgggactacaggcatgtgccaccacaaccagttaatttatttaataatttttttgtagagatggagtttcactatgttgaccaggctgatttgtacatattgtccaaattctattaggttggactttttttagaataagttacataaaaatgagctatgttggtattagttttaatgaagtctgacctgtatcagggctgttggaacataattagtaaagtggcattaggttccctaactgccaaggagaaaaaacctgagttttgtgatatttttaggaagaaataatttaaagtctttgttgactctccaattttaaatagtgaaaggacaatttgatgttataattgttttaagtcactgcctggacaaatataatttcatgttattaagtagttttaggtacagcattggtatttgcttttgcaaagatgttaatgaattcctgggatcaagggaatctgagatcaaacaaacctacagagactaaataacatacttatttgacttattgtatattaattaaattgttagtaggcctgtttcataatagttcaaaacccaagtttttgttttgttttgtagatgattcgaaaaggtgtgttcaaagatcagcattttgatcaaaatctcaacttcatgtacatagaagttgataaagtaacagagagggtaagtgttttaaatgcagcatgcaatagttattttattgttaactgagtactaaatcatacgagctggtgaattaaaaaaaaaacaaaaacccaaaagtaagtatttcctttttgctgtcgaccaattcctaaataaaacacatcagaccatggaaaagatggagggattttaaaatgtttttctagcataattaatttatttttattataggtcatatttaggccctcgtcacatcttctttggattactttcttggtctggcttcccatccagctttcttattgctgctagagtgatgtttctgaaaacatatctggtcatgttcctatccctgcttaaaaacctttgttggctccctgttacctatgaaataatatttaagttcctcagaatgacaaatccaactgctttcttcagttttcagacctctcttcagtacattcagaacccccacctttccacatttggccagaaggcgtgctggttcagacctttgtgcctttgctaacagacctccctgagcttagtcatttcctgtgctgcctcacccccaaccccctaaaaaatgtatcatcttcaagcctcagctgaaatacacattctgtatgagccttttgaaaactcccagattgaagtaatgatttccttatttttgtcccattattatagcatatgtccctgtctttgtcagagcacttaataatacttcagggtattaacttattcacatgtctgtcacttaccacttcaaggtagggaaagtacagtgcaaacagctcatgcttatcttattgtaaattttcattgctaacttggagttgactttttttttcttttttgagactgagtctcgctctgtcacctgtcacccagggtgaagtgcaatggcacgatcttggctcacagcaacctctgcctcccaggttcaagcaattctcatgcctcagcctcccgagtagctgggattacaattgtgtgccaccacgcctggataatttttgtatttttagtagagatgggttttgcagtgttgcccaggctggtctcgaattcctgagctcaagtgatccacctaccttgggcttccaaagtgctgggattacaggtgtgagccaccgcgcccagcccagagttggcatcaactttttcatttaagttttttggttaccttttaaaaagatgtacagcatagaggaaaccacagcaaagttttaaatgaatagatgatgatgatacagtcatgcgtcacataaccacagcatacactcacacacatctagggtaagtagtatggccttttgcttctaggcctgaactgtaagttggtggactgaatactgtaggcacttttgcaagtggtaagtgtatgtatgtatctaaacatagaaaagggagagcaaaaatacggtattccaatcttaagggaccactgtcatatatgcagtctgtcattgcccaaaatgtgcactgtgtgtatatattttgtatgtatatgcatgtttttaatatttttgatagaccccaaaacaatctgatttaagttgtatatgcttagtaacttatttagagatacgcattttaaaaattatttttaggagaaagttactgttatgagcaccattaatccaactaaggacctgttggctgacttgattgggtgccagagacttcctgaagaccaacgtaagaaagtacaccagctaaaggacttgttggaccagattctgatgttggacccagctaaacgaattagcatcaaccaggccctacagcacgccttcatccaggaaaaaatttaaacaagatgaagaaactccaagggtttgagtaaatacaaagactgaagaaatttcacagcagtttattaatgtatataaacttataaatatttctccagcaaatttgaggaagcatgatatatttgaattaacaccaagggtgatatttcttttagagatgttagttaatctgttttgtgtcttacgtgaaatttcactgtagactgttttaaattgccaagactgcacaaaattacagtgctaatgtatatggttgcagttcacataaagacaaaagcatctgttatgaaatgagtagtaatattgggtggttgatttgttcttagcagacttggcttcattttggtcttgagataaaatggccagcataaatgctgtttatattcacgttttcctaggtgtgtgtgtgcaggccacagcagcatgcccttggtgtagtcagtgccgaaaggggtctgttccttcttgagcctgcctgcagggatggtctccttttaaagcaggttgtgtgcagcattcagtacactgaaggtaagctaaaccatcaacatctctggtgttttaagatgttattttattggaacaactgacaaatgagggatgttagctttgtggcagaattccctgcatgtgtgataactgatcttgttttattttttggcattgcaactgtggcatagttacaatttctgtttgttcatcacatttaaaattggaagagaacgcgcttgatggatagagcgccttcagtgtactgtttcttattaactttactttttttaaatcaacttgctatagactttatatacattttgttaaatatagttcctagtgacatagaaacgatgcgtagttttcatttactaattacaaatgttgaggcctaattctgaaagtcctcatatttaaaggctagacaacgtaatgaaatttttaactatttgtatgtcattttgaaagtgtactgctttatggtaaaagtgtttttcatttgttcattgttttcattatttgtgatcatgttgtctttcaatacaggcataaaccttccactcttgaacaaagcagctgctttttaaaagcggtaattgcttctttaccttttatttcttttgtaaatgaagcttttctttaagaatgtgactttaaagtgttgtctattgcataaaacagttgacactcacttattgtaaagtgaagattgttctactgcatgtgaagtggaccatgcagatttctgtatgttctcagtatgcatcactagataataaagtcttttgtgaacaaggcatttgtagccatttttaaaagtttttgtcttcagtgctggtaagtcaggtaaaccataaatagttaaaagcaaccttttgtttttttcctgaaagtttttaattgaaagtattattagttaaagatgtaaacctagccaaaattaccagtttattaataattaggatcctaattatttcaaaaaatcctacaaatattgtcagctttcagtgtagtgagattattcctgtaggttatggggtataattcaggatttaactaatgtttctgctattttctcacttttccttttgatggtgcggaaagagaaaaaggaaaacggggcacaggccattcgacgccttctccaaggggtctgatttgctgagacaccagcttcaccttcttaacaaggttatttctgacagcatgtgtagataaacatttagcaacaatttaagacaaaatcgtttaaatcagcttggttttgcaacacaaaggaatttgtattattaacatggtagaagagaatttttcagaaatatatgtaatctttgctgtttggggggtaaaattaatgcttgtctccctgaggaatatggaaaataatcagattttaggggtttaaataatatttttaaattgtaaatgggatttttttattcacccaggcacctaattacaacaagcatgcacattttggtgcattcaagaatggaaaatcagaatagcagcattgattcttctggtgggttttgctccatttaaagacatgaaatgaactacagccaggaaggtgatagatgatataataagccacctctgaacctacaccccgtctcttcacggtttagacttactaaaataaatacaaggtgattttcatcttcaggtagagtgaagccttttaattaaggcgtcacaggtgcagctattctaccttaatgaaatgggtagtgattttcccaccattatttatttcggtgataatatgctgcatattcaagtctcttgtagttattttcacccaaagtagttgacaatttgatgcttctggtgatgtttatggcttcattttatgtaattttttaagtaagttccactagaaacagttcatcttataccttcaaaactgttacctgttctttaaaaaacaaagttgcttgttacttgttctttgtgttttaggtgcagctcagtggaagatgatgacaaccagaagacatgagctaaggtttctgtcctataaaagatttattaaaaaacaatccttcatttattttttgtctaattttttagttttcagcattatgatttgggttttattggtgtttggtatttagaattagtgctgttgtggagtgcgtctgtaaagtgcttgttttatcatacttcctgcctctcccctcccccagtttctcctcccctaaaataaaaatagtggtcaactttagtaatataaaaggctgctggatgctgagattccacataacacatggttgtcaaaattggatgttaaggattcttagaaaaacagcaaccaccagaatagcatatatctaaaagtagtcttcagctttaggcagatgcaaaagaatacaaactggaatattaagaatactgttcaactcctttagtatctgttccccaacttaccctgtagaaacctcgttattaaccagtgttccagtcttaaagtagacaaaatattcagagccattttttttaagggaaatgaaaaagatactctgggttttttatactccccaatttagcatatctagactacctatttgaaaggaaccctatcaactgtcttatgtacgttacatgattttcctacactctgtaattttgctgaggtgcaatttggaactctgcaagacctactagattgaatttatttagtgaatgctcctgaataaatgtgcattcctcttttagagtagctgtatgcttttcaaatgctatctgccgtgaattttttgcttttattatactttatggcaaaagtgatatcaagtgattgtcagacttgagggctcatagaag

SEQ ID NO: 8100 - DNA, 375 bp, Homo sapiens
cttacccatggttggtgagttttttttaaatgttaaagagattgtgagtagacagatgaattcttaggttgcaaggataaacttactaaaagtataggagtatataatatgaagacctgacaaaataatccatagcttcctccaaaaatagtatgatggcctgaatctagataatttaaggccacttttggtctgatattctaggatgatggtttattatggagtaacttttaaagagaaagttaaatagtgcttttgaaccagtatttaacttgggattcttaaacaccaagggctcgacaacgtaatttagaatcataaactttttaactcagcataagccaaacatttaagcacagaatcccccactttatt

SEQ ID NO: 8101 - DNA, 728 bp, Homo sapiens
atttataatagtccagtctccccatagagactgcctaaggctaaagtgttatgctgctttggggtgggagcagtaggccaagttcaagtcccaactcggaatttgtgtgtgtctcttttgaaggggggaagggactctggaatatgaattatcttcacttgttaatcctgaacatgcctctgactcatgagtggcagcagtcatgggagcaactccagcctttctcagcagatgtcactattactgtgtatgttgaagtatttacaaaggaaaaaagaaacaaatgactaatatagagttcatgtttatcagttttgccagatatatttaacattttcttgactaataccttctttatatttgagggatttaatattttttagacttgaagtgattgctaaatttgggatcatatagcagcttcggatgaagaatattttgtttttgtccaagtttattctgaatcacccttctgctttcattgccattgtaattctctggcaactgaaagttaagtctgattccttagttataaaacttgactttattcaggtattcagggtctttttagaagatgctttgcttcatgaaattagatttttctctcagtaccccacccttttaaaaatgcagttgttaaaattaaatgtactttgtgatacccatttcctcactgaaaacagtttttactcattgtaatgaatatttgatacatattaacttttcat

SEQ ID NO: 8102 - DNA, 205 bp, Homo sapiens
caggctctccctctcgggttcacaccattctcctgcctcagcctcctgagtagctgggactacaggtgcccgccaccatgcctggctaattttttgtatttttagtagagacggggtttcaccatgttagccaggatggtctcgatatcctgaccttgtgatcctcccgcctcagcctcccaaagtgctgggattacaggcgtga

SEQ ID NO: 8103 - DNA, 375 bp, Homo sapiens; identical to SEQ ID NO: 8100

SEQ ID NO: 8104 - DNA, 205 bp, Homo sapiens; identical to SEQ ID NO: 8102

SEQ ID NO: 8105 - DNA, 1033 bp, Homo sapiens
ccagaagtcaccagaataccccctcacaagagactactcagcaaatggaaacctcaacaagtgaatctgagagacagccagtgaaattgggagccgatttctcaggctccagtttatagaggaggcttttttttattaatggaagcacaaaatcctgctttatttctacccacagccttatcgctgcctgacgtattatacggctgaggaaagatcaagaatgtgagggaaaccccatgcccttaacaaaaacttctcttctgaaagacaagagctcaccccaagaaaaaaaggactgggattgaacagagcaggaacacttggggtaaaggagaaaagctttagatacaagaaagaggtggccaatcccagaaagtacaggagcaaggactacacagaccgaccacagcaggggaaaggcctctccagctgtggagttcagaaagctactctgacccacaactgcccgtacgtagaacatcctgctgaaagaacaggaaaagatgctgatcacaccctgtacaaagatattgcggggagaaagtgaaccagataacctcccacagataatgaaagcacaccagaaaaacattcctccaggcagatgaaaactgtgtcctgatgtttctgagtgatctcaaaggaattagaaaaacgacagaaactactaaagaatggtataaattaaaaatgtttaaaaagctcaggttaaaagtgactagtcaacagaaaaatatgaagagagttgacaggactcaggaggaaataagaaaaaaaaaaccagatatttctgaaatgaaaatcaggaacacaagaatgaaaatacattaaggtaaataaggaagagataggagaaaaatggagtcagaggagactcaaacaaatagagaagaagttgtccagagaagggataaagaagttaggcaaagaagatcaaacttacgtataatcgtagtgccatcccacacccttcccagaaaaaagcagtggaataacagataatagaaactgtgattcaggaaaactgataaaa

SEQ ID NO: 8106 - DNA, 1031 bp, Homo sapiens
ccagaagtcaccagaatacccctcacaagagactactcagcaaatggaaacctcaacaagtgaatctgagagacagccagtgaaattgggagccgatttctcaggctccagtttatagaggaggcttttttttattaatggaagcacaaaatcctgctttatttctacccacagccttatcgctgcctgacgtattatacggctgaggaaagatcaagaatgtgagggaaacccatgcccttaacaaaaacttctcttctgaaagacaagagctcaccccaagaaaaaaaggactgggattgaacagagcaggaacacttggggtaaaggagaaaagctttagatacaagaaagaggtggccaatcccagaaagtacaggagcaaggactacacagaccgaccacagcaggggaaaggcctctccagctgtggagttcagaaagctactctgacccacaactgcccgtacgtagaacatcctgctgaaagaacaggaaaagatgctgatcacaccctgtacaaagatattgcggggagaaagtgaaccagataacctcccacagataatgaaagcacaccagaaaaacattcctccaggcagatgaaaactgtgtcctgatgtttctgagtgatctcaaaggaattagaaaaacgacagaaactactaaagaatggtataaattaaaaatgtttaaaaagctcaggttaaaagtgactagtcaacagaaaaatatgaagagagttgacaggactcaggaggaaataagaaaaaaaaaaccagatatttctgaaatgaaaatcaggaacacaagaatgaaaatacattaaggtaaataaggaagagataggagaaaaatggagtcagaggagactcaaacaaatagagaagaagttgtccagagaagggataaagaagttaggcaaagaagatcaaacttacgtataatcgtagtgccatcccacacccttcccagaaaaaagcagtggaataacagataatagaaactgtgattcaggaaaactgataaaa

SEQ ID NO: 8107 - DNA, 1032 bp, Homo sapiens
ccagaagtcaccagaatacccctcacaagagactactcagcaaatggaaacctcaacaagtgaatctgagagacagccagtgaaattgggagccgatttctcaggctccagtttatagaggaggcttttttttattaatggaagcacaaaatcctgctttatttctacccacagccttatcgctgcctgacgtattatacggctgaggaaagatcaagaatgtgagggaaacccatgcccttaacaaaaacttctcttctgaaagacaagagctcaccccaagaaaaaaaggactgggattgaacagagcaggaacacttggggtaaaggagaaaagctttagatacaagaaagaggtggccaatcccagaaagtatcaggagcaaggactacacagaccgaccacagcaggggaaaggcctctccagctgtggagttcagaaagctactctgacccacaactgcccgtacgtagaacatcctgctgaaagaacaggaaaagatgctgatcacaccctgtacaaagatattgcggggagaaagtgaaccagataacctcccacagataatgaaagcacaccagaaaaacattcctccaggcagatgaaaactgtgtcctgatgtttctgagtgatctcaaaggaattagaaaaacgacagaaactactaaagaatggtataaattaaaaatgtttaaaaagctcaggttaaaagtgactagtcaacagaaaaatatgaagagagttgacaggactcaggaggaaataagaaaaaaaaaaccagatatttctgaaatgaaaatcaggaacacaagaatgaaaatacattaaggtaaataaggaagagataggagaaaaatggagtcagaggagactcaaacaaatagagaagaagttgtccagagaagggataaagaagttaggcaaagaagatcaaacttacgtataatcgtagtgccatcccacacccttcccagaaaaaaacagtggaataacagataatagaaactgtgattcaggaaaactgataaaa

SEQ ID NO: 8108 - DNA, 8167 bp, Homo sapiens
agaacgccaccctgctcttccccgagagcatccgtgtggacacccgcgaccaggagctcttcttctccatgttcctcaacatcggcgagaccttcaagctcatggagcagttggccaacctggccatgcggcagctgctggacagcgagggcttcctggaggacaaggccctgcctaggcccatccggccacacaggaacatctcagccctgaagcggtgcgttgccctccagggctggggtgggctcatgtgagccaggttcgctgaccttggctgggacctgcctggtccaagtgtgtagacctggagaaggtgtccacattcacccctcatgggctccccacttgggaaggaagccaggtaaacagatcattgcagtcccgtgtggagaggcagcaggagatagcagtgatgtcctgaggataccactaatggggaggaagctcttcacactttattcctcttggccctatgatgggaaggggctcttaccatccctaggtatcagacaaggaagctgaggcacagagaggttaagtaacttgcctgaagtccctcggttagtgagcagtggagccaggatgtagccacctcagccagggtgttctgacacccccagaaaggctttggtaaatctgggctcaagtgcacggcctccatcccaccgtgattgacagctctcctgtataccctgagactccttggccagaggcctctcacagccatgggacccccaggggtcctgagtttgacgtggaagcagacctctgggtctgaagccagccaaggagatgggccatgtgtgggtctgagttccctgctgccctgtccaggggaccgataggcaggaacacatcatagcagccagccctcccgggctacttaacgtttgggttcctaggttgtagcttatgggaaactccagaggctggacaagatctctgaggttccgtgggtcccacagccagcctgaccacagccagattcacacccttgtgttgagcgacctcattccagccaggccatttcctgcattgcacccacagactatggtccaggcccaaactctggggtccacctccaggaccagaaaattgtgcaagcatgttgtccttgggatgcaagtgacaggttggcttgttggaccttttggaaagaacacgagcagagatggaacatgactgctcctggcactgccggtgagaatgcagtcaggccctggtcaggccactgcggcccagggcaggcaggaggctccctttggggctgggagagtttatgtggacagagccaccaaaggggtgagggcctgggccaggccactgtcacagccatcagatacacaggtgtgcatttctgttagcagccgcatgctttagtttaagctccacacctccctgtggggagctcctcacctaggtttcaaggtgaaacctggggttaggcctgcccagggtggaagagctgcccggggccctccatctgagtgggatccagggcaggtgctctgggctctgcttgcccatcagtaccgagggatgggttgcacattgcccaggccagcatctaggtgtgtccttttcaaagcagtctcaggacacattgcttgctggccacttctccgctggttatgtgactgtctcaccttctgcctgctcactcagcatgcatcttttattgaactctgaggtccctgagcatgacttgctcaagggaccaccccagggatcctgaatctgatgtggaaacaggcctggggaggccccaaggcttccttgagagtgtgctggtcctgaccttgtcccctttcctcctgtcctcctaccttgtttccccagagacctggacgcccgagccaagaatgagtgctaccgagccacgttccggctgcccagggatgagcggctagacggccacacaagctgcaccctgtggacgccgttcaacaagctgcacatccctggccagatgttcatctccaacaactacatctgcttcgccagcaaggaggaggacgcttgccacctcatcatacccctgagggaggtcagcatcccctagttgagaggccaaggcctttccagccccgaggtgtcagtgggctcagggaccagcctgtcctgctctgccctgtctcactggggggtacctgggaggatgccctagcccaggcagtcacatgtcactcagtgatgggacaggtggagggtgtaggacaagtgagcccctccacaggcacctgccctgttggggaggcaggtaacatggtgggggcacactgcttgccctctcaggtcacttgcctagtggagacagggtctcccacgcgtgagtttccatcaggcctgccttctgggccctgcagggcaaagtgctgctccgtggctgcgcttagaggaccgtgttcctgcaccggtcccatatgtcactctcagaggccacctcaccagtcctctctggacataccaccttggcgtggctcggctccagcaggccatcagaggtcggctctcccctgtggggcggcgtcggctctcccctgtgaggctgcattggctctcacttgctccttcttgggtttcttggacttccacagtgaccctggtgggagcaaggccatctgtcctgcactgcaccgaaggggtgtggacagcaaggacaagggcccttgcccaaatagaaggcatgagactgagtcaggacaggtcccaaggcctccttttccttgtggccaagcagggctctgactgtttaattataagaagaatcaagtgagattcttaacttaaagacctccctgccatttgcacaaatccctcaagttgcagatgtagctgagaataggtgtgggagagttgctgcctcagtttccccaagggaagtcagagggaaggaactcagaagagccacagctccaaaagctccaggttaagaggctcaggtgtgacccgaaccccacattctgttagcaccagggccctgtggatctgtccggggcactgtactgacctgtcccccaggcctaggggtcttcctgacacctgaggctccgtttggatttctcctgccgggcccttgacatctcagatggtagagagccctggcggagctcggggagcaggactagctcacactggaggactgagtgtgctctggtgatggaactctgcagctggtcagggtgggggccgcctgcccagccagcgctgacccctcaacacacctgctcctccacgttccagcctgcaggcttttgcgcacgcagctcactctgcctgtgggtgtagtggactcttgaatttcactcccaaccacccgcttccatgcttccctcgggaagtgacccctcttccaccctttgcccaggtaaaagccacgtatcggcctagattccgacctctccctcctccctacagcatgtcttgccagctcaccccgcagagctcagcccttcctctccacggacaccacctaagacaccatcatctgctttagccactccctaaccacactgaaccccaacccccgcctttttttttttttttttttttttgagacagggtctcactcttgcctgggcaggagtgcagtggtgtgatcatggctcactacagcctccatctcccggacttaagtgattctcccacctcaacttcccgagtagctgggacagcagatgcttgccaccacacctagctgtttttttttaatttttaacagagacagggattcatcatgttgcccaggctggtctcaaacttcaggattcaagtgatcctccctcagccgtccaaagtgctgggattacaggcctgagccgccacacccggcctaacacacttagcccctttatggcgtatcctcccacagcaaccagcaaaattcgaaatgtcagtgggagcatgttggcaccctgcttagagtcctctagagtcttctcccacctgcctcctatgacctgtgagaccttctgtgcgcctctcccacctgcctcctgtgacctgtgaggccttctgtgcgcctctccccctctcagacctgcgcccaggcacaccccatggatatgttcacacacagacataaaaagtgcacactcagactgggcgcggtggctcacgcctgtaatcccagcactttgggaggctggaggcgggtgggtcacgaggtcaggagatcgagaccatcctggctaaacatggtgaaaacccgttcttctacttaaaaaataccaaaaaatttagccggggccgtgttgggtggggcacctgttgggtcccagcttactttggggaggctgtaggcaggagaatggcgtgaacccgggaggcagagcttgcagtgagctgagatcgcaccactgcactccagcctgggcgacagcgagactccgtctcaaaaaaaaaaaaagtgcacactcacctccaccactgcccagctcacactgtcctggcttctctggccttctcttcctccctcaggcagtcctactcccctctgcagggtgactgctgtgcccccacccatctcttccccagcactcacctggctggaccaggtctcagctcagtggccgcctcccctgggaccacccagccttccctcttcccagcactcacccctgctgactgtgctcagctggtgcatccctcatccgtctccctgccaggccttgggctctgcagaggtgcccactgaaagcttgtcctgtgccctctacacctcagaggggttcagagccaagctccaggacccctgctgtcaaaaagtgttccctgggaacaagtgcagggaacagtcctgcaagcaagggactgcttgccctgctttcggacagccttctgagagccagtgaaggccagcagctgggctgaacactacatcatcctcagaaccaccctgcacagccggtgtgctccccgccatcgacaggaaaaacgggcccttagaggcacaggcaacttgctcggggttaggtgcagcgggtggcagagtcagaatgtgaggacagttgggccactcactgcattgtgcccaggagaggacagctgcatgacagtctgccattcacaaagcatgcccagctgcagggcctgagatgcagacacccaaaagagttctttcaccttctcaggtgaccattgtcgaaaaagctgacagctccagcgtgctgcccagccccctgtccatcagcaccaaaagcaaaatgacattcctgtttgccaacctgaaagaccgtgatttcttggtgcagaggatctctgacttcctccagaaaacaccatccaagcagccaggcagtatcgggagcaggaaagccagtgttgtggaccctagcacagaggtgagaagccccttgggagcagcagggtcgagttgggcccaggaagagccagggcatccatcagcctccccgctggagcctgaccccatggttccggctgtgggcctccgccttaggggtggatgtgtcagagctggcaagagacccctagcccagacccacactgcccagcaacatcacagcctctctgcacccccagccacacacccggtactcctcactcctgctgggcccattgcccatgaggaaccttctctggctgtcctttctgcattgctgctgcactcagagcaaagccacactgtggaggcctgtacacttcggctttgttcccatgaccttccctgccaggcgttcaggctgaagttcttgacggtagaactgcagtatcactattgtaccagcaaacttaacaagaattccttaatatcaccaaatattgtattcacacttccccgtgtgcaagtgtacttttcacggtttgattatttgaactgaggcagacgaaagtcacacatgtcactcttggttgataggtctcttaaatctgtttaatctacgggcttctgctccacctagctctcgtttattcttccacaatatttttttgaaggaatcggtcacttgtgccatagagtctctcatcgtctggttttgctgattgcatccgctgcaggcgtttagcaagctcctgtgtctcttgtttaagttggttgagcggtgagaccgagagccgtgatcacattcaggctcagctgattttggttctggcaggtccgcctgtgggcaggcttgaggtgctgtttattcccaacaagagatgtctggcaaccagccacctctctatgctactgtcagtcattgagaatatgcctggatccagcggccagtggccagcggcatgctcattccattcctcctttcgtctgggagctgaaattctcccaaagagggaagctgaccccaggcacagttcatagaggaaaggtggaatacatgttttactctttcctcttactcaccagttgtcaaaataatgatgagttggttttctagtgtcttccacatgtgaccagtgagttttttggtttactttttattgtaattatgaacgtatggatttaagcaacttgatgtgtgtctttccactggaatcactatgcttattctgtctgtggccagaggggctcatctggtctagccctgagagtccctgggcacgacactggtcgtctttgattccttgctttctggtgtgacaagatggatgtgctgctgctgtcgttgagtctgaatttgcaaaaacatttggccattagaagagtccatatgcaaattcacagatccagcttctctagaaaagtcagtgcccagccctaaaggccccatcccattgggcagcgggcgtgggagctggggctgtgcgtgtcctccatgctctagagccatgtgtggtctggcccaggcagacctttacattgtctgccccagtaatagatgctaaataaattactacgtcagtgagcgcatgggaaggggtgggcggaatcaatgtggattgcagacatgaagaaaggtgtggagaaggttgggcttcatctgggatttcaagaaagagtgaagttggattgagtggcaggggcagtgaacagggtggtcgagcctcctctgcctccatgaggccccacacttcctgaaagctgagtaagcaccactcacggcccctcccaggcactcggcttcatgcatccaaacacattttattgcattcctgttaggtgccagctgctattctaggccccaggagtagaacagtgaacacatcggacagagtgcctgttcacttagagctgtattccagtgagggaggcagtaagcaaataaacatacaatatgtcaggcagtgataagggctgtgggtagaaataaagcaggatgaggggatcaggagtgccaggggaaagaagggggctccattttctctctgttgctcatgggcaacctctctgatcaggcagcactggaggagaaactcgaaagaagcaggggaactagccatagcctgtctggggcagggtgttggaggcagagagcacagcaagctgggagacaggattggatgtggcacgggcttctgggaccagggcttaggagactgaccaggtgtaggaggtgagaccagagaggtggcagaaggccaagtcaccgaaagcccgtaggccctgtgagtgctgcagctttgacttcaggtgagaggggaagccagtgaagagtcatgaccagaggagggcacgacctgtttacgtgttaatggggttactgtggccgtccatgttgacagtggattagaggtgccccgtctagtacagcagccacgtgtggccatggagcactggaaatccagcgggtgccaatggaaatgtgctgtgagtgttcagatcactgtacacgggttttggagacttcgtatgaaaagaaaaacgtaaaatacctccatcttttttttttgggggggggacagagtcttgctctgtcacctaggctggagtgcagtggggcagtcttggctcactgcatcctctgcctcccaggttcaagtgattctcctgcctcagcctcccgagtagctgggattacaggcgtccaccaccacgcccggcttattttgtatttttagtagagacgggtttttgccatgttggccagtctggtcttgaactcctgacctcaggcgatccacctgcctcagcctcccaaagtgctgggattacaggggtgagccaccgtgcctggccactccatcattttttaattgattcctgttg

SEQ ID NO: 8109 - DNA, 401 bp, Homo sapiens
agttttgcaaaactgaaactctgaacccattaaacagtaactcctcagcccccactcccccagcccctggcaagcaccattctacctttttgacttgaattgaactattctaggtaatgcacataagtggaagcatatagtattttcccttttgtgcctggcttatttcattcagcgtgatgtcctccaggttcatccctgttgtagcgtgctcaagatttcttttttaaggctgaatcatatgccattgtatggataagccacgttttgttcactgttgaaacttggactgcttccacctcatggctattatgagtaacactgctgtgaacatgggtgtacagatgtctgtttgaatctttactttcagttcttttggggacataccctggagtggaatt

SEQ ID NO: 8110 - DNA, 401 bp, Homo sapiens; identical to SEQ ID NO: 8109

SEQ ID NO: 8111 - DNA, 458 bp, Homo sapiens
atttttatttatagcaaaatgcagaacatagtttcaatttctaaatataaactgttttttagaatttcatcctgtgagatacagtgccatagtgttgggagaagtatgttccaaattcagaagtacttctgtagcatcaaattgatttcagtgactcagcatttcaacaagtatttaccgagcacctattatgtgcgcaggccctttcctgggtgctggatatctaatgttgaataagttagacattctccaagtattactgaaaagttgaaattctgtttttaagaccttctatgattaattcttcacatgatgttcagttttgtgtggcctggggtataactgaaagtttcataagatcactacgtcctatttccatatagatcaaataaaagactcttgtccatcataaatctgagccactgtttaattggacatcccattttttgctttaatca

SEQ ID NO: 8112 - DNA, 458 bp, Homo sapiens; identical to SEQ ID NO: 8111

SEQ ID NO: 8113 - DNA, 661 bp, Homo sapiens
cagaggggctatgccatctgtttatgccatacagcaaacaatcagagctgtttctcaagctcaggttctgtgtttgaaccacattttatatgcccttaatggatttctaagtcaagtccagaagtgctaggcatttttagaaagtctccctctttttactctcctctctttcttttatgaggttttcattatattcacaacatgcattgtcttctacgctttttttttcttttttgcctctgagtctctattttagaatagaatctgtgtttggaataatcctttttatttgtttatttggaccatagttaatgagcatactcagagattttatggtttgaagggagagtttgttggtaaaggaatcataggtttactgttgcatagcagagctaaatcaaagtagaaaaaatcgttgcaagactgagttctctaaatttagatgtttatgttctgggcaatagttttttagccatcagagtcttcattttttcagccatatgttcccatgtttggaacataaagaaaataatatcagggtttaaagataaaggaaaaaataggtaactagttataatcagtggaacactctccttgttctgagcaaggttcatgtttggctttcaatccgttttctgatcaaggttattctacacataga

SEQ ID NO: 8114 - DNA, 661 bp, Homo sapiens; identical to SEQ ID NO: 8113

SEQ ID NO: 8115 - DNA, 2973 bp, Homo sapiens
aaacattcaaagatttctacaactgctggaaggagacggaagcagaagcccaggaggtcagtctgccgtggctggtgatggaacacctggataaaaacgagtgtgtgtgtaagttgtccagctccgtcaagacaaacctaggcgttggcaagatcgccatgacccagaagcgcctgttcctcctaaccgaaggaaggccaggctacttggagatttccaccttcagaaatatagaggtaaggacagcacaggcagacggcgccagaccccacctgtgtttaggagacagatggctggagtgggccctgagcagtctgccagccatgccaagtaccagctgcagcccttctgcagaccgaatgccttcctgtccctcagtttgctcatctgtaaagtaggaataaggctgataccttctcagtgggtggtggagattgaatagtttgcatatggagcatgcttagaatggtaactgattctctgtcacagctgacttgcatctgggaggcaggaagtaagaatgtgggctgacattctcattagggacagtaggacgccttcgttcatccatgagatgtttactgagaaactgccatgtgccagccacggtgagctacagtagctcacattttctagtcacagtcggacctggttcatataaaacataacaagcttattttataacaattaaaaaatcttcaaacagttttaacattatattctaaaggtagtcattttccctgtcgaggaaatctgaatttcatcctgattcctcttacgccttatagttgttttcccagatttaaggggactgtaagaggcatgtcagatacacaaatgttttatgtgatcacctgctgagtggtcatagaagccagaaaggcagtcaagccacagccgcagcccatagtaaatgctcggccagtagatccccctcttgctgttggccttcagtttatgcttttttccacacctgcttttccagacttccttctagaattccaaagaaatgtaaataaatataaggaaagggagatggaagtaaaaaaaaacaaaaacaaaacaaaaaaaaaaaaacaaaaagagggagagagaagtatttaaggatgtgaaagaatgcgctgccttcggacactgggcgagcccagctgtgtgggtgggtgtaggtgccgcaccgcaggtgaatcctacctgccgtccatgggaacactgcccctcacccggggccctgccttccacatgccagcaggatgcgtgcctgcagcccatctgcctcttcattccagagcccgctctgcctctgtctctggtgaatccacgtgttctctgagtgtgacattcctaacttttcttttctgcctctgcaggaggtcaggagaaccactactacatttctacttcggagaatacccactttaaaaatcagagtggcgtccaagaaagaagtcttcgaagccaacctgaaaaccgagtgtgacctttggcacctgatggtgaaggagatgtgggctgggaagaagctggccgatgaccacaaggtgggagacgcgggtcccctctgccctttgctgtggctgcctcaggggcctctcgccacctgtgggtcctgtggcagtcctcagctgtgagtgctcgggctcgggtctgagtgtcttaagcagagtaagtttgtcggacaccatcttgacagaagcattgaagatgtggtctgtgtgacccagcgagaggcctcacggtgctacggaagagcatgatgagaaaacgcagggcggtctgggcaggtgtgggtgccccactgcccgctccagactggcgacatcccagagagtggggcctcccgggggcggacggtgctggtgctgtccacacccgcaggccggagttgggtgttttgggcttccctgctctgagcgactcttcacagtcacaggatttggaattcggcaggggcagtactgctttccttccacagggttgagatgatttttctagggattgttgtaccttaatttactttgggccaaattgatagctttgatgatatcaaatgacaattgcatagtaatgaagggaaccatgggccggtggtgtgtagaggaggcatccacgctgctcaagggtggcacaagacaggaagacgccttagaaaatgggcaaagaccatgaacgcggaactcacagaaagggaacagttcaccaggttatgaagaggtgtgtagccccactaatcctcagagaaatgccggggacgatggcacccactacagtggcagtgctaggaggaacagatggggccacagcgggagggttgctgttattacaggaagttcccggtcacagggcagagggggactgggtcctttctaagattccagtgccctgtggcttttagactagccatctgatgctatacccactggtttacatagcataaaccagcatagtcaaaccaaagcccgtgggccagtggactgtctttgtaagtaaagttttattggaacacagtcctgcctgtttgtttatgaaatgtccctcggtgctcccatgccgcagtggcaggcagtgggtgatctcagctgagactggccacaaagcttgaaatgcctcctgcctagccccttctagaaaacactggctgagccctggtataaacaatcaatatttgtcttaagtaagagaagaaatatatgacataaaatccaaattcatccgtgatctaaactcttcatgtcactttggaaaaaggcattttggaaggattgtcctgtgtgttgcaacaaggtctccggtgaactgatcttagtgattcttgctgttttgaaacgcacgtgtttctgttgtaggaccctcactacgtccagcaggcgctgaccaacgtcttgctgatggacgccgtcgtgggcacactgcagtcaccaggcgccatctacgctgcctccaagttatcctactttgataagatgagtaacgaaa

SEQ ID NO: 8116 - DNA, 10234 bp, Homo sapiens
aaacattcaaagatttctacaactgctggaaggagacggaagcagaagcccaggaggtcagtctgccgtggctggtgatggaacacctggataaaaacgagtgtgtgtgtaagttgtccagctccgtcaagacaaacctaggcgttggcaagatcgccatgacccagaagcgcctgttcctcctaaccgaaggaaggccaggctacttggagatttccaccttcagaaatatagaggtaaggacagcacaggcagacggcgccagaccccacctgtgtttaggagacagatggctggagtgggccctgagcagtctgccagccatgccaagtaccagctgcagcccttctgcagaccgaatgccttcctgtccctcagtttgctcatctgtaaagcaggaataaggctgataccttctcagtgggtggtggagattgaatagtttgcatatggagcatgcttagaatggtaactgattctctgtcacagctgacttgcatctgggaggcaggaagtaagaatgtgggctgacattctcattagggacagtaggacgccttcgttcatccatgagatgtttactgagaaactgccatgtgccagccacggtgagctacagtagctcacattttctagtcacagtcggacctggttcatataaaacataacaagcttattttataacaattaaaaaatcttcaaacagttttaacattatattctaaaggtagtcattttccctgtcgaggaaatctgaatttcatcctgattcctcttacgccttatagttgttttcccagatttaaggggactgtaagaggcatgtcagatacacaaatgttttatgtgatcacctgctgagtggtcatagaagccagaaaggcagtcaagccacagccgcagcccatagtaaatgctcggccagtagatccccctcttgctgttggccttcagtttatgcttttttccacacctgcttttccagacttccttctagaattccaaagaaatgtaaataaatataaggaaagggagatggaagtaaaaaaaaacaaaaaaaaaaaaacaaaaaaaaacaaaaagagggagagagaagtatttaaggatgtgaaagaatgcgctgccttcggacactgggcgagcccagctgtgtgggtgggtgtaggtgccgcaccgcaggtgaatcctacctgccgtccatgggaacactgcccctcacccggggccctgccttccacatgccagcagggtgcgtgcctgcagcccatctgcctcttcattccagagcccgctctgcctctgtctctggtgaatccacgtgttctctgagtgtgacattcctaacttttcttttctgcctctgcaggaggtcaggagaaccactactacatttctacttcggagaatacccactttaaaaatcagagtggcgtccaagaaagaagtcttcgaagccaacctgaaaaccgagtgtgacctttggcacctgatggtgaaggagatgtgggctgggaagaagctggccgatgaccacaaggtgggagacgcgggtcccctctgccctttgctgtggctgcctcaggggcctctcgccacctgtgggtcctgtggcagtcctcagctgtgagtgctcgggctcgggtctgagtgtcttaagcagagtaagtttgtcggacaccatcttgacagaagcattgaagatgtggtctgtgtgacccagcgagaggcctcacggtgctacggaagagcatgatgagaaaacgcagggcggtctgggcaggtgtgggtgccccactgcccgctccagactggcgacatcccagagagtggggcctcccgggggcggacggtgctggtgctgtccacacccgcaggccggagttgggtgttttgggcttccctgctctgagcgactcttcacagtcacaggatttggaattcggcaggggcagtactgctttccttccacagggttgagatgatttttctagggattgttgtaccttaatttactttgggccaaattgatagctttgatgatatcaaatgacaattgcatagtaatgaagggaaccatgggccggtggtgtgtagaggaggcatccacgctgctcaagggtggcacaagacaggaagacgccttagaaaatgggcaaagaccatgaacgcggaactcacagaaagggaacagttcaccaggttatgaagaggtgtgtagccccactaatcctcagagaaatgccggggacgatggcacccactacagtggcagtgctaggaggaacagatggggccacagcgggagggttgctgttattacaggaagttcccggtcacagggcagagggggactgggtcctttctaagattccagtgccctgtggcttttagactagccatctgatgctatacccactggtttacatagcataaaccagcatagtcaaaccaaagcccgtgggccagtggactgtctttgtaagtaaagttttattggaacacagtcctgcctgtttgtttatgaaatgtccctcggtgctcccatgccgcagtggcaggcagtgggtgatctcagctgagactggccacaaagcttgaaatgcctcctgcctagccccttctagaaaacactggctgagccctggtataaacaatcaatatttgtcttaagtaagagaagaaatatatgacataaaatccaaattcatccgtgatttaaactcttcatgtcactttggaaaaaggcattttggaaggattgtcctgtgtgttgcaacaaggtctccggtgaactgatcttagtgattcttgctgttttgaaacgcacgtgtttctgttgtaggaccctcactacgtccagcaggcgctgaccaacgtcttgctgatggacgccgtcgtgggcacactgcagtcaccaggcgccatctacgctgcctccaagttatcctactttgataagatgagtaacgaaagtaagataagcccgttcttagcgtggatcattgtcctgattacacgccttaagtgattttatctggtcgatgtctgttttatcaagtagaaccgagcccagctcccccagttttttcttttatatttgtaatttactctcgagtcgcacaccttatccggcatctttccttccttcactgcacagtgcaccttggagccccttgcgcatccaattgaggcacctcgtcgttttaatgtctggatagcattgcaatgtacactgcaagcatttgtggtgattcgtaattacaaacaacagcctttcctctggctggctgaagcagactagaaacctgtgggaggttgtggagcggctcctggaatctctgactggtggggagcgggtgtctgggacttgcagttaggaacacacctgctgagaagctgggaacgtctacacagctggcctgttgactgacgggcttcaccgctgcatgagtgaggagaggccctgcacgtcaggatccgcttttttcttgattgggtcagcttccccagacaggaatcctctgactgtcctgtagatttgcatctggctctcgcattctggaagccatagaggctggtgctggactcccatttttttcttgtgaaaggtgatcttcaagcctagggttttctggtcttcttgtgactgagtgatagacaccgtttgggtgaaggacgtttggtctgtcccttcatcagtgagtgagcactggcgtggcctctgtgttgtggctgctgtgagcattcatgtgtaagctctggtgtgcacatctgttttcatttcccttgggcgtagatctaggggactctggctttttaaaaagtcgcagaattaggaacaaacctcacttacgtgtttatttccttgggcacagtttgctctctttgtggcatctgtcaccaactgcaggacctctgccactttctgggtacagaatccctctcccacgtgacccagagggaccttgagctgcagcagcagccgggctcaggtgcctgtgttcctgcaaggccagctgagtggcttgaaggagcttttgtctgacagtcctggaaccagacattgattgctcttttctttttccttgggagcaaaatcaaacaaaccccctacttcagctgttgatctcattccaaactcatgcctaatctctgtcgggcgtttacaggaaagccttctaacgcctctgttatcagcgcatgacggcagacgaggagccgccatgctggtgtcacttggtgtggtgcgctggctcccgctcccttgttacaaatccggaaacattttcccatgtgtaaagctcaggacacatgagcctgagcttaatttagtagcttatggccaactcatgatggaaggtctcagactgtacggaattaaataatacccgaagatgtcatagtccgaggcaggagctgaagaggcgttggccgcggccagttggctttcaccgcagcccggtgtagcccgccagcctcgtgcggagtcctggtcgaccccttgctgacagtgtgatcttcatttgatcacggatgtcgacgtgtgtcggtttcttcatctttcttttttcaaaatggggataacgggaccaatctcatcaggttgctatgacagtaacaaaatgatggaagagaagcacttaaggggcaggccctggacggcagggactgagggagtcctggatgcaggaggtcgaggcgcccgcaggggctggcaggagggaccgcagaacaggctggtcccaggggcctccgggcagcaatgaggagccgtgtcagagcaggctgtgcccgggggcctccaggcaggaggccgctttaggttttgcctggaaacatgggttggattggatagcaagaggagcattaggatatcctgaggagcagtggttttgaacggggggcgatgttgcaccccctcactgtggagaggcattttgacagcacctggagatatctgtggttgtgtgtgaggtgctactggcatctcatgatgctccacatcccatggcacacaggatgctgggcattcgcccacagccaggattatccagcccaacacgcccctggttctaggctgggaaaccgcgctcatgggttaggtctctgggtttcatcttgggagggcttcgttattgaggagaattttatatctccgctttgctgggcactgtgtcatgtttgggtgtagctagagatcagaagggatggctcaggagcagagaagaaggctgtgtttaaacaaaggcagctcgaggcataggggcatggaggtgtggtgtggacacaggtgggggatgcgcctggccactcactcgcacaccaggtgacaaccaggaaaggaggtcgagggtgcatggctttctttcagtgccccgggtccaagagaccttcgtcttcacaaattaggaagttttacctgcaagctgatattctgcagaaatcagagtgcgtgaggccgttgcatcgcgtctgtttccttgaggctgcaacagtaacactccaagtgtcttgtctttcagtgcccatgacgcttccggagacaaccctggaaacactgaagcataaaatcaacccctcggcgggggaggcgttcccacaagcggtggacgtgctgctctacactccaggtaaggcccctctgcccgcgcctcgctgccagttttcagccaatctgatgcgcttaggtttgggttcagggtcagccctgaagtgaaaggggagccagtgtcacgggataagtggggacaaggtgcctgttgctttctgaggtgaagtgctgagtgacaggtgtgcagctggcacgaccgctccacggactcagcctcacggtgactggagccagagagcccacgggagatggaattggggccagcacttgagctcccgccccagggctgccgtccctcaccttctagagcagtcgacggtcacgctagctctttctttttttgagacggagtcttgctctgtcacccaggctggagtgcagtggtgaatcttggctcactgcaacctccaactcctggattcaagtgattctcctgcctcagcctcccgagtagctgggaccccaggcacccgccaccatgcctggctaacacactggcactttctaaagcactcttgctcacatcgtttccgcagaagctcttaatgggatcctcttgtcatggtgataaggtgatggcgcctcagatatttgttgtcataggaactggaatgacaaggagtctgtgtggccctgagcggccctgagtgcctgccagtccctcttctccgctgggtgcggctgcacctgcctcctgtgcttggctttcctgggaccctgcacgccgcatcagggtggtggcaggagaaggaaatgggcgcggccaagagtcttggtataaaaaaagatggctgtcatgtcgcacgttgaaactgtggaaaatacttttatttaattttggcttatggacagtgcagcagggaagcttatgctgagggtttacagtgtggaaaacaaaggaatacagttctcggcagaaaagatttgtattttttgtgtattttttatttttttgagtcagggtcttgctctgttgcccaggctggagtgtagttggtgcaatcatggctcattgcagcctcaacctcctggattcaagcgatcctcttgcctcagcctcctgggtagctgggaccatcggcttgtaccaccaaatccaggcacgtgccaccgaaaccaggtgattttaaaaattttgtgtagagacggggtttcgccatgttgcctaggctgatctcgaactcctgggctcaagcgatacctctccaccttggcctcccgaagcgctgggattacaggtgtgagccactgcgccagcccagaagggatttttaaaattgtcactttgtttgttgcatctgcgtctgcaggtgtcagccgtaggtgtcagggatgcagatgtaggtgtcaccccctctcacaggccatgtccgcggcttcacagagcacctggccattcacacacggagctcatgcttcaggtgggcagagaagctgtgtgtgaagcgatttccccataagagagtttttctctcttcatggcaggccaagaaacccaggaacgcgatagaccctggctgagtgagcaggcagcgtcatcagggccgccccgcgtgagccctacctgatgtgtctaagccaggctctgtgctgacttcgccagagataactccacagaccaagatactttgaccatggcatttgaatacatggtatttttaggtcccggttggtttccctgaaatgaaactcactctgagcttcctgttgtgacgggcgaggagttcaggcggcttcccctccaggagcatctcgaaggcctgcagagagcgtgcaaagcagccgtggggaatggggaaaccgccttttcctgtggctgccgattctggaaggggtggccgagaagctggtagccgagcagggcttttgcaagccttgtgagattgcagggacaagaggtggggtcaggccccatcaagaagggggagtcttgttattcccattagcttggggctgggtctccgacaggttcctaggagttaggagaaccagccctgaggccaggccacaggtcagctcaggctctgcccatggggagcgtgcctctcagagacggcagtgtctcacccatgggagcaacagaccactggaatcgcaccccagaaagaccgggaggcctgcccttctggactcaggacggaggcagcactgcagggcggggggtcgcttgaatatcctcaggggaaaggtgaaacctcgccccttcacactgccctgcggtcaggcccaagggggccgaaacctcaacgcggtggtaaaaggcaaatgtgaacaatgaaagcaagcagacttctaggtgatagggtagaagaatattttcatgactttatggtaaagaaaaaaatgcataaattatatataaaataccataaaggaaaagaatgttgaatttgactatattaaaagcaatgactttattatttttattttttctgagacagggtctgactctgtcacccaggtgcagtggcgcgatcacacctcactgcaacctctgcctcctgggctctagcgatcctccgccctcggcctcctgattagctggactgcaggtgcacaccactatgcccagccaatttttgtattttttttttttttttgtagagatggagttttgccgtattgctcaggctggtcttgaactcctgagcttgagcagtctgccggttttggactccaaagcgctgggttagaggcgtgagccaccacaactggccaaaagcaatgattttaaaaagaagacactttttttttcctcctttcaaatgagctggtttaattcacggtgacacaaaattgagggtagaagaccaaagagcgccctctggcaggctcaggtgggaatgacgggtgagaagccactgaagacgtccggtgacactgtcagttttttgttttgttttgtttttttttttaatttaaaaaaaaaaaagaaaagtttatgcttgaaagtgcaacaggctccagggcaacgctcactctagctgaagatggcaaaagctgtcctggcgggggtgcaggtgttgaaacaggagtggagtccaggccgccaccgcccaggcagagggagcagcgtgctttccgccaggggtcttagttccagctgtggctgggcctccctgcggcctgtgctttcggccccttgaggttctggtctgttttgctttctgctggaagcctcatcatctctgtccctctcctgggcctgcttcttgggctgtctcagaggcttcttgccatcttcatggccggacacggcgcctacagcctcttccccagaccctgccacaggaaatggacagaagacacttttgagagggtgaaaatgtaagctgcagactgggaaggatctttaaaatgggtgctgctaaaatcattgcttttaatgtagtcagattcaccagtcttttgctttatggtatttttatatgtcatacgtaatttatgaatacagcaccatggagtcagttaggggctcatatccagaacaccggaacagctggccgggcgtgcctgtggtcccagtgaggtgggagggtggccagagccctggactcggagcctgtggtttgctgtgatcgcacctgtgaacactgctgcactccagcccgggcaacatggcaagacctcgtctattaaaaagtaaaaaaaaataaaaataaaaaaaaataacagccacaaactagggagaacgaaaaacagacacttcccacaagagggcatggggatggccagttcaagccatcaggctcattagcaattagagaaatgcaattaaaccacaatttaaaagccaaaagctccacacccttagaatggccgaaattaaaaagatggacggacgccagcaagtgttgggaaagacgcggagcccgcggcacatgagggtgtggggggcaccatggcccctgccgccgtctctccagctgccctccctccctgcctccctccctctgtgtccacctgctcctcttccagttccctctgcctggctgtttcctctagtgaatgctcactcagctggcaggtcctggcttagcaaagctcacaggcattcggctctgcatctgcctgcggctctgaccctgtctttgtggccctctcaccagccagctgccccccttgactctgagctcccagagggcagggaagcctctgcctgggcacgtctttgtacgtacagcacctaacatgggcctggcgcttaggagggcccaggaggcacctgagtaagggcaccagtcacctgctgctacagcagaagtgtttcctcctaacagttttgtgctgctctcctctttagggcatcttgacccagccgaaaaagttgaagatgctcaccccaagttatggtgtgctctgagcgaaggcaaggtgaccgtgttcaatgcttcttcatggaccatccaccagcactcctttaaagtgggcactgcaaaagtggtgagtacacgaagcgtcaggaaagaagcctctgaattcacgtgatttctgaaacccaagtgtgttcatccatattcgacagtaggatacaagctattccacagcctcactcggtttctgtaaacagggggtcttaactttcacctggagttttcaaattaaatgtaagctggttccaaa

SEQ ID NO: 8117 - DNA, 740 bp, Homo sapiens
gcttgagttggcaggacctgccggcagggacttgggatttccgaggggtcgtcccatctcccgctgacagataagcaggttcgttccgcgacttgccaggagtctctgtgaaaggtcgtgaagcgggcttcaggctcaggctcctctgactccagagcccgtgagtgctggcctcgtgggaaggttactgcttctcatcagcggaggtgatttcagttgcagacaacaaaagtcaatgatttgctggtaaccaaagagtgtggaggtcgggccagttacaggagaggccgacccagtggcagggcagcggcgctaaggatccaaccttcccggcgttagcttcatcctaggactagctccccttgtgaccccaagacagtggccagcagttctagtgatgaggaaggtctttgcccccattagaagagtgtccttgtccggaaggactttcctacccaaaggtaagagttgctgtgactacctgaagcaggtcccgtggccatcccagagcgggcggctggaaagggctgcgggctcagcctagatcgtgtgcccctcccttgacagctggacacacctgggctgcagggaaggccctgggaaaccttctaggcagtttccatccagcgccctgagtgctggcgccacctgctgccgggttccggtagtgtgcggtttcttcaggtcatggagaagcccttggggctcccgaggtatgtggctgtaagatacctctcttt

SEQ ID NO: 8118 - DNA, 400 bp, Homo sapiens
cttcatcctaggactagctccccttgtgaccccaagacagtggccagcagttctagtgatgaggaaggtctttgcccccattagaagagtgtccttgtccggaaggactttcctcccaaaggtaagagttgctgtgactacctgaagcaggtcccgtggccatcccagagcgggcggctggaaagggctgcgggctcagcctagatcgtgtgcccctcccttgacagctggacacacctgggctgcagggaaggccctgggaaaccttctaggcagtttccatccagcgccctgagtgctggcgccacctgctgccgggttccggtagtgtgcggtttcttcaggtcatggagaagcccttggggctcccgaggtatgtggctgtaagatacctctcttt

SEQ ID NO: 8119 - DNA, 385 bp, Homo sapiens
aaaaaacaatttggccactcttcaagttgaacaacttttcaggtgcttatgagccactgtgttctcacgcgagcgtcttctgctcgctctctgctcagttgttttctatcagcttctgtagcttttgcattgattttaaagagctctttacgttttaaagagagcaaacttttctctatgagttcaaatacacacactttaatcagtgtcttttcagcttgtaaatgatgtgttctgctatacaaaagtttcaaaatgttcgtgggcaattttctctgtttatttgggctttgtgtcatagttagattatgaaaacattcacccctgttttcccttattattttatatattaaaatattaaatacttttcaactacttaatccat

SEQ ID NO: 8120 - DNA, 201 bp, Homo sapiens
gtcgcctgtgaatgctgaggcctccatcctggcaaggtcgttcctcttcctgtgtgccattgtccgacacctcggcagggacttgcaggtccccaggcctccttatgtcatccgtattttaaatggaagtttgtagtttcaatattaacccatagtgctgcgttttgacttgctatttatagacattgttttttttttcct

SEQ ID NO: 8121 - DNA, 566 bp, Homo sapiens
ggctctgtggccacacatgacccaggcccactggccattagacactttggcagggtggccaaagaaattctttgtgctgaataaaattaatgtgtaaatgcggcggtgctccaagggcagtgttgcgtgaaagggcaatagaaccatggctcctgataaacagaagcctgttaagcagcaaggtcaaaagccagatgcagaagtcagaattagccgggtagactttttatttcactttcccccccttttttttttgccagtggactgccaactgttctcttaacagaagggcagtttttgagtaaatgaagcaggacttgatctgggttgtcataaattgtctctccctcaagaggtaacttctcgtgtttgccagttcagaggtgtagggagacatctctgatgtgtagatgtcctagtttggggtgcagggtggctttgggtctgagagcctgctgttggccactgggtgcgcgtgggcttctccacatgacaagacgggaatgctgtgaaggaggccgctgttccgcttgggatgttggccgagcgccgctggcctgtgtccc

SEQ ID NO: 8122 - DNA, 9142 bp, Homo sapiens
ggccgtttctgccgcgtccaccacaacctctgctgtatcagagggggccttcgccgccgccgcccccaccaccgcccctgccgccatcgccacctccgccgctgccgccttggggccctcctccttcaccgcccccttcaccacctctacacgttctaggccttctgtcctggagaagaagctatagtcgttctcccttgtgggcccggggcgcagccatggcggacggcggcggcggcgggggaactggcgcggtgggcggcggcggaactagccaggcctctgccggggcagcgactggcgctactggggccagcgggggcggtggccccatcaacccggcctcgctgcctcccggcgacccgcagctcatcgctctcatcgtggagcagctcaagagccggggcctttttgacagcttccgccgggactgcctggccgacgtggacaccaaggtagctgcggccgcctgggcgttggggagcggggctgcacgtgaggcccgccgggtggcagctttgattttcgaaagccgagagcaaaacaaaagatagcttagaaatctcagcggtgaggtcttacaccgcttggggcagtacggagagctttctgagcgatgcacacgtgggttcctgcctgatacatttactactagttgtgattttacccagtcccttctccgaacttggggtttcaatgtgggttttagagcctagaccgtatcattcccaagatggaactcctctgaggcccttaataacaaacttcgaaaccaagtagataagcaagcgtgctttagaatttccacctgttccgtactcaccacggagaagctggcattaaacacaatgatttgaacacacagtcatcaccattttatagctgtttattccttttctctagctcattgttttgcagactagtacggcgttgaattaagataaattgtagaaacagcacccttattttgcacttcatcattgataaaaggagatttggtgcctagtttagatcctaatgccattggtcagtcccaccagtaaaacgctatttcactttacctactcgtcagggtggtttggattcaatgaaataatgggtgttaagtatcagacatacagtagttgctggaatgttcattttcttccttttcaaaacttgtctagccacgactgtggttgtaggttaggagaccctgtcactggactcctgcagggtagtgatttctcctaccagagcctgtcatggaaacattttgcttacctcacagcaagattgtgagcttagaattagaccttaagatagggaaaaacgtagtctgtttattcgttgaacgtttattggcctctagttgccaagctgtgcgattacaggaataagtcactaccccatcctcaaaacttatagtctaggttagaaaactgacatgtaaataaaccaggtggtaaatacggatgtagagagagaaagtggtatacactgttccttctccaagatgaaaagcccaactagaagtctgtccttgaaacaaagtaatttaatacatatacatcccagatctgtattgacagagctttcacctttcctaggacaagttctccattcatatttcttatattccgttaggttttgtgtgtgattttaaaacaaaagcgactacagtagcccgccccatccgaggttttgctttctgcggtttcatttacccaattgttgcggtatggaagtacttgtgttcaggtaacccctattttacttcataatggccctcaaagacattcatgcgtagtgtatatagggttcagtactacctgaggtttcaggcacccactggggatcttggaacgtatcccctgacgggggaggggactaccctcttgagcggctggtgagggagagtggttggaaccttcccatgtacagctccttagctgttccttctgagaattccaggttgttttagttcttgaagatagtgttttttcaggcatatcttatctgagacctttgttgcttcagcccagtggttctcaaagcgtggtgcttggattaacatcagcatcacctgagaacttgttagaaatgcacattttgggccccaccccagactgctgaagtatttaggggaaattgaacagatgtctgtaatttactttgcactgtaatttactttgaactgataagtgaacaggtggaggggttggtagtacagtaaaacgttatgagtgggctcatgagttgctttgacttcttgaactgagatgattctgtatcgcctgggtttgttacgtgttttggtggtgatgttcactgtcctttgtcctttttcggtaaacagttcgtatcatctcaaaccaggtgcgttattttgagtagacggtatggcatcaggatttatgcttacaagggacaaaaataatcctaactgctttatgcaaaggggagaatctattgtcttacggaatccagggaaggattgaacgaacaaactctcccagagggtggtaggcgtgcgtttggaaccagatattccccattcgttctgtctttcatctctgttgatatctgttttactgttggttcagagtggagtcatccatttggttactagtatctcttgattacattttacagcttcttcctctagagagaggctgtcagctccaatctgggaaatcccagggaatgtctgcattgtcttagcgtggctcaggcacccactcctgtggcaccctctgccctacccttgtgaagagaggaagacagttactagaaagaaggcgttactaggcagatagcacatggtatctgtgaattttactcctctgcccccatttccttgcctttctcttttccaggtttagtggagtctttgagtttgctctctcaaccttttggaagaggccagtcatggaattgaggcctgctggttcctttgtcaacttcatttccctgactgttagcaaactttgccgcagtaatgctgcatagcaaactgaatctcagcagcttataaccagcacttgttcacatgttcatggggcggcaggtctaccaaagttcagctgagctaggaaggcttcagctggtggcttggctgcaggctgcccaggtgtgggtccaggctgtgggttgatgtcaggcctgctgcatgtagagttacttaaaagcaaatggaataatataagtaaagcgcctggcattgtgcccacccaccatcaggtgggcacttgtgttaaccattaattcctgactgccacattgcatggtgatcttcatgcacagtggaagtgtatttagacttaataacgtttctgtgaaaagcagtgttctgagagactaagttcaaaactttggtgcatataacttctgaccttgcctcctctttttaacattttagccagcttaccaaaacctgaggcagaaagtggataattttgtgtcaacacatctggacaagcaggaatggaatcctacgatgaacaaaaaccagttgcgaaatggtctgaggcagagtgtggttcagtaagtaagcagaatttaaagcttttgaaaaggcagtcatcacaagtgtgatgcacaagaaggttgaggtctctgtttagtcaaggttgatgggactttatatcaagtatcacttaggagttgcagcagtctgctcttttgttataattaaggttaaaggaagcaaagtactcagttgaaattccagtttctgcagcctgtgaaggcctcctgtgtgcatctctactgggtgcatcaaaaggcattccaaatcgtgagacattttccctgctctttgaagtttcagtgttgtccaaacatatatgtgagttttataccaagatatcagggtttggatcttgggcaagaggagttggatctttattctcacaggtgaatgtgaactaaataaattctttgagtccaccaggactgccacctctaaagtgtaatggtgacagctttcaggaaggcatagtcttaataaagtatcgtacttcacagtaacaaactgaaccttagttaataaaggtgctattgatagcttatctgagtgacgcacaaaagtggaggtggaggagggtacagaaatgggagaacacattagtgattgcctggggttacggatgggaggagggggtgagtgtgacttgcaagtggtagcacaagggggagcttgcaatggtgcagttaagtgtcactgaattgtgctgtgctcacgtgcaacagctcgtatggtaaagtcgcacggagctacacacacaaataagtgcaagtgtaactgaagtctaaataaggtctggattggaccagtgtcattttcctggttttgatattgcactagttacgcaaggtgctgacattagagctggctgggtgaagggtgcgtgtggaactccctggactcttcttcacaacttcctgtgaatatgcagcgattttaagatttctaaagtttttaaaagtgttttactaacaagctagtacttccaatatggctgaatgctgggaagaagcctgatagcagaagatgcccagtgccttgtcattctggagtcagtaccgagtgcctttccctttctccagagaacagactggtggcaccgggctctttcagaaagaaggggacagtagctgccccttactgagcaactctttattacatgtctggcactggtctttacatatatcactcatcctcatgaaaagcctgtttcacagctaaagtcacttgtgtttaccctgtcttgagtaaatcaaaacactgaacattctgaaatatttggaaagttgccatgattgtatgaaggctgttaacattgctttgatttctgtaatgagcatggatgtcattctagaggtatgcatgtggcgcttcctcttgcatttctttagtaggaattgtaatacggaaaagtgcacagaagttcagtgaaacagataattagaacatcccttgatcacccagatcgagaaatggactcacacccccgaaacagcctagctccggatgtactttcctcctttcggaagtttgccatattcctgacttttatgctaatcatttcctctcttcatagtttttaccacctctgtgaagttgttgttgtttttttttcccctgctttttgatttgacttagaatgtgtttaacctgaaaacatgaacttggctttaatactgggacatttctccacaattcttgctagcattttgaatttgaggcaaaatctactggagtttcgaaacgcagactttctgcttgcccccaggtgctctccccaggtggacactgcaggccttcagagcattggctcactggcctggctgttctggcccagatgctgtaacccagtgccacagcctagagggtttaacaggaaattagcctgtgctattgcactgaattatgacgaataactcttgtaactgtacaatatttgttttttccatcttgtacattgggctcctgacaagattttatgttttcctcaacagtttaagaatctccaggaaagtgagctgcactcccttggtactttgtttcccctgatcaggggttttggtcagttggggatgcttcaacaaggcgccgtagactaggtggcttgtaaacgatggaaatttacttctcaccattctggaggctagaagtccaagaccaagatgccagcatggtcaggttcaggggaaggccttcttgcaggcagcagactgccaactgcttgttcttctcatgtggtggaaagagagctcgctaacttcctggggtcccttttgtaagggcataaattgcattcgcggaggctctgcccccatgacccgatcgcctcccaaaggccctacctccaaaggccatcacattaaggattagatttcaacataggaagtctgggggacacaggcatttagttgataatatcaagcttttacatctggtaaaggaccctgtgaatccgactcaggaagtggtttggtaaagttggaaaggtattggcttgtgactgaggagaggtggctttcctttgttagcatcccatagccggatgctaactttgctgtatttaacgatgctcatcactaagggccgatactgtctaatgcctggtctacctgaaaatgtgcccttcagtgctctagtggtggtgtatttacatctaggcttcctgtcgataagctgttagttaccattgaatccagggagcactttacacactaatcatctttcccagttcacagcctgtttcttatcttctttgtcatgatgtacatttactcatgtctttcctttgctgtaccctgacagaccatttgcccacttgctgcccagcctatttttacccgaaggcttaaatggcctctgaagtctcaagtctacgggaaaataagtaaaacctgcccacatgcttgtgatggtattggaatatttcagtcctttgagaagaacacttcactttgaaccttacgggctattttccagactgtccaaatatgatttgtttcctctcaccatcatttccagtaccctgtcccaagtgtttgaatatagacattgatatgccctgatttttgctctacttcagaaaggatcggggatgtagtttagccctctaggagcttggaactaatttgtttgtctatttcttgtttgcttccaagttgcttattatgtgttacaggtagcagctacagctgaaggccatggtgaattgctggtgatgtaaatactcccagccctgactgatcggccttgtttaaattttaaggattagtaaacaggttgctgctggagctacttctgcttaggctattaggagaataaatgttgaaggaaatggagtccaattcggggcttactggctttgacagtacgaggaagcttttcagtgccacacgtgtcaaactctttctcaccatgctgtcatttgtttgttgttttggagcaactcacttagttttgtttttgattcttttgtacaaggttgggtgattgtgggtgagattgtgcagtaggaataacagctgctggttgagaattacccctcaaaagtgaaaatagcgtgagctgtatatggtaagtggattgacctctaaactccctagaagggctgtagctttgaaggtggacatttattgggctcgcacgtgacacttattggggctaaagatgaatcccgaaggaactaaataacagaatgatctgtttgtctccacaaggtcagggatgttggaagctggagtagacaggattatttctcaggtggtggatccaaaacttaaccacatcttcaggccacaaatagaacgagcaattcatgagttcctggcggcccagaaaaaagcagctgtgccagcaccccctccagagcccgaaggccaggaccctccagctccatctcaggacacttcctaaggtccagtatcctatcttctgtccaggagtatgcatctctggcttgtagatatgtaaaatggataggaatggggtaggccgtaattgaggatcattcaggaagtatttactgcagatggacttcacctactgttataagtcactttttactgagaactaattagtagcagtttcctgtgtcagtgactgattttctgttccaccagcgctaaacatgtaagctatggatagatgcttcattagaaatcagctgggatgattggtgtgcataaaggggattcaaatgaaagtcttattttgctgaaatgtttaaatgagtctctcctggacatgagttaacttaggcttgcaattttatttaaaatcaagcagtgccttctgaagtgatatcctaaatgggattcagagtctgctttgagtgcgactcgatttccatgaatttagaaggagtttgtttaccactatcaattaccatgggattcttctgttaggaacactccccctttttaaattaaatttggaattaaatgtaattttaaacagctgtagatgtacaaaagaatgctttttgcaggttttgggagacattagtaggagcagcgatgaagttagcagtggacttttcgccgttgttggtgactgctgggatatgttttatcccttcattctgatttggtgttctttttaagattctctgagatgcctgttataatcagtaagtgaggtgaattgactagggcgttttgagcgtcagtgatgagcaacgcaagagcatcaggactgtctttttgttcctctattgagagaagcccttgagtccaatatggagtgtaaaacattcattttaagtctttctttttaattgtaaattcctttaggaacataaaagtgaatatagtctgttatcaataaataacattttgatatgattatctttcctttttagaatacgccagacaccttttgaaagctaatttttggtgaagaaatggattcggttacataagagtgcaacttcagactgaagataggccaaggtcgtcactgatctcaagatttcaaccttgaccatgggcagtgaccagattgaaaggggagcaagttcggcagtgggagagttgactgtgtcaccccctgcattgtgctgccatttggccagcctgtccaagggcatgacaccaagtagacactacagagagagaaacactacagcaacccagggttgtcctgaaacagacttttatacttgaacatggagactgcacatggactttagggtttgtgctgtgggataaacggaagctacagtgagaacatagccagtcccaaagacaatttcaaagaaaaatgacagtaaagattagctgggagtagtctttgacagtgcttatttgatactgtctctcagagtttgcaaaccagattgtacaagtcattagcgtcagatagctttaaagttgtgaccttcttgtacatgaatcttctagccagtttcctttcctttgtaacgaaacatgaaatcctagaatgtatgagaagttcagacattaggcataaggaaactcgtttgcaggctctctgtccagggctgcttcctgtcctggaggggccagtgagtcttaggtatgtttattttattctcacatttgtgtttttttagaaaagtgaatggtcaataaatggcttatctttcataataaaattatttgatacttttactccgaa

SEQ ID NO: 8123 - DNA, 5693 bp, Homo sapiens
atctggacaagcaggaatggaatcctacgatgaacaaaaaccagttgcgaaatggtctgaggcagagtgtggttcagtaagtaagcagaatttaaagcttttgaaaaggcagtcatcacaagtgtgatgcacaagaaggttgaggtctctgtttagtcaaggttgatgggactttatatcaagtatcacttaggagttgcagcagtctgctcttttgttataattaaggttaaaggaagcaaagtactcagttgaaattccagtttctgcagcctgtgaaggcctcctgtgtgcatctctactgggtgcatcaaaaggcattccaaatcgtgagacattttccctgctctttgaagtttcagtgttgtccaaacatatatgtgagttttataccaagatatcagggtttggatcttgggcaagaggagttggatctttattctcacaggtgaatgtgaactaaataaattctttgagtccaccaggactgccacctctaaagtgtaatggtgacagctttcaggaaggcatagtcttaataaagtatcgtacttcacagtaacaaactgaaccttagttaataaaggtgctattgatagcttatctgagtgacgcacaaaagtggaggtggaggagggtacagaaatgggagaacacattagtgattgcctggggttacggatgggaggagggggtgagtgtgacttgcaagtggtagcacaagggggagcttgcaatggtgcagttaagtgtcactgaattgtgctgtgctcacgtgcaacagctcgtatggtaaagtcgcacggagctacacacacaaataagtgcaagtgtaactgaagtctaaataaggtctggattggaccagtgtcattttcctggttttgatattgcactagttacgcaaggtgctgacattagagctggctgggtgaagggtgcgtgtggaactccctggactcttcttcacaacttcctgtgaatatgcagcgattttaagatttctaaagtttttaaaagtgttttactaacaagctagtacttccaatatggctgaatgctgggaagaagcctgatagcagaagatgcccagtgccttgtcattctggagtcagtaccgagtgcctttccctttctccagagaacagactggtggcaccgggctctttcagaaagaaggggacagtagctgccccttactgagcaactctttattacatgtctggcactggtctttacatatatcactcatcctcatgaaaagcctgtttcacagctaaagtcacttgtgtttaccctgtcttgagtaaatcaaaacactgaacattctgaaatatttggaaagttgccatgattgtatgaaggctgttaacattgctttgatttctgtaatgagcatggatgtcattctagaggtatgcatgtggcgcttcctcttgcatttctttagtaggaattgtaatacggaaaagtgcacagaagttcagtgaaacagataattagaacatcccttgatcacccagatcgagaaatggactcacacccccgaaacagcctagctccggatgtactttcctcctttcggaagttttccatattcctgacttttatactaatcatttcctctctgcatagtttttaccacctctgtgaagttgttgtttttttttttttccctgctttttgatttgacttagaatgtgtttaacctgaaaacatgaacttggctttaatactgggacatttctccacaattcttgctagcattttgaatttgaggcaaaatctactggagtttcgaaacgcagactttctgcttgcccccaggtgctctccccaggtggacactgcaggccttcagagcattggctcactggcctggctgttctggcccagatgctgtaacccagtgccacagcctagagggtttaacaggaaattagcctgtgctattgcactgaattatgacgaataactcttgtaactgtacaatatttgttttttccatcttgtacattgggctcctgacaagattttatgttttcctcaaaagtttaagaatctccaggaaagtgagctgcactcccttggtagtttgtttcccctgatcaggggttttggtcagttggggatgctttaacaaggcgccgtagactaggtggcttgtaaacaatggaaatttacttctcaccattctggaggctagaagtccaagaccaagatgccagcatggtcaggttcaggggaaggccttcttgcaggcagcagactgccaactgcttgttcttctcatgtggtggaaagagagctcgctaacttcctggggtcccttttgtaagggcataaattgcattcgcggaggctctgcccccatgacccgatcgcctcccaaaggccctacctccaaaggccatcacattaaggattagatttcaacataggaagtctgggggacacaggcatttagttgataatatcaagcttttacatctggtaaaggaccctgtgaatccgactcaggaagtggtttggtaaagttggaaaggtattggcttgtgactgaggagaggtggctttcctttgttagcatcccatagccggatgctaactttgctgtatttaacgatgctcatcactaagggccgatactgtctaatgcctggtctacctgaaaatgtgcccttcagtgctctagtggtggtgtatttacatctaggcttcctgtcgataagctgttagttaccattgaatccagggagcactttacacactaatcatctttcccagttcacagcctgtttcttatcttctttgtcatgatgtacatttactcatgtctttcctttgctgtaccctgacagaccatttgcccacttgctgcccagcctatttttacccgaaggcttaaatggcctctgaagtctcaagtctacgggaaaataagtaaaacctgcccacatgcttgtgatggtattggaatatttcagtcctttgagaagaacacttcactttgaaccttacgggctattttccagactgtccaaatatgatttgtttcctctcaccatcatttccagtaccctgtcccaagtgtttgaatatagacattgatatgccctgatttttgctctacttcagaaaggatcggggatgtaatttagccctctaggagcttggaactaatttgtttgtctatttcttgtttgcttccaagttgcttattatgtgttacaggtagcaactacagctgaaggccatggtgaattgctggtgatgtaaatactcccagccctgactgatcggccttgtttaaattttaaggattagtaaacaggttgctgctggagctacttctgcttaggctattaggagaataaatgttgaaggaaatggagtccaattcggggcttactggctttgacagtacgaggaagcttttcagtgccacacgtgtcaaactctttctcaccatgctgtcatttgtttgttgttttggagcaactcacttagttttgtttttgattcttttgtacaaggttgggtgattgtgggtgagattgtgcagtaggaataacagctgctggttgagaattacccctcaaaagtgaaaatagcgtgagctgtatatggtaagtggattgacctctaaactccctagaagggctgtagctttgaaggtggacatttattgggctcgcacgtgacacttattggggctaaagatgaatcccgaaggaactaaataacagaatgatctgtttgtctccacaaggtcagggatgttggaagctggagtagacaggattatttctcaggtggtggatccaaaacttaaccacatcttcaggccacaaatagaacgagcaattcatgagttcctggcggcccagaaaaaagcagctgtgccagcaccccctccagagcccgaaggccaggaccctccagctccatctcaggacacttcctaaggtccagtatcctatcttctgtccaggagtatgcatctctggcttgtagatatgtaaaatggataggaatggggtaggccgtaattgaggatcattcaggaagtatttactgcagatggacttcacctactgttataagtcactttttactgagaactaattagtagcagtttcctgtgtcagtgactgattttctgttccaccagcgctaaacatgtaagctatggatagatgcttcattagaaatcagctgggatgattggtgtgcataaaggggattcaaatgaaagtcttattttgctgaaatgtttaaatgagtctctcctggacatgagttaacttaggcttgcaattttatttaaaatcaagcagtgccttctgaagtgatatcctaaatgggattcagagtctgctttgagtgcgactcgatttccatgaatttagaaggagtttgtttaccactatcaattaccatgggattcttctgttaggaacactccccctttttaaattaaatttggaattaaatgtaattttaaacagctgtagatgtacaaaagaatgctttttgcaggttttgggagacattagtaggagcagcgatgaagttagcagtggacttttcgccgttgttggtgactgctgggatatgttttatcccttcattctgatttggtgttctttttaagattctctgagatgcctgttataatcagtaagtgaggtgaattgactagggcgttttgagtgtcagtgatgagcaacgcaagagcatcaggactgtctttttgttcctctattgagagaagcccttgagtccaatatggagtgtaaaacattcattttaagtctttctttttaattgtaaattcctttaggaacataaaagtgaatatagtctgttatcaataaataacattttgatatgattatctttcctttttagaatacgccagacaccttttgaaagctaatttttggtgaagaaatggattcggttacataagagtgcaacttcagactgaagataggccaaggtcgtcactgatctcaagatttcaaccttgaccatgggcagtgaccagattgaaaggggagcaagttcggcagtgggagagttgaccgtgtcaccccctgcattgtgctgccatttggccagcctgtccaagggcatgacaccaagtagacactacagagagagaaacactacagcaacccagggttgtcctgaaacagacttttatacttgaacatggagactgcacatggactttagggtttgtgctgtgggataaacggaagctacagtgagaacatagccagtcccaaagacaatttcaaagaaaaatgacagtaaagattagctgggagtagtctttgacagtgcttatttgatactgtctctcagagtttgcaaaccagattgtacaagtcattagcgtcagatagctttaaagttgtgaccttcttgtacatgaatcttctagccagtttcctttcctttgtaacgaaacatgaaatcctagaatgtatgagaagttcagacattaggcataaggaaactcgtttgcaggctctctgtccagggctgcttcctgtcctggaggggccagtgagtcttaggtatgtttattttattctcacatttgtgtttttttagaaaagtgaatggtcaataaatggcttatctttcataataaaattatttgatacttttactccgaa

SEQ ID NO: 8124 - DNA, 585 bp, Homo sapiens
gttttttccatcttgtacattgggctcctgacaagattttatgttttcctcaacagtttaagaatctccaggaaagtgagctgcactcccttggtactttgtttcccctgatcaggggttttggtcagttggggatgcttcaacaaggcgccgtagactaggtggcttgtaaacgatggaaatttacttctcaccattctggaggctagaagtccaagaccaagatgccagcatggtcaggttcaggggaaggccttcttgcaggcagcagactgccaactgcttgttcttctcatgtggtggaaagagagctcgctaacttcctggggtcccttttgtaagggcataaattgcattcgcggaggctctgcccccatgacccgatcgcctcccaaaggccctacctccaaaggccatcacattaaggattagatttcaacataggaagtctgggggacacaggcatttagttgataatatcaagcttttacatctggtaaaggaccctgtgaatccgactcaggaagtggtttggtaaagttggaaaggtattggcttgtgactgaggagaggtggctttccttt

SEQ ID NO: 8125 - DNA, 101 bp, Homo sapiens
gcttgaacccaggaggtggaggctgcagtgagccaagattgcaccactgcactccagcctgggcgatagagtgagactctgtctcaaaaaaaaaaaagaaa

SEQ ID NO: 8126 - DNA, 130 bp, Homo sapiens
tggtctttagttgaggtagtccgtggtatgtgtcagtgtttgtcatccttgtgtgtgcagaagtagcacctggggatttaggggaaaatgcatatttctgattaagaagttctggggtgggacctaagag

SEQ ID NO: 8127 - DNA, 130 bp, Homo sapiens
tggtctttagttgaggtagtccgtggtatgtgtcagtgtttgtcatccttgtgtgtgcagaagtagcacctggggatttaagggaaaatgcatatttctgattaagaagttctggggtgggacctaagag

SEQ ID NO: 8128 - DNA, 478 bp, Homo sapiens
agcaactctttattacatgtctggcactggtctttacatatatcactcatcctcatgaaaagcctgtttcacagctaaagtcacttgtgtttaccctgtcttgagtaaatcaaaacactgaacattctgaaatatttggaaagttgccatgattgtatgaaggctgttaacattgctttgatttctgtaatgagcatggatgtcattctagaggtatgcatgtggcgcttcctcttgcatttctttagtaggaattgtaatacggaaaagtgcacagaagttcagtgaaacagataattagaacatcccttgatcacccagatcgagaaatggactcacacccccgaaacagcctagctccggatgtactttcctcctttcggaagtttgccatattcctgacttttatgctaatcatttcctctcttcatagtttttaccacctctgtgaagttgttgttgtttttttttcccctgc

SEQ ID NO: 8129 - DNA, 280 bp, Homo sapiens
aatgtgcccttcagtgctctagtggtggtgtatttacatctaggcttcctgtcgataagctgttagttaccattgaatccagggagcactttacacactaatcatctttcccagttcacagcctgtttcttatcttctttgtcatgatgtacatttactcatgtctttcctttgctgtaccctgacagaccatttgcccacttgctgcccagccctatttttacccgaaggcttaaatggcctctgaagtctcaagtctacgggaaaataagtaaaacct

SEQ ID NO: 8130 - DNA, 433 bp, Homo sapiens
aaatttttttagtgataagaaccagccaatagtttggaaaaattagtttggaaaaatttcaaaactaattatactttttggcccaagttttaaaatattggggaaatgaactaggtatggtttattttcaacagagaatgaaaaagtataaacatatcactggatatatttagtgatgagttcttattgccaagtgttttcatgagactgctttatttcaaaaatgcataaaactaccaaaactgttgacatttaattgcatcaatttacatcggctctgattttgttatagatagttattgccttccattttactgagagaagtgtaattgttttcaaccttatagacaacatctggggaagatgtacgagacttcacaaaggtacttaagaacaagttcaggtcgaagaagtactttgccaaacaccctcg

SEQ ID NO: 8131 - DNA, 399 bp, Homo sapiens
gaaagacaccgtctcagatgactagagaagagaaactcaaaagtgtgaagttttctactttataaaaaatagagaaaattgtagtaagaagtataaaaaatgtcaagtgcaatttttgtgaaatgaaactttagccttcagattcatagttcattttattttgtacatgatagaaaatcaggaagtagtaatattttagtgctttgtgatagtcaatgtctcaaacatgtcaaaatagaagaatacagtatttggtctgcagaccaaaatagatttttttaaatccctgtagacctcaaactttgctaaatttatgtaccagtttatctcttttatttgtggaatggctaagaaatagaagaaagaacacagccaaagcataggagatacctttttccc

SEQ ID NO: 8132 - DNA, 443 bp, Homo sapiens
gggagatggcccctgcacgtaggaagaccacagttgagaagcgtcggtcctccctgcatcctagccccacccgagtgtggattttagcgctgagcttttcttctggctgagcagtagccgctgttaggcaccatcttgtagtgctggaagtcgctgccaccactgcaccaacagttgccaacctgacagaattagatatgagcctcatcctcccaagtttggaagaagagcttatgttcagcctctggcgtccactgtatcccaccaagttggggttgtcgggaatgtcccgcccctccaccacatctttcaggcctcagtttcccctctgtgaaatgagttccctccagctctgatggggccgtctgtggaggaggctagagactgtagctttgtcttgtcactgatctgctatgtggcctgggcctcagtttcctcatctg

SEQ ID NO: 8133 - DNA, 646 bp, Homo sapiens
ggtggctgcctgctgactcacccactccttccgcaggctccaggggcccctacagcagcctgactccagccagccctgggccatgggggaaggagatggaaaaggggcttggctccctctgacccttcacccagcccctgcaccctggagcagagctgcaggcagtgtgaccgttgtgctgttattggcctaaacacatagcaacaggaaaacaaccccaaaaccccagccttaagagcaagtccaacagtgcgcgactccccaggtcaggagaagccccgatgtgtgcagaatctgcagatggggctgctctcggccctgcctctggctgtggaaacaggcctccaagtacccaaggtaggcattttggtggccctccccaagctcctctttctcctccagcccagctgtgggtaccaagtgccctggaagtctactgagtggtgtccagggtcccctcagacagcatcccagagacttgaccttcctctgtgtgtccaggctgtcaggcccagctctcagggactctttgaccagagacgtctttgaagcctacccttgaccagacacggaaccttgtccttcctctgaacttgtagaataatttttgtttctttaacaaaacgagcccctccctccttctcta

SEQ ID NO: 8134 - DNA, 440 bp, Homo sapiens
ggttcattataaatgacaaaagccactcttgttactccagaaatcccaaggcttttaagaaatctgggccaaaaactagggacaaaaatcaaatatatatatattgcaattttatatatatatatatgtgtgtgtgtgttatgccacagtgccagccctgggctgggagttgaagataaaaggatgagcaagacagtgtctctacccccacagaggaagaggagagggacagggcacagttgagaatgaccactatagacattctataggaggaagggggctggcactctcaactgcattggctgctggccccggctgaccccgaggaggaaaccctcctgcaaacagtgttgagaatcccagccaggctcttaggattgcacacagcaggtgtgccccaacaggagcctggtgagatccagaaggggtaaaggctgtgt

SEQ ID NO: 8135 - DNA, 440 bp, Homo sapiens; identical to SEQ ID NO: 8134

SEQ ID NO: 8136 - DNA, 288 bp, Homo sapiens
gaaacagccaagtggaagagaggcatacagaaggtatgggggtgcatcacggggcatggagctttcatgccctctgtggatacaccagcctcccagcacttcagtgcgtttaccaactgggaaacacctcaaccccatcatttagacgtttctatggaggctccattatataggcatgattgattccatcactggccactggtgactgaactcagcctgcagcccctctcccttccttagaggctggaagatggagctgaaggttccaaccctccaagcatggccagc

SEQ ID NO: 8137 - DNA, 288 bp, Homo sapiens; identical to SEQ ID NO: 8136

SEQ ID NO: 8138 - DNA, 3207 bp, Homo sapiens
gttttatctcttgtaattttcacaaccttttgaagaagttgagagactggggaacttgcccaggaaacaagacaactagaggtagaactgggttttgaacacaacattctttctccagggcctgtgctcttgattccagcctgttccatggaaaatgttcaccaaaggctaactcagcgggtgtccttgagcaccactgagccattcaagggcaaatcaatctatgttcagaaacaaatggaaatgaagactggaaaacaagaaaatcagatatggtgagaaactgggggaggagagaaaagtctgtgccttctgccagtctcagtgcaaaatcagtatggcataaaatagcacaaatggacaagaagcaagtgagagagtacagtgctctctcaggaaagcattctactgtatttatggaaaaataaactctctcaattaagccaaattttcaagataaataaaaggatagttccatccatctataatttagtaagggatacaacaataaatgttctgaaatttattttttaatttcctgaattaaaatctctctccatatggactaggagttgcaaaaacatatacatatatatgcaattatatatataattccagaaaaccagattagagttgaacagtgacacctatgtaaaaaccaatgtgtgtgatggagtcatcttatttcgtgcattttagcattttcctaggatactgttctatgtaaattctgtaatagagttatatataatataattactgtagctattagtgatttgaaaggccactttcttggaaaatttcaacttagtgttgtcaccggcattcctggtcattttctttgtgcatcctgtacacgtgtgcaggtgtactggactctgtggtcatgggaacctccgagtcttcagacacccgctggaagaccagccatcatcactcaagtctgcagccagctgcccaatacagaatggagtgagatggcaccttccttactgtcatacgtgtaaagtcttgcagtaggagaggatctgagagggagcagcaattccaggggaaactgttcattgataataacatctgaatgacatttgacagtttcctaagcactgtcacgtgaatgttgtttctgaactatcaccacaaccttgatactccttttaagtaggtaccatcaacatcatatgacagagaggtagctgagggtaagggtaaatgactagttcaagtttatatggcaagcaatcaactgcagatgcaaatccatgtctgtttttatttttttgttgttcttgttgttttttttttgtttgtttgtttgttttttttttttttttgagccagagtctcactctgtcatcaggctgaagtgcagtggcacaatgttggctaactgcaacctccacctcctgcgttcaagcgatcctcctgcctcagcctccctagtagctgggattacaagtgtgcgccaccacgctcagctaatttctgtatttttagtagagacgaggtttcaccatgttggccaagatggtctcaatctcctgaccttgtgatccacccgcctcggcctcccaaaatgctgggattacaggcgtgagtcaccgcgcccagcccatgtcttctcttgattttgtttgctttctgttccaccatgccatgtttctgacagtatcgctagacaccactccagaccaccagcaaagaaagcagagggcttgcgctcagggggcaggtcctgaggagtctcctgaagtcctcccgtgcaggtcaaggctttcattaactacgcggatcaatttaaccatctctcttgtagaggagtactttaaaacctagtcaatgagtgctaatcacagaaatcatttgagattaatcttagaaataatcattaaataaatgtaataccctttaaaaaggggcataaaaacagattcaagttaagaaagtctagttgacaacaaaatgcaattccacatcccagaagcttactgaattgcattaagcttaggatgctaatattggatgtcatgtctctatatggttaaaatgcacaaagagataaagacgcttgcatttattttaaaaacttattataatacttgggtaatttatcagtgacgttgtttatttgtactgtggttaaatttttagcgcaataattgtatttcttaaaagacacgctaaattgttcctctcttcttatgcctgggaaaccatatgaagattcagtaggaaactaaattttgaagtttattccctaacttttctttaagatacattttgactatttgaatgttttatgttgttgctatttttaagggaatcatttatatcagatataatgagagaaatttaaagtaatttctacatcaaatcaatattatggtatttgtaaaaaataataataataattaaaactctgttttttctttgcagttgttttcattgtaatatgatacctgaattttatgtaagaatgtgagagtgggccaggtgcagtggctcacacctgtaatctcagcaatttgggaggccaagacaggtggatcacctgaggtcaggagtttcagaccagcctggccaacatggcaaaaccccatctctactaaaaatacaaaaaattagctgggcgtggtggtgggtatctgtaatcccagctacttgggaggctgaggcagaagaattgcttgcacccaggaggtggaggttgcagtgagctgagatcatgccattgacctctgaactgggcaacaagagtgaaactccatctcaaaaaaaaaaaaatgagagagaaaaaagaaaagaatgtgagagtggttagtttataatatagttaacatagttgaatctgactgttttttgctttcaaaacatgtattattccactaagtggtatcagttccctttgcattacagcagtcactggaataagttaaatattgttatttttgttatttcttgtccaaaaaatacacactgtacactttctcttctaatactgtcctaaacaacttttcgcaggattcactggttattctcctgcctgttgcccaagggctgtagaagatacagagagaagtaccacccagatcccgtttcaaataagtatttgctgctcagatgtgaggcgtgtggccagggatggcctctgctgtcagcatcggcacctgtccctggcagccgcaccgagaggctgagcgagctggg

SEQ ID NO: 8139 - DNA, 149 bp, Homo sapiens
ggattaatggtctatgtatacttccatatttataagaataatgcaaatcagaagagccttcaccagacgaggccatttgaaagagatgggttttaagcaaactgggaaggtgatgtggagtgacgattagttactattagcaaaagggt

SEQ ID NO: 8140 - DNA, 179 bp, Homo sapiens
gaaaccctgtctctactaaaaatacaaaattagccaggcatggtggcgaatgcctgtaatcccagctacttgggaggctgaggcaggagaatcgcttgaactggagaggtggaggttgcagtgagccaagatcacaccattgcactccagcctgggcaaaaagagctaaactctatctc

SEQ ID NO: 8141 - DNA, 324 bp, Homo sapiens
tgcttcctgggcaggacttggtctgggggagcaaggggaggagcctatgggctgggaatcaagtcttgcctcccctgagggtgtgaggaagtccagaacactgccctctccctcttccctaattggtaccccccagtcccagtgctcggtgatgggaagatccagtgaaaggccacatgcttagactccccaggcagagctcagctctacttctcacctgctctggggccctgggcacacagctcgccctcagaatctccaggtctatattttgaggggtgaggctgttcctacctccattggtgaggccctcggtcagcacaa

SEQ ID NO: 8142 - DNA, 324 bp, Homo sapiens; identical to SEQ ID NO: 8141

SEQ ID NO: 8143 - DNA, 209 bp, Homo sapiens
ggcaatcaccaatctgttctccatttccctaattttggtgtgtcaagaatgctaaataaaggaatcgtacaccgtgtagcctcttgggattggctttttccaccgagcattaattctctggagattcatccaggttgttgcatatatcagtagttcattcctttatattgcatccgggctatggatgtaccaccgttgatttaactctt

SEQ ID NO: 8144 - DNA, 888 bp, Homo sapiens
ggctgctccattgccaatgaactccatgaaccccatgaaacctgccctgccccctgcgccacacgggtgagtgtgggctcctctgcccacccctcaggccctggggttgggggtggcatttctggaagatcctagactcttggacaccagtggcttcctgacccaggcctcagcagcctctttccctgcagtgatggttcattcgcatatgagtctgtgccttggcaacaaagcgccactcagccggctggatcgctgtctgtggtcactactgtgtggggagttggcaacgcgacacagagccaggtaagcacccactggtgccccacccccgagcagacagagcctcccagcacttggcagtgcttagtgcctcctcagagctctgagagacgaagaggctgagaggtgaggacagagaggctgaggcatgacatatgaggatggggcctcctgagtcccctaagtctttggacactggttctctttccacacctgctgtgggattttcttctcctgtcttcacctagccttcacaaaatgccccaacctccctgtggacagctgctttccctgcttcccgtgctataccctgtcccccccacctctcccccaacccacttgccaggcctgttggtttctagcactttggagctgctgcatgaagcacgttgtttggctggttccctttggtgattcctgcttcctcataggttttggggaaccccatgggccctgcagggagtccctctggcagctccatgatgcctggtgtggcagggggcagctccgccttgacctccccacagtgcctgggacagcaggcgtttgctgaaggcggcgccaacaagggctacgtgcagcaaggcgtgtacagccgcgggggct

SEQ ID NO: 8145 - DNA, 209 bp, Homo sapiens; identical to SEQ ID NO: 8143

SEQ ID NO: 8146 - DNA, 888 bp, Homo sapiens; identical to SEQ ID NO: 8144

SEQ ID NO: 8147 - DNA, 487 bp, Homo sapiens
gccccagccatcttcaccttgaagcagcattagggacaagagcactgaatagggagccaggagttggttttgtacttccttgccgggtgaccttgggtggtcctgagcctgctgagcttcattgtcagcctataaagtgaggggtgggcagggggattaactactcccctaaggcccttcagctctaaaagccccagggcttttaaaaagctctcttggctgagccaacctcccgggccctggagatcccagttctgctgtcccccagagggcctggagcagcagaggcagccgtgggtgggaggggctctattttttatttcattctgaagctgactttctccatcttcaaggccacaggctgacattgagatttgggctccgtgtgggtcttggaccttgagcctccctctttttttcttggactcagcagaatgggaaggtggccaggagaagcccagctggtccaccctccctgggtccagag

SEQ ID NO: 8148 - DNA, 1086 bp, Homo sapiens
gtttaatcctctttagaagatggcttataatcaactatagaactagcaggtgttcttaaatgcaggtttctaataactttggaaattgtaacattggaataaaggaaacaacttttagaactctcattaagaggtggagtgttcatgaatggaatgttcagttaacaggagttaactgaattaactgaaccaatagaaaactgaagtaatctttttaactttgattaaaacacttctgatcttttgttttgtttttcagagtcaaggaaacttttcttttgagctagttacagcttttaacagttgaggtactcctatgaacaaaatttggaacatatttatttctctctacctgatttcttcagaatttggaaactagttttgaatgttcttaacttacagcaatatagttatctgcataagggcaataagaatctgttttcttttacaacaggacacaattggagaaactggttattttaccaaggctttgactggaatgatgtgctttcctttaaggaatcaaacttgacttgtagagccagtaaaagccctttggggaactgggctcataccttgcctacaacagtccctgtacatggtttcttatctgtggtaagtaaataatgtcactttctgacaggtccagaagccccaagttatcttgggaccccaagaggagaagaatttactcaactcatagttattggagggtacaaactgatggctgagcttggctttaaaaagtcttatataagattccttctatggaacagaattccatcaaagccaatttaaaaagagccgatgtgaaaaataattattcttactgcactttatacaaataatcaggccaagtataataaagaaatttgtcttaccatgatttgccattagtaaaaatgggaaactggagagagggatattatgtttcaaaaactacagtatacttgttattagattctagtctcattagttgtttttaagtttgtttctgcaatttaggctaaccctgcttattcctgtgaaccaaccagtgatctctgactgctgctcagaagaaacaagagggataggtaatataaa

SEQ ID NO: 8149 - DNA, 31474 bp, Homo sapiens
ttttttttttttttttttttttgagacagagtcttgctctgttgcccaggctggagtgcagtggcacaatctcggctcactgcaagctccgcctcccaggttcacgccattctcctgcctcagcctccgagtagctgggactacaggtgcccgccagcacgcccggctaattttttgtatttttttagtagagacggggtttcaccgtgttagccaggatggtctcgatctcctgacctcatgatccgcccgcctcggcctcccaaagtgctgggattacaggcgtgagccaccgcgcccagcctaaattaaattttttatgatacacttatagcgcatcttatgtttccatgcagtttttttttaattttatgtgtaaatgtgaagtgttgcaaaataataaaaggaactctgtgggtttgaaatttggaataatatttttttccatgttgatgttacaatttggagaaatttttctcttattctatgtaaaatttttagggggtgtaaagttcagtctacagtgttcattcttagtcacctaactgtagccaactcccttgtcattttctctggaaaaattttgggatcatggcagcttttggattaaaatattttctgttaatttgtaagtgaacttgtttactgtgtgggtagtcatggaaccataagcaacacctgaccttttagtgttttccatattattaaaatctgcaccagaaattccaggtttcccaagctttaagtaaaagccctaaagtacattggcttctcctatgtactgtgctgggtccagaacatgcagttaagtatcaaagttcttatgcttatgactgacaaattaagtgacaaaaacagcacaaaaattacatatttttggtatcattcaaccaagtttatgacaaaaacacagtatttgaaacattgttatcctcttataatgtttaaaaatatatatatatatatatatataaaaatttttttttttttttttttttttttttttttgagacggagtctcgctctgtcgcccaggctggagtgcagtggcgcgatctcggctcactgcaagctccgcctcccgggttcacgccattctcctgcctcagcctcccgagtagctgggactacaggcgcccgctaccacgcccggctaattttttgtatttttagtagagacggggtttcaccgtgttagccaggatggtctcgatctcctgacctcgtgatccgcccgcctcggcctcccaaagtgctgggattacaggcgtgagccaccgcgcccggcctaaaaatatatttttaacatgacagataaaatgtgtatttattcggtaaaacataattattttattttattttattttatttttcttgagacagagtctcactctgtcgccaggctggagtacagtggtgcaatctcgactcactgcaacctccacctcccgggttcaagcagttctcctgcctcagcctcccaagtagctgggactataggcgtgtgccaccacgcccagctaatttttgtcattttaatagagatggggtttcaccatgttggccaggctggccttggtctctagaccttgtgatccacctgccttggcctcccaaagtgctgggattacagagatgagccaccatgcctggccaaacatgttttgaagtatgtatacattgtcaaatgattaattcttaattgctttacctcacatagttaacatttttctagtgagagaatcttgtcttcacatttttcaaaaatacgttattatgaattaaagtcaccagcctgcaaaataaatctcttaaactcattcctcctaacaaactataattatgtattctttaacagataactttccaaccccttttttctaaatatcttagcatctggttgtcaccatgttactctctacttcaatgagattaagttatttagaatctatgtctaagtgaaatcatgagatatttatccttctgtgcctggctaatttcagctaatatactgtctgccaggtttagccatgtgattgaaaataacaaaattgtattctcttagagcccacatagccaaagcaagactaagcaaaaagaacaaatctggaggcatcacattaccttacttcaaactataaggctattgtctatattgactataaggctattgtcaccaaaacagcatggtgcggatatacaaataggcacatagacaataaacgtgtgtgtaagtattttttttcatataatgacttcttttcctctggatagatacctagtagtgggattgctggatcaaacagaagatctactttaagttctttaaaaaattttcacactgtttttcatagtagttgggctagtttacattcacaccaaaagtgtaaaatcattcctttttcaccacatccctggcaacatgtcctatttttttattttttgattatgatcattattgcaggagtgaggtggtatcacattgtggttttgatttgcacttctctgataattaggtatattgagcatgtttccatatgcctgttggccatttgtatatcttcttttgagaattgtctgtttatgttcttagcccactttttcatggattttttttttttttttttttttttgcggattcgtatgagttttctgtagattctggatattagtcttttgtcagatgtatagatattagtcttttgtcagatgtatagattgtgaagattttctctcactctgtgggttatctgttaactcggctgattatttattttgcttttcagaaggtgttcagtttaattaagccccatctatttatctttgtttttgttgcattttcttttagattcttggtcataaagtctttgagtaagccaatgtctagaaaaatttttcaatgttatcttctagaatttttatagtttcacgtcttagatttatgtcttttgtccctcttgagttgatttttgtataaggtgagagatgagttttcagttttattcttctacatgtggcttgccaattatcccagcattatttcttgaatagggtgtcctttccgcactttatgtttttgtttgccttgtcaaaaatcagtttactgtaagtatttgggtttatttctgggttctttattctgttctattggtctgtgtgcctatttttataacagtacagtgctgttttggtgactatgggtttatagtatagtttgctgtcaggcaatatgatgcctccagattgttctttttgttcagtcttgctttcactatgtgagctcctttttggttctgtatgaattttatgattgttctagttctgtgaagaatgatgttgatattttcatgggaactgcattgaatttttatattgcttttggcagtatagtcattttcacaatattgattctacccatccatgagaatgggatgtgttgtcatttgtttgtgtcatctgtgatttctctcagcagggttttgtaatttttcttgtaaggtatttcatgtttttgtttaggtatatttctaagttttttttgtttgtttttttgcagctattataaaaagtgtcgcattcttgatttgattctcagtttggtcgctgttggtatatagcagagctactaatttgtgtacattaattttgtatcctgaaacttcattgaattcatttatcacttctagaaactttttggaagagtctttagggttctctaggtatctgaccatatcatcagcaaacagcaacagtttaactttctctttgctgctttggataccttttatttcttcttcctgtctgctctggctaggacttccagtactatgttaaagagaaatggtgagagtagacatccttgtcttgttccagttctcaaagaatgttttcaactttttctcattcagtattatgttgagtgtgtggttgtcataaatggcttttattacattgaggtatgtcccatgtatgccagttttgctgaaggttttaattataaagtgatgctaaattttgtcaaatgatttttctgcatctattaattatgtgatttttgtttttaattctgttgatgtggtgtatcacatttattgacttgcatatgttaaataatacctgcgtttctgatataaaaccttcatgattatggtggattatctttttgatatgctgttgaattaagttagctaatattttgttaagaatttttgtgtctacattcatcaagaatattggtctgtagtttgcttatttggttatgttcttttctggttttggtattggggtgatatgggcttcatagaatgacttagaaaattccctctttctctatcttttgaaatattgtcaaaagaatttatatcaattcttctttgaatgtctggtagaattcagctgtgaattcatctgatcctgtactatttttttgttggtaattgtttaattaccatcaatcttgttgcttgttattggtctcttcagggtttctaattcttcctgattaaatctaggagggttgtatttttccaggcatttatccatttcccctagattttctagtttatgtatgtaaaggtgttcatagtagccttgaataatcttttgcatttttatggtgtcagttgtaatgtctcctttttcatttctgattgcacttatttggatttttatctcttcttggttaatcttgctaatgtcctattaattttacttatcttttcaaagaaccagctttttgtttctttttttttttttttttttttcgagacagagtcttgctctgtcacctaggctggagtgcagtggcgtgatctctgctcaccgcaagctccgcctcccaggttcacgccattctcctgcctcagcctcccaagtagccgggaccacaggcgcccaacaccacgcccggctatttttttttttttttttttttttttttttgtatttttagtagagacagggtttcatcgtattagccgggatggtcccgatctcctgacctcgtgatctgcctgcctctgccttccaaagtgccgggattacaggcatgagccaccgcgcctggccttcatttatcttttgaattttttttgtttcagttttatttagttctgctctgatcgtggttattttctttcttttgttgagtttgggtttggtttgttctcgtttctctgatttcttgagatgtgaccttagattgtctatttagtatccagtttcttcaatagcctgacaggccgaaaattcctctaagttgtttcttagtgatggacattgggaaaactaaaattcctctcactctgtcaggttaataatcagtcctttgaccgagattatatgccccaaatatttaacttgccataagcatagctaaagtttgtcttcaggcactttgtgttccttggtggctaactctttgagtaaatataggctatcttcctgggagaaagatagtgtgtctgaacaaaggagaaggtcttctactgaatgagtgttgagccctgggtctttccaagtaaaggcaacaaatactggctgtctggatctacaggaatactgaaaaaggcactacagcgatccacactgagaaacactggctggtagtgggtataactgatagaaagtatgtggttgcagactgttgggtgcctgggtaatacgacattgtttattgacctctagtcctgcacaaatctccatcctctcccactttttttttttttattgggaatatagggttgttgcaggggcttgtgcagggaataatgagcccctatttcagataatcgtgtattataggggcatgtccatctatggcttcttttcatagaggatactgtttaaggttgggtaggggttttggggggtttatctctacctttattggagtggctgagtatacttttttctttatctgtatttgactgagaccataagtgggaggggacatccttgagcaagtgttccacttctggggttaacagaaaaattagagaagctgaaaggagttttattgtttcctgctctttattcccatattttctcttctcccctagtattttctcctctgtctccattttatttgcctggtcacaagatgatgttttaacattactagtactaaattgtggtacattgtcaggacattttttaatttgatatttttggtcccctggctccaattataaaaaaagtttaccttttgatgaaaaagagatataggcatcatgggtgttgagaagatcatagcccaaaagattgacagaggccgcagggcatataagaaacatatgggacctactgagcacgtcacacttagagcctgctgtaaggaatctgaaccccatgaaatgataaggtataggtttcgacttaaaacataagatccttttattagacatacctaccatgttaattctttcattatccaaggaatggggtttttaaataaggtgggatttatcagagatatagtcatgccagtgtcaattaaggcagttgtgtcaaaggcctgtgaaccagaacaacttcatctttaataggagctgggtaaaatgaggctgaaacctactgggctgcattcccaggtggctaaggcattctaagtcactggatgagataggaggtcaccacaaaatacaggtcatacataccttgctggtaaaacagattgcagtaaaggagccagccataattcaccaaaaccaaaatagcgacaagagtgacctctggtcctcacagctacactcccaccagtgccatgacagtttacaaatgccatggcaacatcaggaagttaccctatatggtctaaaaaggggaggcatgaataatccacccctagtttagcatatcatcaagaaataaccataaaaatggacaaccaccagtcctcggggctgctctgtctatggagtagccattcttttattcctttactttcttaacaaacttgctttcactttgcactgtggactctccctgaattctttattgtgcaagatccaagagttctctcttgggatctggattgcgacttttttcctgtaacatatttctggtgaccacagaacagactatattgcagaaaccctgacccaatggctacctttaggtaagtgttggggtcctgtaacatctttctggcaaacctggaagggacaatactgaaggaactctttgggttgggaaggaaatagactgcagcactgattggatgactttgggttacccgcataaagaatgggattgggttagaggcccaacttaggggagttagagtctcccctaatacacagtgggttagaggaccctcttaataaaaggcaaggacgcttgactgacctcaggttagaggcctgacttaggagggttagagtcccttctaagatttagggagttagaggtccctttcagtaaagtaagaacaggtaagaacaggtttggcaactgctattctctttggattaaactttcttgcagtctttgctgatggctgtgggtgacagggttaggcatgtacaggattgtgggacatagggagctttttcgtccctaaaaggggaaacttgagagctgatgggactgctggaaaacatccccttgctaccaacaagcggctgcctgaacttttcattgtcgacccacatgagtgggtcttttctctggcctccctaagcatttcaccttccccaccctgccacaggcaatactttccttctctacttttccttttttatcttttctgttactcagggcaaccttattgcccagagaccacatgttgaaactccaagttggaggttgaattaaagatgatgaagcccatctggaggcaaatttaagccttgtcagttgatattgggcactaagcagagtagcttatgtctgtgttttatcacacgtattttgctctggccagaatgaaaaaaaaaaattttcctttatgatgtgacttggcccccagggcaatggtgccacaagcctgatcactggggccactcagggtaaaggaacccagaagcctggcatgccgtcaaaagggtaaaaatttcttagtagtcagatttctggcttctctctctctctgcgcaaatggttgaatgaatggttaaaaataaaaattaaaaataagtgtggccaggtgcggtggctcatgcctgtaatcccagcacttagggaggttaaggccggcggatcacctgaggttgggagttcaagaccagcctgatcaacatggagaaaccctgtctctactaaaaatacaaaattagccaggcgtggtggcgcatgcctgtaatcccagctattcgggaggctgaggcaggagaataacttgaacccacaggcagaggttgcagtgagccgagattgcgccattgcactccagcctgggcaacaagagcaaaactccgtctcaaaaaaataaataaataaaataagtgtttatcttctctgtaaagctttgactaatgcaaaaaagaattctaagggtagtcttaagctggtatattttgtgctacagattcatttttctgtgtcaaggggtacttcaggataaaacaggcttagaacacctggaagctgccttttttttttttttttctttttgagatggagtctcactctgtctcccaggctggagtgcagtggcacaatctcagctcactgcatcctccacctcctgggttcaagcaattctcctgccttagcctcctgagtagctgggattacaggcgcccgccaccatgcccagctaatttttttttttttagtagagatggagtttcaccaccttggccaggctggtcttgaacttctgacctcgtgatccacctgcctcggcctttcaaagtccgtgagccaccacgcctggactgtaagctgcttctcaagacatcccagcaagctggttagtaacaaacttggctgcaggtccctgaaacaaacaaaaaactggatgaagtctccaacttgttttatgtccttgggagcttgaccttttaatcacgtggtggtactttctcttgatctcaaccttccagggaacaggaattttagggttcatgtcatagttagctctaaaaatcatattaaatagttaaaaagcctttgcaagctcaaaattaactactctaggctcctaggaaaggaaatgaagactgtcttatgctgtagctcagtagctaaggtttttgcactttcacagtggcggtccaggtttgattccccacttaggaagtaagtcgtttttggtttaatatctgcgtgaccttgtctattctcttcttctctgcagactgtcttaaatttttctttctctaagcacctgggcagttatctttggttaagtttaaaaagccagaaatatcagccatttggcataaaaaatcctaaaaggactttattaaagagtgctatgattaaaatcagtttaattaaaagtgaatgttcaagctttaacagcctggactccttgggaaaaacaggaggcaccagagacccctttcctggccctgttcttccaagggctccaccctaaagtcagtaatccaattaagacttaaaaactggcaaatgaaaaatcttacaactactgtagtaatcttcttctgtccttctgtgtagctatagatgtgttgtgtataatgtttatataaaagggctctaattaattggttgaaacaaaaataagtgcttaaatgcaatattataaaagcaaaataaaaactgtaatgccttttagttcatgtaactttagtaatctttgggaaataaaaatttcccaaatttttgtttttgttttttttttttttttgagacagagtttcattcttgttgcccaggctggagtgcaatggagcgatctccactcactgcaacctacacctccctggttcaagcaattctcctgcctcagcctcctgagtagttgggactacaggcatgcaccaccacgcccagctgatttttgggattttagtagagacagagtttcaccatgttggccaggctggtctcaaactcctgacctcaggtgatccacccacctcagcctcccaaagtgctgggattacaggcgtgaaccaccatgcctggcctcaaatttttctggggaaaaaaattattgataaataaaagttattgataagataaaaacatttagactaaattatgccggtcagatattaagtttgttaaatgctttaaggttatcaactgcttctttaacttttaaaaattgttcaatttacttaccctaaagccattagattctagataaggcctgggaacatgttctagataaggcctgggaacatgtggaattacccattcctcctagctatacaaagaagattataaagaaagagattttataagaaaggatcttgtatagtaaattcttgtcctaaagtaaaatgactggttgtttaaaaggagggatgtttagggcaagtcaaaaaatccaagaatgcctcaaatagtctgtgtaactcatgaaaggatttgtgaaagggaatttatgcaaaaaaatgttgtacaattcaaaggttgttaggcctcctaaatgcttcataaaatgccagtataactcttactgtacaacttgcctgcttaattgagataaggcctagggacatgtggagttagccacgccccctagctatgctggagagtcaacccttatttgcacttctgcctggtgtgtcctaggctaggatccacacctagtacacaattaaaatcccttacttaccaaggttttcaccaaaaataaaagttcctaagagttaacattataacatgtaattgaaactactaaagaaacaattctacatgcaaggtgttttttggtgaaagtttataagaggtcatggaaatgtggatttttttctgcctagattgaagtgttaaaagattgttttaagtaagaaaaaaatctaaaggtttaaacaagttgtggaaggtttataaaattaattgtaagagatcctgtgtgtggacatattggctaaagttaaaggggtattattcagttttccataaattaaacattggaataaaagcacaataggtttttctaaaagtactgatctgctctttcacaccaatcaatgtaaaagtttataaaaggtttataagaatcttaccttatggttaaacattaaaattgggtaaatatgtctattaggttttattgggtttgacattaatagtacattaatgtaaagatgaaatttggcttatgtggtataaaaatcttacaggacgcatcaaatttgaaatgatgttttcctttttttggactatatttgcataaatttgttattggtatatgttccaaagttatgggaaacttctattattctaatatgacagtgtatgttattaataattatcattgttatgtaaaattttgtgtgccacagaggtaaccaaatttccttatcagttgtggctttaatagtggctatcctaaaactttttattatccatagatagttgtttaatcctctttagaagatggcttataatcaactatagaactagcaggtgttcttaaatgcaggtttctaataactttggaaattgtaacattggaataaaggaaacaacttttagaactctcattaagaggtggagtgttcatgaatggaatgttcagttaacaggagttaactgaattaactgaaccaatagaaaactgaagtaatctttttaactttgattaaaacacttctgatcttttgttttgtttttcagagtcaaggaaacttttcttttgagctagttacagcttttaacagttgaggtactcctatgaacaaaatttggaacatatttatttctctctacctgatttcttcagaatttggaaactagttttgaatgttcttaacttacagcaatatagttatctgcataagggcaataagaatctgttttcttttacaacaggacacaattggagaaactggttattttaccaaggctttgactggaatgatgtgctttcctttaaggaatcaaacttgacttgtagagccagtaaaagccctttggggaactgggctcataccttgcctacaacagtccctgtacatggtttcttttctgtggtaagtaaataatgtcactttctgacaggtccagaagccccaagttatcttgggaccccaagaggagaagaatttactcaactcatagttattggagggtacaaactgatggctgagcttggctttaaaaagtcttatataagattccttctatggaacagaattccatcaaagccaatttaaaaagagccgatgtgaaaaataattattcttactgcactttatacaaataatcaggccaagtataataaagaaatttgtcttaccatgatttgccattagtaaaaatgggaaactggagagagggatattatgtttcaaaaactacagtatacttgttattagattctagtctcattagttgtttttaagtttgtttctgcaatttaggctaaccctgcttattcctgtgaaccaaccagtgatctctgactgctgctcagaagaaacaagagggataggtaatataaaaatctggatcaatattcttattctgggcacattgcaatcagctagcaaccccatatcatcttggtttcaacagttgcccagttcacagaaagccttctaatttagtttactttgaataactttacttattttgtctcactgttgtgaaatgtattgctgttatactctgtgtagaaatacaggacaagcttactgaatgtttccttaaactaaacactccttaatgttccagataccaccttttgttgaaactcaagagttataaagggaccttaccatactgataccttcttactgagctcctctctaccctgaatgcaagagaccctcatagctaggcaggaatattatcacccctattcatcatgaagaagttacagaagatggctcttcatccctctgaaacccttagggctaatggttctcttataaaagggaggggggaaatatcagaggtgtgtgaaccagagcaactccatcttgaataggagctgggtaaaatgaggctgaaacctactgggctgtattcccagatggttaaggcattctaagtcacaggatgagataggaggtcaccacaaaatacgggtcatacataccttgctggtaaaacagattgcagtaaaggagccagccataattcaccaaaaccaaaatagcgacaagagtgacctctggtcctcactgctacactcccaccagtgccatgacagtttacaaatgccatggcaacatcaggaagttaccctatatggtctaaaaaggggaggcatgaataatccaccccttgtttagcatatcatcaagaaataaccataaaaatggacaaccagcagccctcagggctgctctatggagtagccattcttttattcctttacctttttaataaacttgctttcactttgcattgcagactctcccttaatcctttcttgcgcaagatccaagaaccctgtttcaggatctggatcaggacacctttcctgtaacagttttaagctcatggtttattatattaatctctctcaatttgttcatcaggatagaatatttggagaggtgaaacttctgtacttcctcagagcacccctagtcttcctgaattgcattttcctgccttttctttcatttcagcctaagagaatcccttttaaggtgtcctgatcctttacagtagtaacagactgggagggaaagagttctcagaccaagggagcttaaaatctttctacagctgacaggtttgagaacttaattgctttagctgtaagtgggcactcttctgcttttctttttttatcatagtgtaggataattggtcagctaagttaactagtttactagttcttactgtggcccagtttgttatgtggcattttacaaggctggctaaatcatcatctactccatttaagaaattcacatttaataatgtatcattttattgttttcaaagcaatcagctcacatcccacaatattgtcttaaaagttttatcaaaatgtgtgaaataatctaaaactgatttatttgggttctggtggcattgttggatttttttccaatccacaaccctttggaacactgaaggaataacatttaacagagcaatcgctcattcccatgcatctttacacctgtcttctggattttgggggctggttgttgtggctctattggaccttcaggggctaaatcagctatagggtctgaccattgtgcttttttccagccattcgttatctttagcttctgagaccaacatgtgaactagcagataaaggtctgaatgacctgggtcataggttctgataatgagctcaaattcttgggtacacctgattggaactttatgggagtcaggactttttttttttttttgagatggagtcttactctatagcccaagcgggagtgcagtggagcgatctcagctcactgccacctccacctcctgggctcaagcgattctcatgcctcagcctcctgagcagctgggactacaggcacacgccaccaagcccagctaattttttgtattttagtagagataagatttcaccatgttgcccagggtggtctcgaactcccgagctcaggtgatccacccacctcagcctcccaaagtgctgggattacaggcatgaaccaccgcaccctagcaggaattttttaaattatgcttcataattcagtctttgaccaaggttagtagaaaataacctgggttcccctacctgttactttttgttcctgaaatggggcaatcatgagagatggtccttcttttttacatcttccagatgagacactgccattggggctttaagggaactgtcagtgggtgaggccttttttaagtcagattctggactgccttctgttgagcgagtgtgaaagggcacaggtctggtctgggaagttcagagaggacagggtagagtggtgctgtaggtggaggtgagggtggtgcgaagggggaagtaagggattttgagtgttttttgagagacataagattagagagttcctgattagtagttctaagttgcttgttcgcctcctgtagggaggtgaggcagtctttgccccgtttgctactctccaaataccactaaaaataactctcccattctggccgcttagatttgtgcctgaatttttcatcctggttcacaggtacactaatttaggcatctcaaaagatcccaatttaggccattggaatttagaatctgctttagttacagtggcccacttagttaaatgtttgcatgatgatttaccataagcattttgcatatacccagcggagtttccaaaggcagaaccttattttctgcagcacgcggggtcttagaggccttgttccccataatttagagctcctcttcagatttgatcaagtagggacatgtgtcaaacccaaaatgtgctgctttcagacctagcttttcagggccgttaccccctgaaccggttcagtccacctgtgtcgaagctacttggcacaaatgtgtcaggggctcaaggtgcagtagggtttggctcgttatatgcccctgctagatgagattggattctaaatatgttcttctgaaaggggaaacctatttagaacatctgcacgttttagggagcatttctcctagacaccctcacatgattcccagtcatctgagaatgccccaaaaggctgaggggagcaaggtgctgtatttcttcagagtggaagattacaaactcatgagctagagggttcaaagttggtcaaatctgataagggaaaggaccaaaacacacacatacacaacacacacacgcaccaaaaaacaaaaacaaaaacgttaagcataacaacaatcacacaaaatatacagtttctgagtgctctaagtgtaggcaggaaattaacaacagctagttgttaatgctattatgctatttcagtcatttaaaagaatttgcacctgggtgtggtggctcatgcctgtaatcccagcactttgggaggctgaggtgggcagattacgaggtcaagagattgagaccatcctggtcaacatggtgaaaccccgtctctactaaaaatacaaaaattaggccgggtgcagtggcttacgcctgtaatcccagcactttgagaggctgaggcgggcagatcacagggtcgggagtttgagaccagcttgaccaacatggtgaaacccgtctctactaaaaaaaaatacaaaaattatccgggcatggtgttgtgtgcctgtaatcccagctactcgggaggctgaagcaggagaattgcttgaacctgggaggcggaggttgcagttagccgagattgcaccactgcactccaggctgggcaacagagcgagactccgtctcaaaaaaaaaaaaagaaagaaaaattagccaggcgtggtggcatgcacctgtaattccagctactgggggggttgaggcaggagaatcgcttgaacctgggaggcggagattgcagtgagcccggattgccccactgcactcaagcctgggcaatagagtgagactcagtctcaaaaacaagaacaacaacaacaacaaaaaaaaaaaaggaaagagaacgagagaaagaagaatttgcaaggcagaatcccaaaccagtttcttacctacttatggggcccatgctggagaagactctctgccgatgcagaagcaaaagagtctttttaacagcaaataaacctccgacccccagctgaaaaacgcggaaaatcagggatccctggagaaaaggggtcccagacttccgtaaatttcctgtcggttcaggccataaggtgcccaagccggtaccaagcactgaaaggtgaactgccacaagccaggtaagtcactttcagtcaggatccctctgtggttaccagatgtcagtcgaagtaaacaacgaaacacatctcagtcattttaggaaatttatttgccaaagttaaggacacacccaggagacaggtctatgcctttttctgaagatgattttgagggctccaaatttaaaggggaaagggtgggatattgagaagcacacagtttttacataaaagggggcagaagaaaaatgtggggaatctgcattttacataacagacaaaatggggtaggaaaaaaatcagatatgcatttgtgtccggcgggccagggtgactgcacctgtaaagataagctatcaagttgcattgccatggtgaagttttaacatctcaccaggaattttcttgtgtgcaaaatatgggggaggtgtgtagcctttcatcttgtaaccatcttatttaggaaccaaaagggggagacagatttgtgagacccagtttccatgactaagattatctcaggagtacaggataagttgaacactaaaatctatacatgtatataaaataggcacagaaaagagctcggtaaaagccttccagcaaactagaaataaaagatgtgattttatattgtaaatatacaaggtatctaaaataaactacagcaaatatacataataaactattaaaagcttgttttttaatgtcataaacatgataatgatgctgctgtaaacatttttgttaactattgcatctgtggttccagtcaacagattaaaatgagaaatgagttatacaattatacttgcaaagaagaattagtcaataaactagtacctaaacaattggttctacctaggtagactggatacctgaaaagcaactcacacaaaaaacttgttcacatagattaaggaattaaaacttttaggagaaaatacaggaaaatattataactggggtaaaaattttctaaacatggcacaagataaaaataatgcataaaaatatttataaattagactatcaattttaaacttgattattaataatgtataaaaacatgttttactacagataatgcaaaggcaaagcaaaattgggagaaaatatttttaaaagacatactacaaaagattgatatttaaaaatatatatattacagaccggcgctgtggcttacacctgtaatcccagcactttgggaggctgaggcgagtggatcacctgaaatcaggagttcaagaccagctggccaacgtgttgaaaccccatctctactaaaaatacaaaaaaattagccaggtgtggtggtgcgtgtctgtaatcccagctacttgggaggctgaggcagaagaatcacttgaacccaggaggctgaggttgcagtgagccaagatcacaccattgcactccagcctgggcaacaggagagaaacttcatctcaaaaaaaaaaaaagttttttatatatatttttatatatatatatataactattatttattagactattatgaataagaaaaagacattaaatataggagagatggcaagtcttagatcttattagatcaataaacatgaaaaattccaacttcattagtaactatgaaaatgctaattaaaactataaatgatacacttttctaattcaccattttgtcaaaaattatgtctagtaattctaagttggtaaaaatatggagtaattggaattcacaaatatccactggcaataagattgatttataaattgatgtatatttacactatgcagcagtgaaaatggacaactacagctatgctaagcaacatgaaataataaaaaaattataaataaaaaagcaagtcccaaatataaaatggtaaaatgtatataaacgcaaaaaacaggcaacactaaaatgtatatggtttatagataaaaatgcataaattaaagaataacacaaaattcacatggtggttactttgggtaggaggttaataagagacttcagaggtatccacttctcaggagtgtgtgagagtttcatgaagccagcctgaaagttttatgagagtagagaccaatactttcttttcttcattttatttcctaagcctagcaaaaagtatggcacattgtgtatgctcaacacacatttattggttaaatgaataaatgcatgccctttgtaaactgtcaaggtatgcaaattgagactttattattagttactatagcttagttaatagaatcaaataaaaggtaataaactgtagcattcagaaagcactattaaaagtttaatgttaacccagcactgttgggtaaaataaattaaaatttttctgtaatcctagcactttgggaggccaagctgggcggatcacttgaggccaggaatttgagaccagcctgaacaacattgcaaaaccccatctctactaaaaatacaaaaattagccaggcgtggtggcgcatgcctgtaatcccagctactcaggaggctgaagcctgagaattgcttgaacccgggagtcggaggttgcagtgagctgagatcgcgacactgtacaccaggctgggcgacagtgtgagactccgtctccaaattaaaaaaacaaaaaaagtttttaaagttgtgaccattatgattacatgtaaattgccacatgaagatggaacatgaaatctgacttcaggtgagcataatttgaaaggaaaaggcaaaacaagagaaaagagttaaaaaggacgaaaacttaattgggtcagatctgcaggttctaccctgtgctgctttttaggaaagttgtctcctctcctggcacagaggaaggctggctgggggagcctgggcccctctgtcctccccgcggtgacagtggctgatgtttgctcaggcatgaggcgcgccgcaatgccctgggcctgaggctgacgggccccgcccctcctccttcccctggactcttccacgatgtctctgtgcccctgtgccttcctgtgcgtccctctaatgaaagggggcagtggcagcatgaagctggtggcaggaactggctccgcaggctgaggagggctcgcccagctgtgggaaatgctccacttgacatcggctttctgtgcaccgatctgggcctcgacccagggttagagccgtggcgtccctggcctgggcgaccccgggggctggcactccggctgctgctgcggttgccgctgtgcttggctgggccgcggctgggactagcgcccactagacgtgcaggagccaccccgcaggagggaggaggtggtatccatgttccctgaaaaacaggctctgctgacaaatctcagacgccaggaacagaagaaccgaaagaaactgcaagagtttgagccaaaaggatggactgttggagtagctgagggtgaagctgccggaactcctcaaagtggaacagcaaagccagcaccagagatggacaagaaaaacaaactatcaacgaaaattcgcagaaatcaaagttagatgctaaagcagcgaaaaaccgttcacgccacgatagaaacagagttgatgatggagtctgagaaacgaatcttagggagagaaaggacagcagtgaacatggtcaggtgctgaggattctggtccactggaccccaccatccctaggatagtaaataccatcccagtcatcacccagcaagttaccaccacagcatttcctgtgtgtttcaaaaaaataaataaaggtgattcttaacataagtgcaaataaaaagtcattcatcataatctaaactgtcatagtttagtttacattttaacgttctttatcgtgctaaaacctttggttttttaaatttaatttaatttgggatggagttgttgccctactgccctggctggactgcagtgacgcgatctcggctcactgcaacctcgcctctcgggttcaagcgattctcctgcctcagccttccgagtaggtgggattactggtgcctgccaccactcccagctaatttttgtacttttagtagacacagggtttcatcatgttggccaggctggtctcaaactactgacctcaagtgatccgcctgcctcggccttccaaagtgttgggcttacaggcatgagccaccatggccagacaaacattgttttttaaagtggcagccacaatttttgtctgtctggatatattttggacttttgtatattaaatataacgtaaaatagaaactttattatgttttaggtaatctaacattgatgtacacaaacaaactttacagattactgtaggattcagtaaacgatgtatacgacatttatgtctctagtttttgatgtattaattttattttagaaaagattggcttctttaaaaatgtctccaaaaatgtaggcttattttataaaatgccaaaatagtcaaaaaatgtaaaataccattttgcattttacaaaaagtaaaatactattttgccgttttatacaataagcctgaatttgccatactgtatgaatactggtactcaattaaaacaccaaatattttaatcaaaattatttaaactatgtttatataatatctcaatttttaactacagcgatagacataaacaaatatttcataaatcaaacctattagtattaggtttatttagaagtaatatataaaaaagatctgttcaaaatgaatatttttcataataatttggtgttttcaaatatgccgaagtcttattttgatcagagtaagcctggggatagttgacttatttcattttttttggatagtgtgttccaaattttctagtttaacttaatatcgactgatgatgggtaaacatttttttaaatattataggcctattatattgtcaatgtttttaatttaaaaattctgtcttttaatattgtttcagggatttaggtctagttgaatccgcacaacctgttaatcattgtcacctgccagattacaattcactgtcagtgtgcctgtatgactcttctttccatattctttgaatttgtattacttatttgaaagttatataatacagctcatacatttcaaatcaaatcaccaggtaaaatgaattcgggcttagtgtaaaggagctgttagaatcttagtgttacatatatagatggatgtggctcaacgatttaaacaaaaatattgaactataacatgtgttgccatgagtcagcctctaatgagtttatagataaatccagatttcaccacatttatccagtgtgttcaatacctctaaaggtggtatatcaacaattcttatgctactgtctgagaaaacagattctgctgttacctaagaaatcagctgggaggcatttttataatcttgcaccacataaggaaaaactgaaaggtagtactaataaatgcaaactacatcacctggaaaatgggaatccagaatgtcactttaaatatttaagtgttgtaactttgggtaaaaaataaatatgataaaataaatcttttggtaagctttgtgtagcttaacatcagcataaagtagaaaaaaaatcttaaaaacaatagcctacactaaaaaacaaaacaaaactaacatccaattcatatatattgatctttgcattgggagagtctaaagcagaacatttgatggacttgatacagttatttttaccatatgggcatactgataaaatcatctatatttaatttgaataaaacatgttggcagggcacggtggctcacgcctataatatcagcactttgggagaccgaggtgggcggatcacctgaggtcaggagttcaagaacagcctggctaacatggtgaaaacctgtctctactaaaaaaaaaaaaaatacaaaaattagccaggcatggtggtgcgcgcctgtaatcccagctagtctactcgggagactgaggcaggagaatcgctggaacccaggaggcaaaggctgcagtgagccgagatcatgccaatgcactccagcgtgggcgacagagcaagactccgcctcaaaaaaacaaaaacaacatgtctgcatcttaaaaattctactttgtactatgagtaataaatgtcaagtctttatcctcaagaggatcctgattctcaacccaacatatatagcaacccattccctggtttctccaaactgaggcctcattaaggctcaaatatggagtgagagaaacacaacaacagagcacgtgaaataaggatgaggtaggatggtcagctctaaggctcaggaattgcctggggcatcccagtataatgatgccaactgtgaagtttactatgtaaaaataaacataaaatgaacattggtgaaagtctctggaattataaacagttgtgccaaaaggactgagccagaatgacctgtatttaagaagtaaggcaaatgtttactagcacataaatatttgttccaaagtttattacagtagcaatattcttttcagtaatgtcagctttctcaagctaaggatgccacagacaaactaagtgcctaatatattgtaggcaattagtttctaaattcaacaaacttgcaataattttataaatttcactgaactctgttgcatgtatatatctcactgaaaggcactatccggtagctgtgtccttcacttttttctgggattttctgttgctggattccaaaccaactttatttgaatcctagtaatttctaaaattccagatttaataacagaaagaaagcagaaattaagcccagaaattaggttaccccaaacagtccatatcaaatatatttgattccccaaaagaaacaaatattacacaaagtaaacaacagtgggtttaaaattcaacctaaattcaaaggtagcagttaacaccatatgcaaaaattagcaaagtcacaatgtagaaactcttagtctgttattccagaaaaaataataacatttttattttggcattttttggaaagaataaatacattaaatataacaaaatacacccactaaactataataaaggatctttgaaatataaatgattttgttcttatttttaaatatttactgtactatattcagacaaggctttcagtgaaaaatacttacagctaccatgtatgaattaaaacagccctgggggaaatagtattttttattaataatgaagattgaagctccaagtgatagagcaggagcaccatcaactcagacaaacactgccactttaagttctagctccctttctagcctcatgcatttcaaggaaatcacttctcttctaattacaagcatccagaaagagcagacagtaaaatacaggtaagacagctcaggtgggcacggtggctgacgcctgtaatcccaacattttgggaggccgaagcgggcagatcacgaggtcaggagttcgagaccagcctggccatcatagcgaaaccccatctctaccaaaaacacaaaaaattaaccgggtgtggtgtgcgcgcctgctcgggaggctgaggcaggggaattgcttgaaccaaggaggtggaggttgcagtgagcggagaccacgccattgcactccggcctgggtgacacagcgagactccgtctcaaaaaaacaaaacaaacaaaaaacagccagctcgggcacagagggaggtggaaggaaagtctcttgagtaactgccaatcttcaccctcatacaatgggccccagtaaaacagtgggccttaataggcacattcttttcccttcgggtgcactaagattgggaagctaaaagcagactggggggctgtgcctgcagctgcagaaagatgtatgggaacagacacacaactctccctcccagataagcacaacgaagagacacagaagcagtccaagcctccgataaactctcccaccctgaatccttaaaaatttttagtctgtaaaagagtgtggctctgacctaactcggccagctgcccccctaggtttattcaaaataaacctgtccctgttgactgtcaagccacccttcgtgtttctcttctctttaattcttataccaaggatgtaaaataatttcccctgggaacacagctaatgacccaaatgaagctcaaatgaaggcatttaacattcataatttatattttaaaagtaaaatactcctggatataaaaaaaggaaaaaagatataaaaacaaatgagagaaaaggaaggaaatggattactcacaatatctaaggtatggaagcaacctaagtgtccatcaacaggttaataaataaagaaaatgtgatatatttgcacaatggaatgctactcagccctatggggaaaaaaaaggaactcttgttatttgcaacaacattgatgaacctggaggacatgatgctaaataagacggcacagaaaaaaactttcataatatcatttctatgtagagtataaaaaggtttaaactcatagaagcatagggtagaatgatgattgtctggggctgggagtggaggagatgttggtcagaagtaatggggctgattttgtgaagagacgaagactgagcggttgtggccacgttgccgacctcgagcagcagttggcttctccacgtagaacctgggagtaggagactcagaatcgaatctcttctccctccttcctcctgtttttggctttgtgggaaccttatcaaacacaatggccagcaatgttaccaacagaacagatcctcgctccatgaactcccatgtgttcactggaaatctcaacactcttgtggtcaagaagtgtgatgtggaggcaatcttttcgatgtgcagcaaaattgtgggttgctcagttcataagggctttgcctttgttcaacaggtgaatgagagaaatgccccggctgctgtagaagagagaagggcagaataattgctggccaggttttagatattaacctggctgcagagccaaaagtgaacggaggaaaagcaggtgtgaaatgatctgcagcgatgtatgggtcagtaacagaacacccttctccatcgcctctattcagctcctctcttgacttggactatgactttcaacgggattattgtgaaaggatgtacagttgcccagcacattttcctcctcctcctcctattgcttaggctgtagtgccctcgaaacgtcagcatgtttcagaaaacacctcatgaaggggcaaaagtggcttcaattctaagagtggacagcagggatcttccaagtctggaaagttgaaaggagatgacctttaggccattaagaaggaactgacccagataaaacaaaaggtggattcacccctggaaaacctggaaaaatttaaaaggaacagagcaaacaagcagtagagatgaagaacggtaagtgagaagaggaacagagcaggagctcagtgaagaaaaatgagattaatgtgaagtctgaggggggcgcagatgactctgctgaggagggggatctactggatgatgatgataatgaaggtgggggatggccagctggagttgaccaaggatgaaaaagaggctgaggaaggagaggatgacagagacagcgccaatggcaaaaatgactcttaagcacatagtgggggttagaaatcttatcccaatatttgtttacctaggtgcttctctaagatcaaattttttaccagatcttcttctctagtatcttcagcacatgctcattgtccttgtctttcccatgttaattcatattgccctgcacctaggtcccatttcacctcctttgacactcctagtagttttgttaagtcttaccctgtagtttttgcttttaattttgaaacctctttatgacttaacaataaaaaggacgtatttcttttttttttttttttttttttcctgagatggagtcttgctctgttgcccaggctggagtgcagtggtgcaatcttgcttcactgcaacctccacttcctggattaagtaattctcctgcctcagcctccggagtagctaggattgcaggcgcgtgctaccaagcccgggtaattttatttatttttgtattttaagtagagacggtgtttcaccatgttggccaggctggtcttgaacttctgacctcgtgatccacccgcctcggcctctcaaagtgcttggattacaggcatgagccaccttgcccggccggatttacggtttttatcaactgtctccaaaattatctcattatgcagaaagtagtttttttcattcatacagtttcagtagtcgcctccctaactgcaaaagcaatctcatttagttgcatagctcctaaaagcagctgagttagaagtatgtgtgttacacccccacataggtgtgatttgtggggcagttcaacacaaatataacaatgtatttttgtgaatgagttgccatgttaaatgcatcctctagaaaaatagtgttatagtgttacgatttgctttttaaggttgatactgtgggttattttgttaacagcctgatgtttgggacctatttttctcaaaataaacaagtctttattaaaccagaaatttgggggaaaaaaacagtgtcttccctacatttcctaccttaacacgtaagttattctcctctcagttttgattcaccagaggattgaatcatatatcctgaagaatcaaaaccgaataatatatctgttaaggcaatgcaggttgtacactaaaatttcacatgcttagaataatatattttttgctcacatccccatcgtctgtgaactttttttttttgagatggagtctcgctctgtctcccaggctggagtgcagtggcactaggtctagttgaatctgctcaacctgttaatcagtgtcaggtgccagattccaattcactatcagtgtgcctgtatgactcttctttccatagtcattgaattaaattattacttatttgaatgttatataatacagctcatacatttcaaatgaaaccaccaggtaaaatgagttgtggcttagtataaagaagctgttagcaacttagtattatatatagatggatgcggctcaacaagaatttagacaaaaataatgaactataatgtgttgccatgacttagtctctaatgagcttataaataaatccatatttcagcacacatatagttttgttcagtacctctaaaggtggtaaatcaagaattcttatgctacagagaaaacagattctgctattacctaagaaatcaactggaaggcttttttttttttttttttttttttgaggagtttcacctgtcatccaggctggagtgcaacagcacgatttcggctcactgtaacctctgcctcctgggttcaagcgattctcctgcctcagcctcctgagtagctgagattataggcacacgctaccacacccagctaatttttgtatttttaggagagatggggtttcaccatgttggtcaggctggtctcgaactcctgacctcaggcgatccgcccaccttgcctcgcaaagtgctgggattacaggcgtgagccactgcacctggccatctgtgagtcttttgtctgcttaagaagacttaatctttcagggattgtatcttctttcattttctatctgcatcctcctttttctttagccaatggatgaaaacaagatgcagagaagacatatttgcgtcttatccacacatcacttccactcactactagtcaatgtgggtagagctgagaatagcagtttcctggcaggacagccacttcctagcaataaaaacacactaaaaaaatcataaatcttctttaaaaagctaacatattttaaacaaaataagtatatgcatcaataataaagtgcttgtggtaaaatattacttttatttctattgagctcgggtaatatttggccaaaagatagcaaatatacagcagaaaaatattattttaaataagaatattgtgaagttattctgtcaatagaatactattatgacctcatactaatagtctcatctatagttatgcaataccaaatgctttttattaaaagttgcattttaaataattattccatttatattaccctctttcactatttcaatgccttcttccgtttatatcagtggaaaacaggctagctggtgccaggaaagaacgtgctgctatcgctgtttaacgatgatgatgaagagcacttgtttgggtggtattcacgtgccaaacactgttatttggcttaaagtactggttttctatttttccctaaatttattgataatatacaattttttagctaagaagattttatctcattcatatgttttatggaatttggtttacgtttaactgtttctgatttatctggaatgtgaaaattttccatgaatccaaattactataaacaatcttttactaaaagcctttgtgaggcagagtaggattcatactttttataatatggaagaaatgtattaaccatgttcacagtaatgactctgaatacagcattctcagtgcccagtattcaccctgagtcactcagaaaaaactggtatctctgcaaagacacagaaaaaggtgccaagaggaagtgcaccacattgcacataaatgctttccacatgcacctattagggtcttaatttaatcggctgttatttgcatgtccagatgcttcctgaatctagtcatacaagtttttggcagctaatggcatcttttacccattagttttatatgatgatttgtgtggctgggaaataaattttttgtcaatttactctaaattgagagactagatttgcaatcttcaatctttcagtgttaaggcaaatcagataagagcaatgtgttatgtagcatgcatttttctgcctatcaaaattcttgtattgccttggaaacccgagggagccatctaaataatactccctttgaaaatcctttagccagaattttagattttaaaaggtcaagaacataatgatcgagcaaagccaaaatcatgtctttgctccgtgttagtaatcaggccatttcaaaaagcatggcaattatgccaagccattgaaaaaatgtggttttgattaattttattctacttcaaatgtttcatctaattgttacttttatcatgttaaactaagaaaaactacatatataactccatgcattctagacataatcatactgtttaaagctcaatattgtattacagtatagtaaaaccctctgtaattagatgtcaattattaataaatttattatgtcttcaaggtatttcaattgtaaaaactatttaaataattaggtatgctttttcataataagttcaattctaggagggtacacactagtctccatggtatttttgtaatgagtagtgtaaaactgggctaccagaatggtgcagacatgctgatttaattatagtaagaatgagatcccttgttggtaggctattgatgttccagaggctgatcattcactacggctttctaaatgtcattccatagtgccagtgagccctttcatccaggttgtttcttcctcccattgacgtaatcagtgttgtctcctctgtttatcttaggctatctcagatgagaggtgattttttttctttttgcataaattagactcctttttttttttcctctgccatgagatccttctgtcctctctactggaagcaccatgtgggaggcaggaatgatgacaatatacaaatatatttcctgccacgtggccaccataagcagcttacagcatggcccacctagaaatcacttacttccaggccagctgaagtgtttttgtgtccctttctcttaaaagcacctctgattcagtttagcccaatcaggataatctcccttttgatggccacaaaggcaacacattagtgacctaattttatgagtaatttcacaccacagttacagtttttttacactcaagaggaaaggattacacagcaggtgtgaaacaggcttggaatcttgaggatcatgttagaattttgcccacccacctgaatagacttttaaaatagtcttttagattttttttttttttttttttgagacggagtcttgctgtgttgcccaggcttgagtgcaggggcgccggcgccatctcggctactgcaagctccgcctcccgggttcacgccattctcctgcctcgacctccccagtagctgggactacaggtgcccagctatttttcgtatttttagtagagacggggtttcaccgtgttagccaggatggtctcgatctcctgaccttgtgatccacctgcctcggcctcccaaagtgctgggattacaggcgtgagccaccacacccagcctagtcttttagtttcttttgttatctaagtaaacaaagataatacctgcaaataataattaattactttccaattttattcacaacaaatattaactaattttttttctggcttaaattatttctctttaatataccattttatacattcatgcacagatataacaatgcaaa

SEQ ID NO: 8150 - DNA, 461 bp, Homo sapiens
aatatcagaggtgtgtgaaccagagcaactccatcttgaataggagctgggtaaaatgaggctgaaacctactgggctgtattcccagatggttaaggcattctaagtcacaggatgagataggaggtcaccacaaaatacgggtcatacataccttgctggtaaaacagattgcagtaaaggagccagccataattcaccaaaaccaaaatagcgacaagagtgacctctggtcctcactgctacactcccaccagtgccatgacagtttacaaatgccatggcaacatcaggaagttaccctatatggtctaaaaaggggaggcatgaataatccaccccttgtttagcatatcatcaagaaataaccataaaaatggacaaccagcagccctcagctggcgtatggagtagccattcttttattcctttacctttttaataaacttgctttcactttg

SEQ ID NO: 8151 - DNA, 98 bp, Homo sapiens
tagtagagatgaggtttcatcatgttggccaggctggtctcgaactcctgacctcaggtgatccacacacctcggcctcccaaagtgctgggattaca

SEQ ID NO: 8152 - DNA, 377 bp, Homo sapiens
atacatatgttattcaactcaattattctatttttttttttgagacggagtttcgctcttgtcacccaggctggagtgcaatggctcaccgcaacctctgtctcccgggttcacgtgattctcctgcctcagcctcccgagtagctgggattacaggtgtgagccatccatattatataggtatattaaaatatcacattgtaccccataaatgtatacaactctgatttgccatttaaaaatactattaatacttttcttagaaaaaagagagaaataaactttaagaattgggccagagaaaaaagtgtttttttcatcttaaaattccaggaaacacacacacacacacacacacacacacacacacacacaca

SEQ ID NO: 8153 - DNA, 3801 bp, Homo sapiens
ttctttttttttttttttttttttttttgagacggagtctcactctgtcgcccaggctggagtgcagtggcacaatcttggctcactgcaagctctgcctcctgggttcacgccattctcctgcctcagcctcctgagtagctgggactacaggcccgcacaaccatgcctggctcatttttttgtatttttttagtagagacggggtttcaccgtgttagcaaggatggtctcgatctcctgacctcgtgatccgcccacctcggcctcccaaagtgctgggattacaggcgtgagccaccgcgcctggccggaatgtaacttcttaaagtaaatgttatcattgttgatattgtattgaagttttctctgtgatataccatatcctatgggctgaaatttccagcatcccttggggagtggaggccatcagggcagacctgctatggacctgaaagattccgccccaggtcagccctccactccccacctccccacaatttgagaatgagagggaacaggagtcaggagccggagtgttggccccagtagactccaatcaatgttggacatgattctgattggctaaacactgtgtagatgtttttaaacaaagtccatttaaggttactgcactaatcaaggagtactggattataaaaacatctataaatctgagtttgagtattttttaaaacaaaattgttaaaccagatgtgttgcttttttttcttgtcatctctaagtatagtcctcagttaaatatactaataagcaaaatgcaccaaaacttttggctaatagttgtgctttaacttaatatttgttatttcatagagactgctatgaaaagctttttattctgaatcactgtacagttattctttgatcctgtcagtcaaatctcatttttagggtcttgactaggttttatgaaagcccagtaaggcagtttgcccataaggcagtcatcagtcctgtttcctgatgccacatgacagaaggggtccatgtagaatttcgtttcttcctggaagtcccaaggaaacctgcaagtattatgataactaggaaggaaacctgcaagtattatgatgaactgggaaggaaacctgtaagtattatgatgaactagatagaactacatgtctctcatgatgaaatgcatctccctctgtttaacaggatatggggagttttaggacagggaagaaagtgctcaattagaaagaagcaaagacaattactctagagtggagctggccttccagtcctcaagactggggagcagcagttggggctcattagtgaagagtttcatttttttcattttctgaacagtgctctccatgttactgaagtcttctttgtgggttgctggaccaggaatattaaccattgcctcttggccctccttgttctcaggattccagctttccctcctggccagaaatgttcagcctggactcattcagaaaaggtaagactgcaactgtgcttgtgacctcatgcccttccttattgggatgggcagctctgagggctgtgaaagtctctccccagtatgtagttcttgcacatttctttgggtggttttccaaaggcctttcctatagccttccttttgcatggtgcttagaatctgtgccaacccttgccatggcctttgccatgcttcctcccagtgcccccttctgcgtactccctgcttattaaaatccttttttttttttctgagatggagcctcacttctgtcgcccaggctggagtgcagtggcacgatctcggctcagtgcaatctcctcctcctgggttgaagcaattctcctgcctcagcctccgtagtagctgggattacaggaaccagctgccaagctcggctaattcttttttttttttttagttgagacggggtttcaccatgttggccaggctggtctcaaactgttgacctcaagtgatccacccacctcggcctcccaaagtgctgggattacaggtgtgagccaccgtggctggcctctaaaatcctatttttctaggctagtattttataccatctccttcatgaacctttcctaattctgttgaccaaatgcaatctttctccaatcttcctcggtaccatacctgttcgttctcatggttagtctattctgaattaatcattttgtcactagattggaagctccctgtagccagggcctgttgtgtgcttttacgatgcatagcacctggccagcatttcgcacatagtaggcctcagtaaacactggtggaagttggattgagtctgtattaggctgttcttgcattggtataaaaaaatacctgagactgggtaatttataagaaaagaggtttaattggctcacatttctgcagggtgtataggaaacatggtgctggcatctgtttggcttctggggaggactcagggagctttcactcaggggcagaaggtgaagcgggagcaggcgtgtcacgtggcaaaaatcaggatccagagagagagagttggggaggtgccacacaatttaaacaagattggctgggcatgatggctcacgcctgtaatcccagcactttgggaggccaaggggacggattgcctagctcaggagttccagaccagcctggacaacacagtgaaaccccatctctactaaaatacaaaaaattatccaggcgtggcagtctgcgcctatagtcccagctacttgggaggctgaggcaggacagtcccttgaacccgggaggcagaggttgcagtcagctgagattgcgccactgcactccagcctgggtgacaagagtgagactctggctcaaaaaaaaaaaaaaattactttgtcttaagcctatatttggtaatgatttcatttttcaaatttaatatctgttgagaaattgaccttatttatatagatgttttattgttatggccagctcagtatatatttctgagtagcgtggatctctaattttaagtggtgtcaatatagttgaactgttgagaaaattcagattacctatgttgtcaggtggcacattgctgaatattggtgatagatttgaataagcactgttcctgtccacaaggaattcatattccacattaaatatatgaatcagtcatgtcactattatgctgaagtgcaatagtgattacatgcatggtttgaggagaacattttagaccaatctggggatttagggaaggctttctgtaggagaagtaagtctcattctactgtagtagatacccacctattacattagtctatttatttatttatttatttatttttgagatggagtttcgttctgtcgccaagctggagtgccctggcgcgatcccggctcactgcatcctctgcctctcgggttcaagtgattctcctgcctgagcctcccaagtagctgggactacaggcgtgcaccaccacacccagctaatttttgtatttttagtagagacatggtttcaccatgttggccaggatggtcttggatctcttgaccttgtgatccgtccaccttggcctcccaaagtgttaggattattggcgtgagccaccgcgcccagcctacattagtctattttaagatgtcagcactacagaattataatgactcgtgcattttcttttttttttttttgagatggactcttgctctgtcacccaggctggagtgcagtggcgcaatctcggctcactgcaacctccgcctcccgggttcaagcaattctcctgcctcagcctcccaagtagctgggactacaggcgcgtgccacc

SEQ ID NO: 8154 - DNA, 453 bp, Homo sapiens
gatgccacatgacagaaggggtccatgtagaatttcgtttcttcctggaagtcccaaggaaacctgcaagtattatgataactaggaaggaaacctgcaagtattatgatgaactgggaaggaaacctgtaagtattatgatgaactagatagaactacatgtctctcatgatgaaatgcatctccctctgtttaacaggatatggggagttttaggacagggaagaaagtgctcaattagaaagaagcaaagacaattactctagagtggagctggccttccagtcctcaagactggggagcagcagttggggctcattagtgaagagtttcatttttttcattttctgaacagtgctctccatgttactgaagtcttctttgtgggttgctggaccaggaatattaaccattgcctcttggccctccttgttctcaggattccagctttcc

SEQ ID NO: 8155 - DNA, 241 bp, Homo sapiens
tttttttttttttttttgagatggagccttgctctgtcacccaggctgaagtgcagtggcatgatcttggcttactgcaacctccgcctcctgggttcaagcgattctcctgcctcagcctcccgagtagctgggattacaggcgcgcgacactatgcccggctaatttttgtatttttagtagagatggggtttcaccatgttggccaggctggtctcgaactcctgacctcaggtgatc

SEQ ID NO: 8156 - DNA, 128 bp, Homo sapiens
atggagtctcgctctgttgcccaggctggagtgcagaggtgtgatcttggctcactgcaacctccgcttctcgggttcaagcgattctcctgcctcagtcccctgagtagctgggattacaggcatgc

SEQ ID NO: 8157 - DNA, 453 bp, Homo sapiens
ggaagaaatagactatactttttaaagatagaaagcatggcatgccctccaaaattaacctagtggaacatggtgtgtaaagtctcccaaacccatcaattttagccttactttatagtaataaacactttttattgccaaagtaaattaggacaatgatctgggtaaaataatgctcttgagctggataagaaagactttgattttcttgccaaatttaaagcaatgaccttcgttctaagtgtgaaagcagcatatcattgttgtataaagacatgagtgaaccccactgaaactcttccaccgtgaggttctgtcataccagctcaaatagtgagtaatcaggaatggttcaatacattaaacattcttttggcatggtgatccttttgtcaggtcagaatcattatgactagaactgaaaattgagtgccagtcatggcaggatattta

SEQ ID NO: 8158 - DNA, 453 bp, Homo sapiens; identical to SEQ ID NO: 8157

SEQ ID NO: 8159 - DNA, 453 bp, Homo sapiens; identical to SEQ ID NO: 8157

SEQ ID NO: 8160 - DNA, 349 bp, Homo sapiens
gatttcttcaacccatgtatctttttacattgccactatgtctattttcaagagggatggttcagactcaggcttaaaggattaaaaaactctctccagcacttacagtgaggctgtagacaagttcctgagcctttcggggcctcaagtcctttgtaagctagggtaataattgtacctgcctcataaaagattaaatgggaaaatactcagtaaatgttgctttcttttatttttctctgtgatgattgtttcaaactccattaccgtttctagatctttcatttccttaaggttttcagtagtcagcccaaccttttaacattcctctttgtggaaatcatagcag

SEQ ID NO: 8161 - DNA, 349 bp, Homo sapiens
gatttcttcaacccatgtatctttttacattgccactatgtctattttcaagagggatggttcagactcaggcttaaaggattaaaaaactctctccagcacttacagtgaggctgtagacaagttcctgagcctttcggggcctcaagtcctttgtaagctagggtaataattgtacctgcctcataaaagattaaatgggaaaatactcagtaaatgttgctttcttttatttttctctgtgatgattgtttcaaactccattaccgtttctagatctttcatttccttaaggttttcagtagtcagcccaaacttttaacattcctctttgtggaaatcatagcag

SEQ ID NO: 8162 - DNA, 349 bp, Homo sapiens; identical to SEQ ID NO: 8161

SEQ ID NO: 8163 - DNA, 524 bp, Homo sapiens
taggtacctggacctttgagaacgtgacactagcaaggtggtgaccacagagaataggtacaaaggtcttgaagcttgcttagagctttgttccgtggtggcacacaaatcttggcttgctgtaccatcattggcaaacctcatcatatcacagttgggtgtgtttgtatgtgtgtgagcactagtgtgtgtgtgtacatattcgtgtgtatgcacactttgtgtacctgtgtacatgtgattgtagatgtacctgttgtgtgtaaactctgttaaaatgaaatttgcttcgcatttaatgtgcaactttgaagtagtgtaatatttatctaaaggttttcactacttggttttaatgtctttgaacgtgtacttctatcttcaagcaagcttatagtacgtgttgctaaactaacttttccaaagaaccgagttgacttctatttttccttgcctaccaaccaaagggatggtgggctcttttttccctcttgtaaattgtgctgaggagaggacgtggctat

SEQ ID NO: 8164 - DNA, 133 bp, Homo sapiens
ttttttgttttttttgagacggagtttcactcttgttgcctaggctggagtgcaatggtgcgatctcggctcaccgcaacctccgcctcccaggttcaagcgattctcctgcctcagcctctcaagtagctgg

SEQ ID NO: 8165 - DNA, 418 bp, Homo sapiens
atttgttcacatacaacactgtgatgttctgcctgaaaatcgattgagtatttccaaacctattatttttcatttattgtgaaacctacatttacctcctaaaagaaacaaagctcttcaaaagtctcttcccaaggcccctccctgcttctctgggcctctccccactttcaacctctattctactttttcttattctttctccattttccccaatgcacactcttcctcttatgcccatggctactataaagagatcaatttcccatattcaagaaattagtgtttacttatcaatcaatattctgacaaaaacttaagccaaaaagaacctcttataaggccttgtttccttctggatattgagccaatataagatgtaccaaattaaaaaaaaaaatcagagcaagctcccccc

SEQ ID NO: 8166 - DNA, 9858 bp, Homo sapiens
  SITE (4954): n equals a,t,g, or c
gccaaatgacgtcacaactaaaaatcgatttcttaaaaaaaaaaacacctgacattttactccacaagagatcatcctgctgcctgatgaatacaagaacacttaacacaacccctttgcttttattataagcggtttgaactggtgttccttctcctaagtcgtaacgcaccagttgtcggggtaatccagacaataatagaagtgaatacaaaacaaacgaacaaaatgacgcttattgccagggaacccgcgcaaaagcgccagacaaaaccctacccagcctctctcgcgagtcccagaagacaaagccgggtcccagcaagcactgcggccaggactacacatcccagcatgcaaggcgcacacttctcccagcgggactacgattcccaacatgctctccggacagctggccggcctccccaccatcccggtgtctggggtctctgcaaaaatggggtctgtctccgcccgcccagcctccctttagcgttaaggatcggacaccacctcccggtagtaaattgtgactattccgagttttggagtcattcttcgttgcctgttttattagggcagcaaaacgcctgtggctagggcgggagtgggcggaggcaggtttgagccaatggcacgggagcggccctgtcgctgccatggcaacggcggccgttctccggggaccggctgcccattgggtagaatctttccagaaggctcgagaagaaggaagcggaagtggcacgtggaggggccggtggagcgccggtgagtaaatgccgcagattctggaagttctgatcagtgcgatacataaggctgaggaagtgggacctccccttttgggtcggtagttcagcgccggcgccggtgtgcgagccgcggcagagtgaggcaggcaacccgaggtgcggagcgacctgcggaggctgagccccgctttctcccagggtttcttatcagccagccgccgctgtccccgggggagtaggaggctcctgacaggccgcggctgtctgtgtgtccttctgagtgtcagaggaacggccagaccccgcgggccggagcagaacgcggccagggcagaaagcggcggcaggagaagcaggcagggggccggaggacgcagaccgagacccgaggcggaggcggaccgcgagccggccatgtcggtggtggggttggacgtgggctcgcagagctgctacatcgcggtagcccgggccgggggcatcgagaccatcgccaatgagttcagcgaccggtgcaccccgtaagtgggagtctgcgagggtggatgggaggaggttctgggcccttagtgtggggacccaagatcgcgggctggctgtacggatcaccgcggcaaacggaggcgtttgggcagcggcgcacccctccgtggaactagggaccagcgacccggccagaggagggatggggggcttgccatcacaaattggagaagggattgtctcagggattcacgggggtgagaggagtcccagagtcgagactctaagggtcgtcaccttgtgcgggcttcctattgggggttttcaaaacctactgggggtcgggctgcggcaaagcccgcaacttcgctcccttttcttggcaggctgcagcctgcgccttccgcggccgcccccgtatccccacccggcctctctgagctggctgagccgcctccagcttgtcctcctcccttcgcgcatatctttgcgcaccgcggagcggggctgccggcctttttcttccgcattgtgaatctcgaaatgaactggaagcttccagagcttgtgtcgctgcttgtccagtgagcaggcggattgttgttagcgaccacggaagcagtcctatgaaagattagcccacctctttttacccagtctcttcgttgctaacattgttggccttaatgcccgggatcattgtcgaaagatgtaaacgtctttttttttgctctttgccattcatgaggaattgtaaaccgtatttttaaaattaattttgcacagtttatttaaaagagaataaaaattgcatacttttgtgctaggacgccaaaagaggatggatgtcgtcactgaactaaatattctataggagcatagggtgggcaaagggcaacattttaaaaagcaagtttcgtgaagggatattttcggacgagaatatatacaaacatatctgcatgtgcattgatgaaaacaaatgatttcatctcaaggaaaatactgtacctattaatttttttcaaatgtcccaagctcaggatgaaaagtgcaaaatgaaaacattgaacctaaaggtagaatgaatgactggggtaatacaattatttgggtgctgagaacgtttatgaaagttgagtggaaaatctgaggcaaaatatttggcaatgttagtaacgttaggaagactgttctgagcaacctgtacgtctacccctgcagatctaagtttgtgttttggttaaggtttttttaattggagtttagtaagaaagaaaacagtatttcaggctttcatgcctagatacagtttatactttgttctggttgatccaataaaacaaagaaaagcttttcagagaagagagtgggaaaaaaaattgtgttatacagggactactgtgtgaaatcaaagacaacaggtatggccctgaaaaatgtgaactgagggcagtattggagttccccttaatatgtttgttaaactataattgtggtggattctattgtatcagctactaattgttatttagtacaattaatttgattctcccctaggaaaatgagtagatccattctgcaagtgtatggttattcagagcttacagtgatgctctgattttgacggtttcttgtctagcttctgcttggacacttctctggcttttaggatgctattttatttaacacttgctcagataatatagtttgaggatgtttctattatagcaaatttaaacttaagggtggtacttaatgccctcagtattttcccgttttgctcatctcgtttaccattactcatacctaagcaggtaggagtaactcacccaaaattagattatatttgaattagtaatccagaattagataactcctctaatccaaaacctaattcacttaccttcttctcacaagactttttaagctagtctctgctctgttattgtgcggttccatttccatggtggctgagaaggttgtttcacagttgtaagtcactttccatctcttcaaaacagatttgatgtaactgattagtcactcctttccctcgacatttatattctgttttgccatggtacttgttgtgcatcatttttttctttctccggcagaatctcccagatgggaacctctttgtgctctttaaacttcagaggtgtaacttgggttcatttgcttgcgtttgcataaaaacttttgattcctaaagaagccggtggtatatcagaacaaaagtcggtatgacaatgacatttagatttgtacagagttggtgactgaaaggtagagtcacatcctattttttgttagtcgtgtgtagggtcaaattaataataccgttaacatatttaaaacattttcaaagttaatgttcggttcataataactggaacctggagaattcctgagccacgagcagaggtttttggggtagtagaactgccacctaggttggatctcagagcagcaattaagtggaagccccctttgagtatctgatgaaagctatagaccttaaaattgtgctatgcttgttccctatcccctaatgggtaggacatttatgttagtatttttctcttatcagtttaaaatatcaacctttatgctttttaattttttggaatatatttttttctaggtcagtcatatcatttggatcaaaaaatagaacaatcggagttgcagccaaaaatcaggtatgttctttaagagaattcggatcactttttaaggggggagtttttaaaaggaaaatctcaagagacatataagagggtaaagtgtgcctaagtttatgtatttttgagttttaaaaatgtaattcaagtattctttatgaaccttcagatgatgacactctttcctttctgttccctttcccttgttttattaagatcgactttaactttctaatctgccatccttaactttttttttttttttttttttttttgagatagagtctcgctctgttaccgcaggctagagtgcagtggcgcgatctcggctcactgcaacctccgcctcccgggttaaagcgattctcctgcctcagcctcctgagtaggtgggattacaggcgcgtgtcaccacgcccagctagtttttgtatttttagtggagatggggtttcaccatgttggtcagactgatctcgaactcctgagctcgtgatccatctgtctcagcctcccaaagtgctgggattacaggtgtgagcctacgcctggcctgctgactttaacttttagtaactttttgctgcctttcatttatctaatttttagaaattataaacaaggcattttaagttcttgtgaagtttctcgtgatactcatttaagagattccttttatagaaggaacttctaagaaattatgtgtttaaaagcattttcaggttacttagtaattaaggtaggactgggagaaatttttgtccagacctgtgctgtttaaaaaatatggtagccatgtactgtattgagcatttgaaatgtggctcgtctgaatcaaaatgtgaagtataaaatacacatgagattttttactttttaatcgaattgaaaagtaaagtacggtatctgatcaatttttttctgttgactacttattgaagtgatagttcctaaaatatattggcctaagttaattgaaattaatctaatctcttaccagtttttaacgtggctgctacaaaattntatgtaggtagctctccttttatgactacatatattctgttgaacagcactgatctagacagaccccttggaggtggagaggaaaacagtaaaagatccgtgaaatgctctttgagaggctctttgaaataaaaaacatttttctaaatacagaaaatagattgctaagaaaagaaaattttggattagattgagtactgtattatatattatggaatgtatttagtactgacctattaaaaaatcaggtcagatttgaaaacaaaaacatctcttaaaatgcttatgtttaataagaaattggcactttatcaaacttatgaatctgctttcattagaaaatggtttcatgttttctaatcctttgaatatgtaggttggatttaactttatttccttgttacattggaagagagagataactaaaaggggtgaaaaaggaaaggagaaataggcacactcaaaatatgttcaaaaggatagtgggactttagttgtaacaatcctttaaatgtgcccattgaggatattgatagcctagacctaaaattctgttgcatccttgtgattacttgagaagaatctgttgagactcatatttggccagtatactactagacatacttcatctcagttttagacacataaggaattttaagacctaaacttgcttgaattctatattgtttgaaaactagtactgccaagctaactgtattcttccctttattcaaaaaattaggtaagagaaaaagtaaataatatactgttttggtatttttaagctaataatttcagaagtcttagttttcaatcttacagttatttcttgtttcaaatgaggtacccttgagtgaaatgtgctctgaagtggggcttttcaatctagagtttacctaaaatatttgaccaaaacggtggattaaaaaaacaccatcttttacaacagtttaacaaacgtgcgccagttgtgtaagatagcagttcaatttcttgtttttaaaaaccatggctctcaagtcttcagaatacgcacatgcagttgaaaacattaggtcacttagaaacttgttgaattactcttctgccttctactttttggtgtagataactagcatttcatgctattgctaggaaaggtagcgatccatgcattttctggcacagagtgtttatcctggccgcttagcaatttattagactataaaaattaactttaattttttttttttttgagaatgagtttcacccttgttacccaagctagagtgcaatggcactatcttggctcactgcaacttctgcctcccaggttccagcgattctcctgcctcagcctctcaattagctgggattacaggcatgtgctgccatgcccagctataaaaattaacttttttttttgttttgagacggaatctcgctctgtcgcccaggctggagtgcagtgacacgatcttggctcactgcaagctccgcctcctgggttcatgccattctcctgcctcagcctcccgagtagctgggactgcaggtgcccgcaaccacgcccggctaattttttgtatttttagtagagacggggtttcaccgtgttagccaggatggtctccatctcctgacctcgtgatccacccgccttggcctcccaaagtgctgggattacaggcgtgagccaccgcgcctggccaaaaattaacttttttaaacaaaattataatttggctatagtgctactagatctattcattcattgggtataaaacctcacaagtttagcagggaaaaaaaggaatgaaacagtgataaaattctagtgtgtttgttcagagctttagtgatagttttcactgtctttgagtttatcttgcagattttgaaatctttaaagtctgtcgtcacactattttgcctcttgttccctcttgctgcttactttctggcattttctataggagaaggaaaaagtataaataaaatctgttcatagatgggaaattcagtgaaattggtgggcctcagggcaacttatgtgcactcataggattggtttgagttgtaaagtgaataaataaaattactaaaattactggtaggtggtgaaattaaagaaaaaaattaaaatctcaaacttctttttgcagcaaatcactcatgcaaacaatacggtgtctaacttcaaaagatttcatggccgagcattcaatgaccccttcattcaaaaggagaaggaaaacttgagttacgatttggttccattgaaaaatggtggagttggaataaaggtaatataattgagcaaccttagaaaaataccaacttattaatacttaaaaatacgaacttatttgagttattacttaaatttcttaattacaccaggtggtctttttgttctttttttattcagctccttttaaagtatagtagatagacgctaaattgtctttgaatattattcaaatggtaatatatatgctataacttaatttgtgtttcttctgactttttggcaattgtaaaatttaggtttatttgatgttggaaaaaaaatcgacattgtgttcatgtatcaaacaaaagtctgttctgagacagcccagttgcagttgtttggagagcaatagtgtagtaacaccaggaatctttttttaaacttgcagaggtattcctgtcttgtgatcaacacacaataatatttatcctagtgattcatctcttcagttagagtggaaatttactaccttctttaatgttttgacttagattttgggtggggtatatctgccctagctttcttccgctcctcttcatctttaggtagaagttctttcttcctttttctttttttctcttttcctttctctcccccttccctccttccccttccctttttcctccttttcttccttcttcccaaaacaactacaacaataaaataaagattttgtggaagggaatgtgtgctaatttttggaagttaaatattggcatgtagcttaaagtactacaatgtttaaaacattttttcccttcaatataggtaatgtacatgggtgaagaacatctatttagtgtggagcagataacagccatgttgttgactaagctgaaggaaactgctgaaaacagcctcaagaaaccagtaacagattgtgttatttcagtaagtataattcagcaaggcagtgtgttttatttcatttttgctttctttgtattacttttaagtatgaaatgtgggaaagctgttctttatttactagagaccgtgttctactggactgtattaacatgtgttccagagcattacaaagtagatttgagtgatatttttagccagaagcggcaaaggttcttgactggaaatcaaaatctcttgtgagactgtttgaaaatacagattttgactggttccatttgtgagtattctaatacagttagttgctgcactatcaggcttgtacatttaacacaggagcttttcacaggtgaaagaattctaccctccgttgagaaaccagtgtattaggagttttaaaacgtagcttaccagtagtgacaaaacctaaatttttaacactagcaagcctgttaccttcagtggacaattactagttagactatcaaagggtacttgaaatggacaaaagtcatcttttatttggacaccaaaaaggtaaattctgctcacccaggtgtcttgggtcacttcttgataggttgtggggtatgcttttggacttaaatacagcatggtctttgctctatagtatgagcaacgtggccggctgagatcagtcagcaacaagcctttatgaatgaatgaggcagaagaactaacatttctcctgctgtccttgcaagatgggaagtgttttaatctctggcaaaattaaagaattaagttataagtcagtggcttctccctccccactctctcccttccttttttttttttttgccacattttttttcccctggtgagctgagaaactgatggacgaagtgttctgatttgaaaggtgagcagagatccacctttgctcttgctcatgtctctctctcaagcatctacaaatattttggacaactttgaaaaatcaccgtactaaactctctcttaggtactttgcacttaaatgattctacgaatgtgttgttagatactttttttcctgaatagtatcctgaagtgctgcactagaaggcagtcaaaaaagaattacaactagaatagctcaagtcagtgctgtaagaaacctcagcccttgggttgtttttactcttaggaaaattgaaaggctttgccaaaaagtgattttgtaatcttaacaggttgactgaattaaagagcacctcagtgaatagcagaactgaaagggtggtggcatatgttagaattagctctttaagttcctgtagtttttacctatagtttaattatgttgaacattaaatgttgacctagcattataatttcctaatgccagtagaaacttacaactagtttggaagcagatttgatctgctttaatttcaagttttctcttagatttatgtaactttgaatatgtcttatgaaactcctgattaatttttatttcagcttgaacttggttataagaaagactattttgatcctgtaattttgggacagccttttcaaaagtagttactgtttctgaaggttaaggagcttgcagaaaactaaagccctatttctgttttgtgacttggcgaggcacctacttagctggactgttgtgaatttataagtggtttgtgaggaatttctaagtatattttgtgttctagataattcaaaattttttgtttgtttgtaggtcccctccttctttacagatgctgagaggcgatctgtgttagatgctgcacagatt

SEQ ID NO: 8167 - DNA, 9857 bp, Homo sapiens
gccaaatgacgtcacaactaaaaatcgatttcttaaaaaaaaaaacacctgacattttactccacaagagatcatcctgctgcctgatgaatacaagaacacttaacacaacccctttgcttttattataagcggtttgaactggtgttccttctcctaagtcgtaacgcaccagttgtcggggtaatccagacaataatagaagtgaatacaaaacaaacgaacaaaatgacgcttattgccagggaacccgcgcaaaagcgccagacaaaaccctacccagcctctctcgcgagtcccagaagacaaagccgggtcccagcaagcactgcggccaggactacacatcccagcatgcaaggcgcacacttctcccagcgggactacgattcccaacatgctctccggacagctggccggcctccccaccatcccggtgtctggggtctctgcaaaaatggggtctgtctccgcccgcccagcctccctttagcgttaaggatcggacaccacctcccggtagtaaattgtgactattccgagttttggagtcattcttcgttgcctgttttattagggcagcaaaacgcctgtggctagggcgggagtgggcggaggcaggtttgagccaatggcacgggagcggccctgtcgctgccatggcaacggcggccgttctccggggaccggctgcccattgggtagaatctttccagaaggctcgagaagaaggaagcggaagtggcacgtggaggggccggtggaggcgccggtgagtaaatgccgcagattctggaaagttctgatcagtgcgatacataaggctgaggaagtgggacctccccttttgggtcggtagttcagcgccggcgccggtgtgcgagccgcggcagagtgaggcaggcaacccgaggtgcggagcgacctgcggaggctgagccccgctttctcccagggtttcttatcagccagccgccgctgtccccgggggagtaggaggctcctgacaggccgcggctgtctgtgtgtccttctgagtgtcagaggaacggccagaccccgcgggccggagcagaacgcggccagggcagaaagcggcggcaggagaagcaggcagggggccggaggacgcagaccgagacccgaggcggaggcggaccgcgagccggccatgtcggtggtggggttggacgtgggctcgcagagctgctacatcgcggtagcccgggccgggggcatcgagaccatcgccaatgagttcagcgaccggtgcaccccgtaagtgggagtctgcgagggtggatgggaggaggttctgggcccttagtgtggggacccaagatcgcgggctggctgtacggatcaccgcggcaaacggaggcgtttgggcagcggcgcacccctccgtggaactagggaccagcgacccggccagaggagggatggggggcttgccatcacaaattggagaagggattgtctcagggattcacgggggtgagaggagtcccagagtcgagactctaagggtcgtcaccttgtgcgggcttcctattgggggttttcaaaacctactggggtcgggctgcggcaaagcccgcaacttcgctcccttttcttggcaggctgcagcctgcgccttccgcggccgcccccgtatccccacccggcctctctgagctggctgagccgcctccagcttgtcctcctcccttcgcgcatatctttgcgcaccgcggagcggggctgccggcctttttcttccgcattgtgaatctcgaaatgaactggaagcttccagagcttgtgtcgctgcttgtccagtgagcaggcggattgttgttagcgaccacggaagcagtcctatgaaagattagcccacctctttttacccagtctcttcgttgctaacattgttggccttaatgcccgggatcattgtcgaaagatgtaaacgtctttttttttgctctttgccattcatgaggaattgtaaaccgtatttttaaaattaattttgcacagtttatttaaaagagaataaaaattgcatacttttgtgctaggacgccaaaagaggatggatgtcgtcactgaactaaatattctataggagcatagggtgggcaaagggcaacattttaaaaagcaagtttcgtgaagggatattttcggacgagaatatatacaaacatatctgcatgtgcattgatgaaaacaaatgatttcatctcaaggaaaatactgtacctattaatttttttcaaatgtcccaagctcaggatgaaaagtgcaaaatgaaaacattgaacctaaaggtagaatgaatgactggggtaatacaattatttgggtgctgagaacgtttatgaaagttgagtggaaaatctgaggcaaaatatttggcaatgttagtaacgttaggaagactgttctgagcaacctgtacgtctacccctgcagatctaagtttgtgttttggttaaggtttttttaattggagtttagtaagaaagaaaacagtatttcaggctttcatgcctagatacagtttatactttgttctggttgatccaataaaacaaagaaaagcttttcagagaagagagtgggaaaaaaaattgtgttatacagggactactgtgtgaaatcaaagacaacaggtatggccctgaaaaatgtgaactgagggcagtattggagttccccttaatatgtttgttaaactataattgtggtggattctattgtatcagctactaattgttatttagtacaattaatttgattctcccctaggaaaatgagtagatccattctgcaagtgtatggttattcagagcttacagtgatgctctgattttgacggtttcttgtctagcttctgcttggacacttctctggcttttaggatgctattttatttaacacttgctcagataatatagtttgaggatgtttctattatagcaaatttaaacttaagggtggtacttaatgccctcagtattttcccgttttgctcatctcgtttaccattactcatacctaagcaggtaggagtaactcacccaaaattagattatatttgaattagtaatccagaattagataactcctctaatccaaaacctaattcacttaccttcttctcacaagactttttaagctagtctctgctctgttattgtgcggttccatttccatggtggctgagaaggttgtttcacagttgtaagtcactttccatctcttcaaaacagatttgatgtaactgattagtcactcctttccctcgacatttatattctgttttgccatggtacttgttgtgcatcatttttttctttctccggcagaatctcccagatgggaacctctttgtgctctttaaacttcagaggtgtaacttgggttcatttgcttgcgtttgcataaaaacttttgattcctaaagaagccggtggtatatcagaacaaaagtcggtatgacaatgacatttagatttgtacagagttggtgactgaaaggtagagtcacatcctattttttgttagtcgtgtgtagggtcaaattaataataccgttaacatatttaaaacattttcaaagttaatgttcggttcataataactggaacctggagaattcctgagccacgagcagaggtttttggggtagtagaactgccacctaggttggatctcagagcagcaattaagtggaagccccctttgagtatctgatgaaagctatagaccttaaaattgtgctatgcttgttccctatcccctaatgggtaggacatttatgttagtatttttctcttatcagtttaaaatatcaacctttatgctttttaattttttggaatatatttttttctaggtcagtcatatcatttggatcaaaaaatagaacaatcggagttgcagccaaaaatcaggtatgttctttaagagaattcggatcactttttaaggggggagtttttaaaaggaaaatctcaagagacatataagagggtaaagtgtgcctaagtttatgtatttttgagttttaaaaatgtaattcaagtattctttatgaaccttcagatgatgacactctttcctttctgttccctttcccttgttttattaagatcgactttaactttctaatctgccatccttaactttttttttttttttttttttttttgagatagagtctcgctctgttacccaggctagagtgcagtggcgcgatctcggctcactgcaacctccgcctcccgggttaaagcgattctcctgcctcagcctcctgagtaggtgggattacaggcgcgtgtcaccacgcccagctagtttttgtatttttagtggagatggggtttcaccatgttggtcagactgatctcgaactcctgagctcgtgatccatctgtctcagcctcccaaagtgctgggattacaggtgtgagcctacgcctggcctgctgactttaacttttagtaactttttgctgcctttcatttatctaatttttagaaattataaacaaggcattttaagttcttgtgaagtttctcgtgatactcatttaagagattccttttatagaaggaacttctaagaaattatgtgtttaaaagcattttcaggttacttagtaattaaggtaggactgggagaaatttttgtccagacctgtgctgtttaaaaaatatggtagccatgtactgtattgagcatttgaaatgtggctcgtctgaatcaaaatgtgaagtataaaatacacatgagattttttactttttaatcgaattgaaaagtaaagtacggtatctgatcaatttttttctgttgactacttattgaagtgatagttcctaaaatatattggcctaagttaattgaaattaatctaatctcttaccagtttttaacgtggctgctacaaaattttatgtaggtagctctcctttatgacttacatataattctgttgaacagcactgatctagacagaccccttggaggtggagagaaaaacagtaaaagatacgtgaaatgctctttgagaggctctttgaaataaaaaacatttttctaaatacagaaaatagattgctaagaaagaaaattttggattagattgagtactgtattatatattatggaatgtatttagtactgacctattaaaaaatcaggtcagatttgaaaacaaaaacatctcttaaaatgcttatgtttaataagaaattggcactttatcaaacttatgaatctgctttcattagaaaatggtttcatgttttctaatcctttgaatatgtaggttggatttaactttatttccttgttacattggaagagagagataactaaaaggggtgaaaaaggaaaggagaaataggcacactcaaaatatgttcaaaaggatagtgggactttagttgtaacaatcctttaaatgtgcccattgaggatattgatagcctagacctaaaattctgttgcatccttgtgattacttgagaagaatctgttgagactcatatttggccagtatactactagacatacttcatctcagttttagacacataaggaattttaagacctaaacttgcttgaattctatattgtttgaaaactagtactgccaagctaactgtattcttccctttattcaaaaaattaggtaagagaaaaagtaaataatatactgttttggtatttttaagctaataatttcagaagtcttagttttcaatcttacagttatttcttgtttcaaatgaggtacccttgagtgaaatgtgctctgaagtggggcttttcaatctagagtttacctaaaatatttgaccaaaacggtggattaaaaaaacaccatcttttacaacagtttaacaaacgtgcgccagttgtgtaagatagcagttcaatttcttgtttttaaaaaccatggctctcaagtcttcagaatacgcacatgcagttgaaaacattaggtcacttagaaacttgttgaattactcttctgccttctactttttggtgtagataactagcatttcatgctattgctaggaaaggtagcgatccatgcattttctggcacagagtgtttatcctggccgcttagcaatttattagactataaaaattaactttaattttttttttttttgagaatgagtttcacccttgttacccaagctagagtgcaatggcactatcttggctcactgcaacttctgcctcccaggttccagcgattctcctgcctcagcctctcaattagctgggattacaggcatgtgctgccatgcccagctataaaaattaacttttttttttgttttgagacggaatctcgctctgtcgcccaggctggagtgcagtgacacgatcttggctcactgcaagctccgcctcctgggttcatgccattctcctgcctcagcctcccgagtagctgggactgcaggtgcccgcaaccacgcccggctaattttttgtatttttagtagagacggggtttcaccgtgttagccaggatggtctccatctcctgacctcgtgatccacccgccttggcctcccaaagtgctgggattacaggcgtgagccaccgcgcctggccaaaaattaacttttttaaacaaaattataatttggctatagtgctactagatctattcattcattgggtataaaacctcacaagtttagcagggaaaaaaaggaatgaaacagtgataaaattctagtgtgtttgttcagagctttagtgatagttttcactgtctttgagtttatcttgcagattttgaaatctttaaagtctgtcgtcacactattttgcctcttgttccctcttgctgcttactttctggcattttctataggagaaggaaaaagtataaataaaatctgttcatagatgggaaattcagtgaaattggtgggcctcagggcaacttatgtgcactcataggattggtttgagttgtaaagtgaataaataaaattactaaaattactggtaggtggtgaaattaaagaaaaaaattaaaatctcaaacttctttttgcagcaaatcactcatgcaaacaatacggtgtctaacttcaaaagatttcatggccgagcattcaatgaccccttcattcaaaaggagaaggaaaacttgagttacgatttggttccattgaaaaatggtggagttggaataaaggtaatataattgagcaaccttagaaaaataccaacttattaatacttaaaaatacgaacttatttgagttattacttaaatttcttaattacaccaggtggtctttttgttctttttttattcagctccttttaaagtatagtagatagacgctaaattgtctttgaatattattcaaatggtaatatatatgctataacttaatttgtgtttcttctgactttttggcaattgtaaaatttaggtttatttgatgttggaaaaaaaatcgacattgtgttcatgtatcaaacaaaagtctgttctgagacagcccagttgcagttgtttggagagcaatagtgtagtaacaccaggaatctttttttaaacttgcagaggtattcctgtcttgtgatcaacacacaataatatttatcctagtgattcatctcttcagttagagtggaaatttactaccttctttaatgttttgacttagattttgggtggggtatatctgccctagctttcttccgctcctcttcatctttaggtagaagttctttcttcctttttctttttttctcttttcctttctctcccccttccctccttccccttccctttttcctccttttcttccttcttcccaaaacaactacaacaataaaataaagattttgtggaagggaatgtgtgctaatttttggaagttaaatattggcatgtagcttaaagtactacaatgtttaaaacattttttcccttcaatataggtaatgtacatgggtgaagaacatctatttagtgtggagcagataacagccatgttgttgactaagctgaaggaaactgctgaaaacagcctcaagaaaccagtaacagattgtgttatttcagtaagtataattcagcaaggcagtgtgttttatttcatttttgcgttctttgtattacttttaagtatgaaatgtgggaaagctgttctttagttactagagaccgtgttctactggactgtattaacatgtgttccagagcattacaaagtagatttgagtgatatttttagccagaagcggcaaaggttcttgactggaaatcaaaatctcttgtgagactttttgaaaatacagattttgactggttccatttgtgagtattctaatacagttagttgctgcactatcaggcttgtacatttaacacaggagcttttcacaggtgaaagaattctaccctccgttgagaaaccagtgtattaggagttttaaaacgtagcttaccagtagtgacaaaacctaaatttttaacactagcaagcctgttaccttcagtggacaattactagttagactatcaaagggtacttgaaatggacaaaagtcatcttttatttggacaccaaaaaggtaaattctgctcacccaggtgtcttgggtcacttcttgataggttgtggggtatgcttttggacttaaatacagcatggtctttgctctatagtatgagcaacgtggccggctgagatcagtcagcaacaagcctttatgaatgaatgaggcagaagaactaacatttctcctgctgtccttgcaagatgggaagtgttttaatctctggcaaaattaaagaattaagttataagtcagtggcttctccctccccactctctcccttccttttttttttttttgccacattttttttcccctggtgagctgagaaactgatggacgaagtgttctgatttgaaaggtgagcagagatccacctttgctcttgctcatgtctctctctcaagcatctacaaatattttggacaactttgaaaaatcaccgtactaaactctctcttaggtactttgcacttaaatgattctacgaatgtgttgttagatactttttttcctgaatagtatcctgaagtgctgcactagaaggcagtcaaaaaagaattacaactagaatagctcaagtcagtgctgtaagaaacctcagcccttgggttgtttttactcttaggaaaattgaaaggctttgccaaaaagtgattttgtaatcttaacaggttgactgaattaaagagcacctcagtgaatagcagaactgaaagggtggtggcatatgttagaattagctctttaagttcctgtagtttttacctatagtttaattatgttgaacattaaatgttgacctagcattataatttcctaatgccagtagaaacttacaactagtttggaagcagatttgatctgctttaatttcaagttttctcttagatttatgtaactttgaatatgtcttatgaaactcctgattaatttttatttcagcttgaacttggttataagaaagactattttgatcctgtaattttgggacagccttttcaaaagtagttactgtttctgaaggttaaggagcttgcagaaaactaaagccctatttctgttttgtgacttggcgaggcacctacttagctggactgttgtgaatttataagtggtttgtgaggaatttctaagtatattttgtgttctagataattcaaattttttgtttgtttgtaggtcccctccttctttacagatgctgagaggcgatctgtgttagatgctgcacagatt

SEQ ID NO: 8168 - DNA, 495 bp, Homo sapiens
ggtggaactctggggaacatgccaatagttgaaacgtattttgaggaagcagacactgggaagaaatagaaaaagaagttggttaaaaataaagtattataagaactgagaaaagaaagaatttcatgaaggagtaggtgtcagtaatgtccaagaccagaagtcacatgagatactgactgactttgggaatttggaggtcacttacctgtagtagtttgggataggggaacatttccattggaatggtaatttgcatcctgccgttgccacttatttattctgtgacttgggaaagcccttttacctttgactcattgtctgtaaagaggaggttggcctctttaatggggttcagtctatgatccgtggagtgccagaggttcataaaaggtaccttcaggccctcccatcaagaaatcaagggtaaggccagatatttgttggggagggagggataaaagtcctctacccctgcttcaaacaaagcagtga

SEQ ID NO: 8169 - DNA, 495 bp, Homo sapiens
tacagcttagaaaacagagtaagttttttttgtagatgcagtaaatatgaaaaatattcaatccaaaattaactctgtaaatgtcagagaattcacagtagaaatgataaggcactggcacttcagactacactaaatcagagtgttgagtaaaaaaaataatttcaatctaaaatttagataagttatttgcatataacttaaaaaagaggaggtgattttttggagaattataattacatttgaagtatactttttgtatacttcaaatatcaaaaaaattaacatcacaatattgaaaaaaattacagactctgaaaagcaaataaggatgtaattcaactctcaagttacttcatgctcttcattcctactttatttacatgtgaaagcatgcgatcaattgttgctgcatcagagatatgaaagattcttttttattagatgggcattatttatgacctttttcataaaagagaaaggatattaaaatat

SEQ ID NO: 8170 - DNA, 495 bp, Homo sapiens; identical to SEQ ID NO: 8169

SEQ ID NO: 8171 - DNA, 495 bp, Homo sapiens; identical to SEQ ID NO: 8169

SEQ ID NO: 8172 - DNA, 276 bp, Homo sapiens
aattaaaattaaattagtgatgtattatattagttgtgcttttatgtaatgtagtacattcataaatttttagattatatgtaaacttaattttttaaacattttttgacatgttaagtctgttgtacattcaatgaagtgttattatgccactcgctttaacctatcccaccttactcaagggtgtaggtaagagatggcaacagtttactatttggtaagagtggaataacatctctagtaatctctttttttcagtggctttaacctgcaaat

SEQ ID NO: 8173 - DNA, 276 bp, Homo sapiens; identical to SEQ ID NO: 8172

SEQ ID NO: 8174 - DNA, 276 bp, Homo sapiens; identical to SEQ ID NO: 8172

SEQ ID NO: 8175 - DNA, 494 bp, Homo sapiens
gtaataaaccacccaccacctggcactggtaagttactccatgaatgatagctgtaactgttaaccctctaccaggtactatctcaggtccctagaagcaaggcctgagggagacagacagggcatgggaagagtgagcaaagacgtggctcagctggcatctggcctgcagctgccccacccgagacgagacgggtcagcttttggctgtaggtggccacaggtggaacctctgaggcattttctggctaggtggctccagctgggacagttcgcagaactgcactgcagagcggtgagaagaggacagccaacagccacagcagcaaggcagtcaaggggcctgggcgccaccacagcgatggcgatgagcccatttacagggacgctcaagtacaaaggcacattacatgtgcctaagaccttaacatcagaggctttggcagcgtctcctgaatatggtgcaggaggttggtatggtccaggggccccac

SEQ ID NO: 8176 - DNA, 10634 bp, Homo sapiens
taccttctctccgatctgctgatccttggagaggctagtgatcatcttcacatcttcatcggtcagttcccctacagcaaccttgttgtccttcttggccacgtggttggctaggatgacagtggcaaagacagggaagccattggcagtgttgagggagccatcatagttgttgtgatagatgccagtcagctcctggggaaagggaggggccaagaagtcagagcctaacccaggggtgcccacctccgtgctgccttcctccagtttctcctattgcaagtgctccacactacagacaccaagataagtaactcagtaaaacccctcctaaacccaccattccaacaacccatccaccagaagaaagttctttgcctcagccatgcaaaaacagatcctagcccgagtgcccctgcgaccatagacaccgccaccggcccagccacaactgcttctgccagttccctctgcaacttggctccctcccagcctgccccggccacttactatctcgtctcctggcttgcagctgtccaccagatctgcgaggagaatggcgtccttggagcggggcagccggccagccgccactttgcctggactctcctggattcggatacgctggtagttctgatagatggtctgcgagggacacacagaaggcctcaaatcactgacttactatgtcacctaaccttgacccccgaacaggagggagaacaggcaggattccgactcctgagtggcaaatggagagccaaagacagcaaggaatgagttcatggcgactcagcacatcagttgacagtccccactcctgccacaccatccctctgggatgccttctgacggccagactcagcacctgctctatgctttacagctaagctgtcttgagtaccgatgctggaaccaggctgcctgggttctgtgtctaagctgtgtgatcttgggcaagtgacttcctctctctgtgccttctctgcaacctcacaataagaattaaagcaagtcatacatacatcaacctaatccagcatctgataaatgttaagttacaggaagttttggctgtcactgtcaagtatcacaggccagcactgtgccatgtcatttcgtacccattatctcacaacatggcactgcagttaaaagcacatgctctagatcaagatgcctgagctgtggacctctaacacacattctggttgggtgacctcagccagttctctaaacactcggcaaagtggggccagtaacagttcctgcctcatgagctgtgaaaaaggaccaggtaataaaccacccaccacctggcactggtaagttactccatgaatgatagctgtaactgttaaccctctaccaggtactatctcaggtccctagaagcaaggcctgagggagacagacagggcatgggaagagtgagcaaagacgtggctcagctggcatctggcctgcagctgccccacccgagacgagacgggtcagcttttggctgtaggtggccacaggtggaacctctgaggcattttctggcaaggtggctccagctgggacagttcgcagaactgcactgcagagcggtgagaagaggacagccaacagccacagcagcaaggcagtcaaggggcctgggcgccaccacagcgatggcgatgagcccatttacagggacgctcaagtacaaaggcacattacatgtgcctaagaccttaacatcagaggctttggcagcgtctcctgaatatggtgcaggaggttggtatggtccaggggccccacgtgagccagacaggtcccagaaacaagctgaggggaagtcccgatgggactgcagccaccccacgtgagtgatggcaccatggagactggtaagcacacatcctgaaggagtgacctggcaagaagtgggccctgtttgccagatcttctcatgtttcaagaggagccataaacttgtatggtttaaacaaatcgcctgacttaaatattgacttgaattcctaaaaacgtcgtgtgggccaagctaagtccactggccagacagactgggtccaccccagggtgtggccaacacacaattctatcttgcttcttgcggctgcccacactggtcttccacagcctgagaggccagtcaggtcctgcatactgggcacccctaaggacagctggcagcagaccttgtgtcctctctcacctcctccatgttgacctcaaaggggccggccgactggcactcaggacaggagcctggtttcacctcctggttctgggactggcagaaaggacccaggacgaaattgcacttgttgcagttgtacttgaccatgctgagctggggcaggacgccagtgcagctggtcaccaccccactggtgcggatcagctggttcagatgcagctgcctgcggaggcagagggtgcatcagaagccgtgagccagggtgaggccaggctgcagacgagagtgtcccaacacactgtcctggaaattgggcccagcccccagcccgggaagatccctcccatcacactcctgtgcaaccacaactcacctgcgatgaggatgctgctggctgcaccctccccgcccacaccacaatcgctcttcaggaatcacgaccgagtcacccagcactgagctcggacctgccatcctcacctgccctcagctcacctcagcgagcgcagctcctccaccagaggcaggtgggagatgcggacatggatgtggttggtgatgcggtcgtacttggggtacatggccagtaccacctccagggcagcctcatcaaagatctgcagcagctccgccggtgcctcaggcaggaagtaggccagcacgtgctccctggctgccaagtcctcatagttcaccaccaggctctcacggttctctagaagggggcacagtgggaagagagttaactaagcatgaggcctgggctgggctgcaacaatgcctgtgtgagaagcaaggcctacccaccccgaccattgattttgacctagaaagcccagctttcacttctaggtctaccacacttcagctgtgacatagcctgagcttcaacttcctactccgtaaaatgggcatgtcacacagtgtacaaagttgctggggggttaaattaaatatgagcagagtgcctacacagctacaaacatgaaacgccttacaagagccaggaagaaactgacaaacacaggacaaaaagcagtggaaggaattgcaggaatcaagatctacatgtcccttttaaaagtcaattcctggctggggacggtggctcacgcctgttatctcaacactctgggaggccaaggcgggcaaatcacctgaggtcgggagtttgagaccagtctgaccaacatggagaaaccccttctctactaaaaaaaaaaaattagtcaggcatggtggtgcatgcctgtaattccagctactcgggaggctgaggcatgagaaacgcttgaacccaggaggcggaggttgcagtgagccgagaccgtgccattgcactccagcctgggaaacaagaacaaaactccgtctcaaaaaaaaaaaaaaaaaaaaaaagagtcaattcctattacaaagatcaaagtagtaatccagatttttatataaaatctgtccattttcaagcttgtcaaaaaacgctttggtggcccagatgtggtcactgcatagccagcaggagagccctgatgcaaaactcaaaacttttggtttctctgacagacctctcagccatatgccctgtgcttcacgtgttcactcggctcagacaactttctggggaggatttagggaggcgctacaggggctgaggcgggggcgtagggaagccacacctttgcacatgtcgctgatgcgctccttgaagacgttgtggccgtggctgtcgacgtgagtgcgcaggaagttcttgaagcggtggtggatctccagccgggggcccgccatgctcacccactcgcgcacagagtggcctttgagatcctccaggttctcgatgctctcaatcatctcctcgtcctcctcgccgtcctccgtggcccgctccacctggcggcgcttgcgggcagggcgctcctcgtcctcctcatcgctgtctggggaggcaagagacacctgctactgcggtcatccccagcaccttgtactcccctcccagactccttcccagcttcccagtccctcgggcaggcagacaactggacctaccatacaggagcccacggcgcatgcggcccaggccccggccagcctcccggtcacgctgccgcatggcccgctttgctgcctccctctgactggccgtcagctcctctacgtcctcatcatccagagccagtccctcggcctcataggcgtccagctctgggatggcgcggtagtccctgagggagcaccaaaacagatgtggttactgccaaaaaggaaaaccctaagcaccaaaccccatccaggaactgggcctgttccctaaggttcaggagccccattgtgggtaggctcagcgcttccaggtcagaaacacagaaggctcagaaaagatctccaatggatgaacaaaacacgatctgtccatatgatggacgatgaagccttaaaatagaaggaaattctgccacgtgctggcacatggatgaaccttgaggacatgattctgagtgaaagaagccaggcacaaaaggacaaatcctatatggttccactcactgagcggtcaaattcacagaaacagaaagtaaaatgatggttgctaggtgctgggaagaatggggagttagtgtttaaccgagacagtttcagttttcaaactgaaaagacttttgtggatggatggcggtgatggccgcacaacaatatgaatgtacttaatgccactgaaccatacacataagaatggttaagatggctgggcatggtggttcatgcctataattccagcactttgggaggtgaaggcaggaggatcacttgagcccaggagttcaagaacagccttaacatagtgagaccccatctgtataaaaatagaaaatggccgggcacggtggctcatgcctgtaatcccagcactttgggaggccaagccggatgaatcacgaagtcaagagattgagaccatcctggcgaacatggtaaaactccatctctactaaaaatacaaaaattagctgggcgtagtgtcatgtgcctctagtcccagctactcgagaggctgaggcaggagaatcgcttgaacccgggaggcagaggttgcagtgagcagagattgtgccactgcactccagcctggtcgcaacagagtgagactccgtctcaaaaaaaacaaaaagaaaaaaaaaataacccaggcctggtggcacatgcctatagtcctagctactcaggaggctgagctgggaggattgcttgagcgcaggagttcaaggctgcagtgagccacgttcgtgccactgcattccagcctgggtgacagagtaagaccctgtctcaaaaaactagcaaacaaaacaaaacaaacaaacaaacaaaagggctgggtgcggtggctcatgcctgtaatcctagcactttgaaccagggaggcagaggttgcagtgagccgagatagcaccactgcactccagcctgggcaacaagagtgaaactccgtctcaaacaaacaaacaaacaaaaaaggttaagatggtaaattttgggccagggcagtagctcatgcttgtaatcccagcactttgggaggctgaggcgggcggatcacgaggtcaggagatcgagaccatcctggctaacacggtgaaaccccgtctctactaaaaatacaaaaattacttgggcgcggtggtgggcgcctgtagtcccagctacttgggaagctgaggcaggagaatcactttcggaggttgcagtgagccgagatcacaccactgcactccagcctggcaacagagtgagactctgtctcaaaaaaaaaacaaaagaaaaggtaaattttgttatgtgtattttaccacaattacaaaaggggaggtagatctccagacagcttctatgcgcccaataagaaaaaataattcaaggaaccacaaaacattagaccaaaaggcttcagagagctgacccaactccccgtgagggctggaattctccctgtactttccccatctctgactatgccgcccttcaacaacctgatgtcctggcttccatgcacagtcagccaaaccagccctctgaaatggccacccactgtctcaaccctttgagctactctaagaccatcagacacacattttccacattatcttccttcagatactgaagagaagtaatgccttaataaggcacccagcgagtgcaaagcactgtgctctcttccctgcagtgctctcttccctgaggaggagacactgtcattccatctgaaagatgaggaaatgggtagttgaggggaaaatgtgatttttgcctatggtcgctctgtagacctgagtgtcaaaatatagtccaagcccagagctccttcccccatgccatactgcctccccagacaatccccttgaattctccttttttcaggttaaatggtgacaagagaaactgctactatttttctgcaataaacattgtcaaactactgtcagaacaaatctttttatgctgttgatgccccaagcagaacccagccaggcagatatcagagttgaccaggtctgatttcttccatgttttcggggaaaaggtatcggtcccattctccctggatctcaagtcacacaaaatgccctcagcaaacttctaattggttcatacaaaaaaaaaaaaaaaaaaaagttaaactggacttcatcaaatttcaaaacttttgcacttcaaaagaaaacattaaaaccacgaaaaagataagccagattgaggagaaaataactgcaaattacatatctgatagaggacttatattcagaatatgtaaaaaacctcttacaactcaatagtaaaaagacaagcaacccaattaaaaagtgagtccaggatttctctgaagatacacagatagccaatcaagcatacgaaaagatgttcaacatcattagccatcaggaatgagatgccacttcacacctgcagggatggccagaatcaaaaagaccaatgttggcaagaacacggaggagtggaaccctcatgtgttgctggtgggaatgcaagatagtgcagctgcttttgaaaacagtctggcagttcctcaaaagattaaacacaagaccaacaatctcactcctacatagccaacagaattaaagatctgttcacataaaaacctgtaacgggccgggtgtggtggctcacacctgtaatcccagcactttgggaggctgaagcacgtggatcacctgaggtcaggggttcaagaccagcctggccaacatggtaaaaccgaaaccgcatctctactaaaaatagaaaaattagccggtgtggtggcaaatgtctgtgatcccagctacttgggaggctgaggcaggagaattgcttgaacctgggaggcggaggttgcagtgagctgagattgtgccactacactgcagcctaagcgacagagcaaaactcaaaaacaaacaaacaaacaaacaaaaaaacacgacctgtaatgaatgttcatagcaacattattcataatcgccaaaaggcttgaggaagccaacatccatcaactgatgaatagatgtggtatctccatacaaagaaatatgattcagccacaaaaaggaatggagtgctgcacatgcaagaacacagaaagaccttaaaaccacactaagagaaaaaagcccaccacaaaagtgcatatataatatgattcaatttatatgaaatgaccagattggaaaatctagagacaggtctttaattcttacctgtgggttgggtaagaactgagaatgaactataagcaggcaggagggacctcaatgggaaaacggccctgttctcacactggattgtggtgaaggctgcataactcaggaaatttaccatgaatttgcattgaattatattttcgcaaggggtaaactctaaaaaactatagcccaataaagtttttttttttttttttgaaaaaccacaaaaacaaatgtaattgggctcagccatccctcagatacctctacccagaagccccctgccaagggcctctctctttgcttctcagagaagcaaagagaaagggtcaagacagggaggggaaacagcagaggaggggcatccggcctgaacaactccatcaggcagaacaggaaagccgtctaggacccatgccctgaccccaagtccagggcagatttatccagactcctcattccttctacagcctacagcacatgcagtctcatcgttgggggtggtactgataatagcaaagatgcatccagtctggagtgcccttgaaagcctctcaactgtctgacatcctagggacggcaggatgccctgcacagtactctcacacatgctaaggctgaaaaggcacaaaaggagcatctccacgaggctcctgggcattcacacaattccgctactgacgttatctaccagatcgcagctggaaatgcagagtaaggcaggggtagaaatctagccttgcttatgcgcagagcttactccactctcctagcattaagtcttgctaacttatttatttatttatttttgaaacagagtttcactcttttcgcccaggctggagtgcagtggtgtgatctcagctcactgcaacctatgcctcctgggttgaagtgattctcctgccttagcctcccaagtagctgggactacaagcacgcaccaccatgcacagctaattttttgtatttttagcagagacggggtttcaccctgttgaccaggctggtttcaaactcctgacctcaggtgatccgcccacctcggcctcccaaagtgctgggattacaggtgtgagccaccacatgtttactaataaacaagaccattcctaacaaagggcatggtgcacattaggtacaataaatgtttgctgattgactctaaaactttatttatcagatccctcctcccccatgcacctttcctttgaaaagttactgggaaacactgggcttcctgcttcctgtctttttgagttggagtattccagattagagacccctacattctctggggtgcttatggagtcggggcttatcctcagcttagggtctagtctttccaagttacatgcagtaagttaaagagacctgtgtcatggctctgtaaacctgtctcctcagaaccctggatcaagctgtgctcaaaggcaagaatgccatcgattcatctgctcccagctcccaaagccaggccaccaggcacacaatgggctctctgcaaaactatctgctgagtccagggccttgaatgaaattacctttccatgccatctccaatgagctcctctccatcctcttcttcctccaggggcccctctgtgcctaggagcccctcggactcatcctcaaatggtggaaggtcacggccagggctggaggtgagggcatcagtacgccgggagcttcggccagggctggaggtgagaggatcattgcctcgccgacgctgggccgggctggatgccatggtgaaggattccgatgattcctgcaagagaaggtgcggttgtcagaaacctaggaagctggtgaggcatgatacagcttcctttttaccatcaggggccttcccttctttctctccacctgtgactcttgtcctccaacacaccaaaccccttccagcctccagatctttgcccttgctgttctctcacctggaatgctctcagctgagcaatctgagtcagtggcttccaaacaaatagaagccagctcaaatatcggggtcacccacatcaccgtgctttctccatgaaaaaccactgaggttatgtcatttgcctatttacctgtttactgtctattatctccccttaagcattagacctatttcagcacacacagtgcgcaaggtattgtgatagagatggcatagaagagccaccaaaacaagaggtctggaactcagatgtggaacagacagtatacaagacaaagggacaagaaggtaatacaaaagtaagtgtagtgtttggaacaaggatcattgggaaattaaaaaaaaaaaaagtttaaaggagtgtagtgaaatgggggcctgtcttttgtacgctcagcgccacacagatggcgcccaataagtatgtgtggggtgaataaaggacagaggctgaacgggccgagctcgccttagggagcccagggccccaggtcagtggtaggtaggcgagtcgcctcacgcagggtgcaggcgagaaagtagctgcgccccagagcctggggcccagcctcacccagagcgccgccctgggccggggccagagtacgggaagcgcgcagcctccgcacccatgtccccggcgcccgcccgccacgcgccagcgcgctcaccgccatagcagtaccacgatcctctccgccactacagcaacaaccaggtttcgcgcgaaaagtggttcacgtgacccacc

SEQ ID NO: 8177 - DNA, 1923 bp, Homo sapiens
ctcctccatgttgacctcaaaggggccggccgactggcactcaggacaggagcctggtttcacctcctggttctgggactggcagaaaggacccaggacgaaattgcacttgttgcagttgtacttgaccatgctgagctggggcaggacgccagtgcagctggtcaccaccccactggtgcggatcagctggttcagatgcagctgcctgcggaggcagagggtgcatcagaagccgtgagccagggtgaggccaggctgcagacgagagtgtcccaacacactgtcctggaaattgggcccagcccccagcccgggaagatccctcccatcacactcctgtgcaaccacaactcacctgcgatgaggatgctgctggctgcaccctccccgcccacaccacaatcgctcttcaggaatcacgaccgagtcacccagcactgagctcggacctgccatcctcacctgccctcagctcacctcagcgagcgcagctcctccaccagaggcaggtgggagatgcggacatggatgtggttggtgatgcggtcgtacttggggtacatggccagtaccacctccagggcagcctcatcaaagatctgcagcagctccgccggtgcctcaggcaggaagtaggccagcacgtgctccctggctgccaagtcctcatagttcaccaccaggctctcacggttctctagaagggggcacagtgggaagagagttaactaagcatgaggcctgggctgggctgcaacaatgcctgtgtgagaagcaaggcctacccaccccgaccattgattttgacctagaaagcccagctttcacttctaggtctaccacacttcagctgtgacatagcctgagcttcaacttcctactccgtaaaatgggcatgtcacacagtgtacaaagttgctggggggttaaattaaatatgagcagagtgcctacacagctacaaacatgaaacgccttacaagagccaggaagaaactgacaaacacaggacaaaaagcagtggaaggaattgcaggaatcaagatctacatgtcccttttaaaagtcaattcctggctggggacggtggctcacgcctgttatctcaacactctgggaggccaaggcgggcaaatcacctgaggtcgggagtttgagaccagtctgaccaacatggagaaaccccttctctactaaaaaaaaaaaattagtcaggcatggtggtgcatgcctgtaattccagctactcgggaggctgaggcatgagaaacgcttgaacccaggaggcggaggttgcagtgagccgagaccgtgccattgcactccagcctgggaaacaagaacaaaactccgtctcaaaaaaaaaaaaaaaaaaaaaaggagtcaattcctattacaaagatcaaagtagtaatccagatttttatataaaatctgtccattttcaagcttgtcaaaaaacgctttggtggcccagatgtggtcactgcatagccagcaggagagccctgatgcaaaactcaaaacttttggtttctctgacagacctctcagccatatgccctgtgcttcacgtgttcactcggctcagacaactttctggggaggatttagggaggcgctacaggggctgaggcgggggcgtagggaagccacacctttgcacatgtcgctgatgcgctccttgaagacgttgtggccgtggctgtcgacgtgagtgcgcaggaagttcttgaagcggtggtggatctccagccgggggcccgccatgctcacccactcgcgcacagagtggcctttgagatcctccaggttctcgatgctctcgatcatctcctcgtcctcctcgccgtcctccgtggcccgctccacctggcggcgcttgcgggcagggcgctcctcgtcctcctcatcgctgtc

SEQ ID NO: 8178 - DNA, 87 bp, Homo sapiens
ggaggtggaggttgcggtgagccgagatcccgccactgcactccagcctgggtgacagagtgagactccgtctcaaaaaaaaaaaaa

SEQ ID NO: 8179 - DNA, 14416 bp, Homo sapiens
cttcacagtgccaataccatgaagaggagctcagacagctcttaccacatgatacaagagccggctggtggaagagtggggaccagaaaggtaatgctttttaactcttacttctgagctctttacacattcaaagataggaaagctaggaggaattttacaactaattggcatttccaatgtgcattgtgatgtgtacctttttatattattcaggcaggttaatacagcttttaatagtcctagagcatgcaaatagattatatgtttatacaagccactcagcacatatatacaagtacatatgccaaagagaaagctatttttaagagttacattcgcaaacagtaaattcagggaacacacacatactcagatgcagagagaatccaaatattgataagttgcacttatctaaatgctgctattaggactcctgagttgtttagagccattaaacttttggttgtatttcagactttcttgtaaaacttaattgaactgcaaaacattttgggtactgtatatgtgactccaaataggtggatgatgttaagtattatagcacaaagattttttataaaaccattgtaacacaaatgtcccctgcctcccccattctctttcaccatccccgtaaaaaatatgaggctttttaggcaatgttgacaaagttttaacaataatggtggagtaattgatgtttctggagctgaaaccccaaaggtgttaggttacttgtaacagaaaaagtcttacaaatagttgttttggaaaaggggacagtatatataattcagaaagcattgttaacctgtgcaaactgtaattataacttagtgtcacaattttcttgccctcttccccttgcactcagatcttatcttgtagtaatgatatttattaactctttccacctaaactgcattgcttgactgtaatgctatgaacacactaggtgtcagatataagctgagtgtatcttcagaaaccaagagggcttatgtgtgggaaagaaaccgagagggaaggaacgctttaacagatggaccccttaaagattcttctgcaagataaaagcaataagacagaaaatgaaaaagaggggagggggaagaattttttttaagccttagaaaggcattgttaaaaaattcacatttttctttttctgtgcacactaaaatccatgatgatttcatctgcactgttcctttgagggaaaaagaagcagtcaaggaggctgtctatgaatgcactggtcgggacaggcttggggcaagctgaaaaaactaccacatgacagagaaaaataatttgccaatatattttagagagtcttttcccataggaccagttattcaagtcatacgagtgcactctttttataaaaggatgtgggaaaggccaagagaattttgcattttatctgtgaagtccggcgagtggtggtaggctgtaatgtgtgagagtgagtgggtccccggcagaagggggcagctgaacgcgacggggagaaagcgcttctggaacttgggcttgtgacaggctgcctgccctctggtccttcagtgccctgctgcatttcacagttgggaagagtggagtgtattatatgaccccaaacaaaagttccattgcgctctcctcagattgcctgccagtgttgatgacctgaacatttaaatatgaatgaattgggggaaaggaccatctcccctggatcccatcaggccagaacaatcctctgttacccctgagtccctcttccctgacctccactacctgtccactggacctccctgcaccctctgccccaccacgtggccaggtgggcgttctaccacctagggctgtggcttggctgggtggaggggcggtgggaacactttttcaatcaattcatccctattgattgagacactgtgtttgtttggggtttcttttctcccctccaaaaaaggaagaaggtgaaaccaggagactgggcagagaaagaaaaaaaaatagtgaacaaaattaggataatttattttagaagagaaagtagaacccccgaaaatggtgatatttgaagagaggtgtctgtgaggaagctaagagcagaaggagagcagcctgtcagaaaacgggctgtccctccctccctaatcacagccctactcacagcaaactccctccctctccattcactcacttacttagggccaatcctttctctctctctctctctctctctctctctctctctcttcctttccctctctccctctccccctcccttccctccctctctccctctctctcccccttctttccctctctcttctctccccctctctcctctctctctgtctctgtctccctcccatcctctctctctgtctctgtctgtctccccgccaccctgtctctccctccctccctgtctccctccctccctccctccttccttctctcttactcggagacagtcagaactctcctccctgacagccacaaacctacagcactgactgcattcagagaggaacctgcaaacaaaacttcacagaaaactttttgttcttgttccagagaatttgctgaagaggagaaggaaaaaaaaaacaccaaaaaaaaaaataaaaaaatccacacacacaaaaaaacctgcgcgtgaggggggaggaaaagcagggccttttaaaaaggcaatcacaacaacttttgctgccaggatgcccttgctttggctgagaggatttctgttggcaagttgctggattatagtgaggagttcccccaccccaggatccgaggggcacagcgcggcccccgactgtccgtcctgtgcgctggccgccctcccaaaggatgtacccaactctcagccagagatggtggaggccgtcaagaagcacattttaaacatgctgcacttgaagaagagacccgatgtcacccagccggtacccaaggcggcgcttctgaacgcgatcagaaagcttcatgtgggcaaagtcggggagaacgggtatgtggagatagaggatgacattggaaggagggcagaaatgaatgaacttatggagcagacctcggagatcatcacgtttgccgagtcaggttggtgctggcattggcagggggtggggaggggtggggggtgggagggtaaaatatatttctttgacagtcccaggaggaacttcttttcccttcagctggaaactgcctgggaaggttattagttattaggtgatggtagcggactagccgacggagggcaggcaggggagggggagaggactttacagaaaaggaattctcggtcgagctctgcctggagatgactggcttacacttactaaacccagcgggtcacacagagaggaagctcggggccaatgttgagctggaaggcagactgtgaggggctgccttgccctgcctgtgaaaccagatctgagcagccggaggaaagccgcggcattttcgggtgctaggggagcagaggaggcttccggaccccatccaagtttttattgagggtagaggggtgaatgtaccaggattggagtggaatggcacagatgaagtcactctcttaaaacaaaccttcccctttaaaagtccaatctggggccacattggagaagcagggcatatttatgagtgacagtcatttttacctttagaaaatgtctataagtgcacaggcaccacattcaagacagggaagagctactttgggggacagttgtcattgaaccagcagttacttttgggacactgacttttgctctctgaaagaaaaaaaaataaataaaacaaccagttttgttctttctaaagttactaagagctctctgccaaggaacgcaaccttgacaaagtactctcagatactacgctgaactcactcaatccttaagaggaagaactttaataaatagattctaatcgttggcccaggaccacactaacctgttgctgaatagcaatacctgtcaaaagtatgggcccatggacttggagccaggctatttttatagttaagtgacacagatcctttgcatgcctgcaagcccatgcacgtcaggcacacagatgtgttaataccgtgttactttcatggtaatgccaggctaaagaattgcatcctttgccaactccatttgaaaggaatgccattgttttgtttggtagagcatatggccagtaaagtatgtgcagggactcccagcatttttgtttaaaagtttgccgcagcagtataaacaattaaggcaacactcagaatttccaatctgaaaacctgttgactcagatgttctgttttcaagaaaaccatgaaagaccagggcatctttccgggggtgcagatagcctgctggctgtgtggcttccccttgcaggagaagccctggtgtcctacaagcttcccagtttggctctctcaccagaagcctctctcacttagggaagatcctactttctttccctaaagctctttcttaacccagccccaaaaggcatgatcattaggactttatcttctggagctttttgaggaagaaagctaggttggaacttttcaagttgacacccatttttttttctcaacttttcatggtgggaaaaggtaaaaaagaaaatatttacaatatttggctgtgcatgtgaaacagatttcagtggtctagagggttgcttcctgtctttgtataccaacctccacacatgatggattcaatgacagctcgtatccagttgcctttaaccatgtcatatgactaagtatacctatgcctttgaccacttttaaccgcactaccgttactagcaatatgcccctctttctgacttactggacttgtatagcaaatcactctcttagcatttagagatttggcagtgaaaaaatttgaccatttacattctttcttatgtgtggtcttcctttctgtgacagtcttctctcagttgtatgagatcttgtcatttttttacttctcagttaggtgtttagtttgaaaaaaaatgagcgacttttgaaaaagcgattcgttggacgttcacattgagtcaagtttaagatttgtaatgggaaactcctggttgactttacaacttgactttggattcttagaaaacacttattacaattgcttatttttctctgagggatttcacacatcaacttcaagttgatttaatgtaatttcatgtatttaatgattgctgtatggactgtctactcttcaagcagaaaaccacgtgagcattttgctgctgattttgctagtccagaaaagacatttatcatccaaatgattgtagcaaatatatgaacatgaatagaaaagacctatgtcttgttgcttttggaataattcaactttaataacattccaactatgtggaatgtcaagagtttttggagaatagaaaaaggaatgcatttttctttcccttataaccattttgtgcagcatagaatccagacattgtcacccatgagcatgccacagatgcagacccatagcagcccctttcaacctcaagattcttcaatttgaggctacgtttaatttttgccttttctctccttgattgttggataaagccaaggcctggctacagaagtagagagcctccaaaagctgaagtgctgaggactcttttaactgagtttgtcccatcctgtttaggtagaaagtgctcaatttttgtaaagttgatgcgagttgttattgactaaacagcagggaatcactctaaggctctctgaaatgtatcccaacaaacaaaaattattttatttttatatatgtcacatcacccaagatttctcaccaaggttagtgtgttctttgcatggctggcacaaaaccctcaatgttttaccttaaggcctacagagttcttcacaaggaaagatagaagggatgggtaaagccaagctatcactataaatgtcatgaagctaaattcagtggccttttcagctgatgcagcttatttttattttattttgactcatgacagtaggtggtcaatcaatgcataataataatgtacctctaagtctccatatgctgtcaaacctggatgtgggttctggtaattagcttagcaattgatagcacttgttgtagaaagaatagggaaagaaagacaaatgacacaccaagaaatggatgtgctcacgtagcctaggtgttgttaagcgcaacacataagtctaccccttggaggatactatgtatggaagatttgagttagaagtttgcactgcccagacagggatccaagaagctttgcttggatgaccattttccccaccccaagaaagccatctcaaaatgaagctgactcccaccattccaatcccaccttccgaacttttctgtgaatcacccctcctttagggatgcctttaggggttacacgctctcttccgtgaataatggggaagagcggccacaagagggcgcgttccaaagacttttgctccttgtcagtgtatccagggaaaggcagttgcgcgtactggaagcccctgtctgtagcgccctaatcttggtgattatcagttaccgcctgctccctctcatcctgcagaaaaagttaggaatttatgagatgggagaagcatgactacctgtaatacattaaatgagacagaaggaaaggaaatggaaattctagtgatacatgtgaacattccggagctctatggaaggcagacgagtgataaatttcaaaagcaaacaaagcggagcagggagaaatgtgactatgaatcatcagcgatactgatttgctcacaagtctctccctaatacggtctcccgggtcgtaacaaaaacatcttccatctcccctgattttgttgcctagttttcctgccttatcaacagtttccaccagcgacaaatgacaagtgacttcaaacagggaggaaaaaggttctttctgtaatgccttgtgggaacatggtgttcggcttctgaggatgcgtttgtttccgaactgagggtgtggagagaaatggtgggaaagatgggaaaagagattaatagtggtctgcggcctgtgcagtggatggactgggctgggggtggtggagatgccagggtggaaagtccgttgtaatatttaaagaactgcagtaataccttcccaggcacttttcttgaaaacacatatttgtcttggcccctcttctgctaaaaaatacttgcacgtgatctcctagctgtagttctgaattcttcgtactcgactggttcctaagtccaaaatgagaagtgccaaagttctcaggaactttggaagaagtctctgaaattttgtgggttaaaccttaagaatttttgctacttgtaggaacctaaaacccctttctcccaaaatatttaacctttttcatcaccactttaatggaagaggcatggatgatggacgtttgtgccagggcatttataaatcaataatggaccctaaggagggaaattaaagctaaaaaattaatcaagataatttatggccaaacctatagttctactgcaggaaagatcctctactgtaggtcaaaggaggaataaccttaagacctcacttgctgctttctgcagaaacccctggaagcagtccaaatgcaaagttagggcttcagagaatgcaccctgtaaatggtagttgtgtatacccttaccattgactataccatatctaggcacagtgaaatcttgatgaagaatggaaaattaaaggaacagacgctttttacagggaggcttcccccagcccccatcccatggtaagtttaaatgtgttctataaacaacgaggctttccacattcacattagagacataactattgcccatatgtaaaagagcaacatattttaagcaggaccctggtgaggaaaacaaaaccaaatcgaaacactgcatgtgtgtgttgcttatttaactgaaaatgttcatagacccacaaatctgagatgctggacttttggatgagtccagcattttgcatcttagtgtagggggagggaacaacaaggggcttagttgcttaacccttgccatgccttcatgattgacttattcaaaacatttttaaaattctgaaagcaaaggaaaatgtgctgcaaacacccttccagctatctttccttccagcttacacagtctctcctctgtccaatccttcccacccagcagcatttcagaggtattccctgtgaggtacaaaatttctctttgcccatttttctgcacctctttttctctctctttggtatgtgtccaccaagctcatagaggtttaagtgatgaaatattatcacccacatgggtttgcgtgggactttcttagtgaattactcaggcagagcaggctgtgatacagccttgctcacaagcctcgggagggaaaaaatagcacagaggatgaaaagaatattattagagagcaggtaatgaaaggttcgcaaagcaaccagctatatctggttagctaggtaatagtgcaggaacctaggtcgcacctgtacaaactaatgcagaacctgctcacggcgcactatgggaagacattcatttcaagagtttacagcatgagatatttgagtaaaacctgaaactgattagaaattgatcctgaacatcccagccttagtcaaccttccctttttcaaattgttatgcatggagattggaggattggggcatcttgaaagtgtcactgcagtatagcaatctctctcaggtaatatagagataaagggaatataataaattgacctgttatttattatctttttcatacctaggacattccgaggcttaatatatttctgaagcctacagccctgataaacatcaatcccacgtcagtttccagcagtctcatctccccacacccttctgcaatgaaagctaatgtaaaagaaagaaatatgcactgcttaataagtcagaatacaatagaacttgtaaaatgtacctgcatataaggtagacattaggaagacttgaatctctctcttccccctgttctcctgagcattatggcaacagcattttcatgaaattagatctgttttatattttttcctgataaaatatcatgcaatatacaaatagcagttccagaaatggacaccaggagaaggaggcgacaggcatgtcaattagtagggggaaaatccaaatgtcagaaatatgggggagagagaaagcacgcaggcagtggatgcaaatacagggaacagagtctttcaattcagataattaaacggatgcataaatcagcacccttgcctctctacaatacgcaggcgatgccatgcagttaattatcagccaagaccagcatgaaagtcattttatgatgactctctgatcctaatataacagcacctgacagattgagccccctctaatgagtactctctttgtacaatcctctctcaggaacactaaatcatttgcttccaagtacagctgcctgtgaagaaggggtggggctagatcatgcatcagaaacctgctcttgtgaaatcaggggctgtcctgtaggctgtgtgactggaagccagcagcctcagcctctctggccctaaaaaagcaatttgcacacggctgtccctaattctagtcagccaagtaaccctccctcggcacccccacctaaacatctgtagtcagccttgggtgttattcatggaaagtccactgcatgcgggtcagcactgctgtccatcggcttcaccctgaccccttctggcaggtgtggatgagagtagagcagagctcatggggatgagttaccccaaacctattaagcctccctatccggggcactagtcagacactccagttttacactctttcctagaaaaacaaaacccaaccttgtgccctctgggttctctaatttagcagctactatctgtctgtttttggagtgacaccctgtgcagtttaggatttcagaagctgtcctgcatagaggcagaagggaaaacagcaggtatcttgttaacattctctatggggcaaggcagatgtgcccaagctggaggaaacctgcacaccctccaggctagttatccaaggcttgggaggtttccctcggccttctcctaaggccttggcaggaccctgccaccctaaaatcaactgctgattgcctttttagatttaaatgattaagctctgcttatgggaatcttcttctcttttattttgttaagaaacaaacaacaacaacaaaacccacaccaattcttagcaaaggggaatatcgaattcagattttgaaaaaataagtcatcatgcttcctaaaataagacagcttctccctctaactgctctctctgctctggtattctatctaatcataaacccagctttattattcatttcaactcctgccaaagacatgaggtcggagtcagaggaactccccttaccaccgccaccatcatcatggccagcatcctcgtaagtttatagaaagatgccagagaacctttcctatccatctgcagccctgcttggcccttgcctcagtgaatttaccactatcataatcacagtgtgcagagtgtgttaaattaagaacagaatccacagtacgcaatgcacagaaaagcctgccttctgctgcagagaacttgaaactgtgcctaaaatttatagtaccgtaaacatctcagggcctcgagtgataagtatggctggatttccgttaactatagaaatccaggcagggagatcctcccagggagttgcaagttctaagatgaacttcttgaagattgttcccagatttgtgcatgggatacatgtacagcagacagttgtaaggaggtccacggtcatggaaaagaggatatgtttctatatgccaccaagtgggaaaaatggaagtgagggaaaatatttgattaatcaaaaaattttagtttggatacctgctttcatagtaattgttgctgtgtcattaaacatacagttgcttaggaaaagagaaggaaataggtgactttctaattttagagttaggctggaactgagtggttgctaaattcaactgccctgacaatgtggggatttcctgtccattagcagcgattgctatttgacatatgtttctggtgcccattaatctgccctgtaatgggtcagaggcaaaaatgggggattcagaggtactaggtggctctcttaatttaatagaactcaatgctaaggacgcctctatttgttaataagtaatcaagtcattggctactttctgctaaacactagactatgatagtgaccttagaccccgggcattctaaaccaggctggcaggagggtggtggtggaggtgatgtgaggtaagcctcctagaggaactgtcatccaaacaatctgaaaattgaaacattattaaaggcagcactaagggtggtatgttggagttggggcaggagcacttaaggcagaaggaacagcaggtgtcactgcctgcagttgagaaagggggtggaattctcaaggccttagaccccagagaacaggactgggcaagagctgacattcaagggaggaacagcatgtacagagcccaaagtcccagccactttctgttggatactgagcaataggaattcagtaaaggactttcaagaagaagtgatgtgatcagatccacctgtgggaaagatgcctttagctgcttcatggagaaatgactggagaggaggccttccttagtgttgcagaggcaaagtaaagaaaatgctgctgcagtgacccagcaaagaggtgatggcggaggaatcaggctgtgacaagggaagaagaggctggctcaagtgtgtctcgactgcacagacttacacagcgaggtggggccaggggctgcatttttgtctgagaatagtatttccttagctttctagagcttacagtgtctttttgtttatgttatctcatttgaccttcctaaacctgtgagataacaggtcaaatgtccttatgtcattcccatttttatagaagatgaaactgaggttgagcaattagtcaacagacacagactcgcaggccctcttcattctaaagcaagggtccaaaaccttttttctataaagggccagagagtaaataatttaggctttgtgagccaggcagtctgttgcagctacgcagtccttggttattatagtgcaaaaacagccataggcagcatgtacagaaatgagcataaccatgctccaacaaaactttatttacaggcactaatgtttaaatttcaggtaattttcacatgtcacaaaatatcacttttctttaaccacttaaaagtataaaagccattcttagtttgcaggcagtacagaaacagtttcagcccatgggctgtcatttgttgacccctattcaagagggtctgtcacagaagactcctgcttgcctgaaatttacgagtgcatgtaaatgttggaattaacaggtgtgcctgttttctcttatgctgtctttcatcttcaggaacagccaggaagacgctgcacttcgagatttccaaggaaggcagtgacctgtcagtggtggagcgtgcagaagtctggctcttcctaaaagtccccaaggccaacaggaccaggaccaaagtcaccatccgcctcttccagcagcagaagcacccgcagggcagcttggacacaggggaagaggccgaggaagtgggcttaaagggggagaggagtgaactgttgctctctgaaaaagtagtagacgctcggaagagcacctggcatgtcttccctgtctccagcagcatccagcggttgctggaccagggcaagagctccctggacgttcggattgcctgtgagcagtgccaggagagtggcgccagcttggttctcctgggcaagaagaagaagaaagaagaggagggggaagggaaaaagaagggcggaggtgaaggtggggcaggagcagatgaggaaaaggagcagtcgcacagacctttcctcatgctgcaggcccggcagtctgaagaccaccctcatcgccggcgtcggcggggcttggagtgtgatggcaaggtcaacatctgctgtaagaaacagttctttgtcagtttcaaggacatcggctggaatgactggatcattgctccctctggctatcatgccaactactgcgagggtgagtgcccgagccatatagcaggcacgtccgggtcctcactgtccttccactcaacagtcatcaaccactaccgcatgcggggccatagcccctttgccaacctcaaatcgtgctgtgtgcccaccaagctgagacccatgtccatgttgtactatgatgatggtcaaaacatcatcaaaaaggacattcagaacatgatcgtggaggagtgtgggtgctcatagagttgcccagcccagggggaaagggagcaagagttgtccagagaagacagtggcaaaatgaagaaatttttaaggtttctgagttaaccagaaaaatagaaattaaaaacaaaacaaaaaaaaaaacaaaaaaaaacaaaagtaaattaaaaacaaaacctgatgaaacagatgaaggaagatgtggaaaaaatccttagccagggctcagagatgaagcagtgaaagagacaggaattgggagggaaagggagaatggtgtaccctttatttcttctgaaatcacactgatgacatcagttgtttaaacggggtattgtcctttccccccttgaggttcccttgtgagccttgaatcaaccaatctagtctgcagtagtgtggactagaacaacccaaatagcatctagaaagccatgagtttgaaagggcccatcacaggcactttcctacccaattacccaggtcataaggtatgtctgtgtgacacttatctctgtgtatatcagcatacacacacacacacacacacacacacacacacacaggcatttccacacattacatatatacacatactggtaaaagaacaatcgtgtgcaggtggtcacacttcctttttctgtaccacttttgcaacaaaacaaaacaaacaacattaaaaaattgagaacaagtatggaaagaatgaaagatcaaggaaaaaagaataccaagttacatttcgttaaggtgcttatgatcttagaactatgcaacctaataggtttgaaactgtttacctgagagagaacaaaaagagagacttttttgtattggaagtaatctgattaatttttattttcttcaaggagagatacttgaaaggaatatgtttgtccatctgttggatccaaacatttctatattttgtaaatgttgttgttgttttttttttaatcgtttactatttgcactacaatggtgtttga

SEQ ID NO: 8180 - DNA, 2780 bp, Homo sapiens
tgtttttccaacttagtgtctattggaatcaatcttaaatcagaagctttttcagaaaaataatatttaggccagaattagagttgagtgtattttttaaaaatgattaaggcttggttgtgagaaatattacctgtaccagctgggaaaaataatgtcatcactaactaaaagataattaatttgagagaaagtgttaagagagggagagtaaggaagagaacagttaagaggaggcagaggtgagggcagtagtaaaaatctctaaaattttaatttacagccaaaattcttcatgtgtaaatttgtattgattcagatgcagaaatgaaaaaaaaacacctttgttttataaatatcaaagtacatgcttaaagccaagtttttatctagtttattctagtacttagcttgcctggaatagctaataaattattcatgtatgtgcttttgaaaatccagagccctatttttacacacttgtgtgaagttggcaaacattttgaaaaatggaaaaaagtttctaataattgggaacaattacattaattaatattttgtaaaatattgaagcttttagccctatgtcaatttgtagattaaaataaattaattataggaaaggaagataacagtgagaaaccaaacattacaaaaggtggtttagctctccttgaaaaatatactaagttggtatactataacacttggctatatgtaggcaatgtcactactgggcaaatacacttactgtgttctagaggcagccctttcttatgcagaaaatacaatacgcactgcatgagaagcttgagagtggattctaatccaggtctgtcgaccttggatatcatgcatgtgggaaggtgggtgtggtgagaaaagttttaaggcaagagtagatggccatgttcaactttacaaaatttcttggaaaactggcagtattttgaactgcatcttctttggtaccggaacctgcagaaacagtgtgagaaattaagtcctggttcactgcgcagtagcaaagatggtcaaggccatggaaaaagcagaaatttaccaagaaagctgatacccatgtatagttcccactcatctcaaatacatctgctatctttttaagctaagtcctagacatatcggggataacatgggggttgattagtgaccacagttatcagaagcagagaaatgtaattccatattttatttgaaacttattccatattttaattggatattgagtgattgggttatcaaacacccacaaactttaattttgttaaatttatatggctttgaaatagaagtataagttgctaccattttttgataacattgaaagatagtattttaccatctttaatcatcttggaaaatacaagtcctgtgaacaaccactctttcacctagcagcatgaggccaaaagtaaaggctttaaattataacatatgggattcttagtagtatgtttttttcttgaaactcagtggctctatctaaccttactatctcctcactctttctctaagactaaactctaggctcttaaaaatctgcccacaccaatcttagaagctctgaaaagaatttgtctttaaatatcttttaatagtaacatgtattttatggaccaaattgacattttcgactattttttccaaaaaagtcaggtgaatttcagcacactgagttgggaatttcttatcccagaagaccaaccaatttcatatttatttaagattgattccatactccgttttcaaggagaatccctgcagtctccttaaaggtagaacaaatactttctatttttttttcaccattgtgggattggactttaagaggtgactctaaaaaaacagagaacaaatatgtctcagttgtattaagcacggacccatattatcatattcacttaaaaaaatgatttcctgtgcaccttttggcaacttctcttttcaatgtagggaaaaacttagtcaccctgaaaacccacaaaataaataaaacttgtagatgtgggcagaaggtttgggggtggacattgtatgtgtttaaattaaaccctgtatcactgagaagctgttgtatgggtcagagaaaatgaatgcttagaagctgttcacatcttcaagagcagaagcaaaccacatgtctcagctatattattatttattttttatgcataaagtgaatcatttcttctgtattaatttccaaagggttttaccctctatttaaatgctttgaaaaacagtgcattgacaatgggttgatatttttctttaaaagaaaaatataattatgaaagccaagataatctgaagcctgttttattttaaaactttttatgttctgtggttgatgttgtttgtttgtttgtttctattttgttggttttttactttgttttttgttttgttttgttttgttttgcatactacatgcagttctttaaccaatgtctgtttggctaatgtaattaaagttgttaatttatatgagtgcatttcaactatgtcaatggtttcttaatatttattgtgtagaagtactggtaatttttttatttacaatatgtttaaagagataacagtttgatatgttttcatgtgtttatagcagaagttatttatttctatggcattccagcggatattttggtgtttgcgaggcatgcagtcaatattttgtacagttagtggacagtattcagcaacgcctgatagcttctttggccttatgttaaataaaaagacctgtttgggatgta

SEQ ID NO: 8181 - DNA, 354 bp, Homo sapiens
cggatcttactatgtcagttgttggttgtggtcggaaggttctggagtcatagtaagggccagcaagggtgatgtttgtgcctcagctctaatgtcgaaaagagcgtctgtggctaccttagttgctggagatcccacacgtggccagagccagaggtggggctagagccctggtttccttcttctgcttcctgtcatgtgctgaaagagctgtgtaggtttgaccacattttattgagtttttctttgaaaataatttggcttataagaatcatgttttggattctttaggaactttattttttttttcaatcatttcattggattaagcatggttgatggattactttatcc

SEQ ID NO: 8182 - DNA, 238 bp, Homo sapiens
tctgacctcaagtgatccaccctcctgggtctcccaaaataatgggattacaggtgtgagccaccatgcccggccatttttggtggacctttttatggggctaaacgtctggtgtcttgtggctacagaagaccagtacttgcttgaggaggagacctgagaggtcagctgttctcaggtggagttttgcccgcattcccctttgtagttgcaggcatcacccccattgtccccaccc

SEQ ID NO: 8183 - DNA, 22645 bp, Homo sapiens; identical to SEQ ID NO: 7673

SEQ ID NO: 8184 - DNA, 368 bp, Homo sapiens; identical to SEQ ID NO: 7674

SEQ ID NO: 8185 - DNA, 374 bp, Homo sapiens; identical to SEQ ID NO: 7676

SEQ ID NO: 8186 - DNA, 298 bp, Homo sapiens
ctgggtagggcagggggaaccgacaggccggtgtccccagccgcaaaagagctgctgaactgtccgtttaaatgctgctgggagactcgtaaaaaaatcatcgtggacctggaggatgagaggggcgagctttatttcggtcggattgcggtgtggtggtttagctgcaaggggatgccgcagccccagttgagggggaaaatagttcttaaaaagcatatgcccccctaaggaatgtctctaaagaaccaaatcaaagctgctctttggaaggtatgaatagaatttaaaaaaaaaa

SEQ ID NO: 8187 - DNA, 166 bp, Homo sapiens
ctttcctcgcagcataagaaggtatcgctttcctctgaggtgtttaaggctttaatgagtataattttttgcacagatgtttctgggtgtttgcaggttttcagagtatttttatattacaaagaagctagccagtgccatagctcaaactctgacaagcaaatag

SEQ ID NO: 8188 - DNA, 9903 bp, Homo sapiens
atcaataatgcagcttcaagttctggggagaccgcagggggccccccagctggctccccaggccttggctctaactcccaccctcctcccagccccaggagaacacgattctccatgctcattggccagtttcccctaaaccctccctccgagcacccgggcgccagtcccaggcggaggggacgggctggggaccccaaagctgggaccggagggtgagcccggcagaggcagagacacacgcggagaggaggagaggctgagggagggaggtggagaaggacgggagaggcagagagaggagacacgcagagacactcaggaggggagagacaccgagacgcagagacactcaggaggggagagacaccgagacgcagagacacccaggccggggagcgcgagggagcgaggcacagacctggctcagcgagcgcggggggcgagccccgagtcccgagagcctgggggcgcgcccagcccgggcgccgaccctcctcccgctcccgcgccctcccctcggcgggcacggtatttttatccgtgcgcgaacagccctcctcctcctctcgccgcacagcccgccgcctgcgcgggggagcccagcacagaccgccgccgggaccccgagtcgcgcaccccagccccaccgcccaccccgcgcgccatggaccccaaggaccgcaagaagatccagttctcggtgcccgcgccccctagccagctcgacccccgccaggtggagatggtaaggggcccgtgccccaccccggcagcgtacccgacacaccccgcggggcttcttcgccctcccaaggcgctgccccggccggactggcctgggggtgggggcgcaaggagagccgggctctgcctcggtcaggacggggcgcggggccgcgtgtgaagttagctggagactcgtgcaacttttccccgcggctttggtcctgatcccggggcaagagagttcctggcagtgaggctgggggtgcgggggtggggggacaggccgattccagaccgcccaggagtggggtgggggcgtcctttggtcccagcacagtccccaaagggtagtcagtctcctaggctaccaccgggaccgctccgcctggctctgtcccagagctggtcagatgtgagcagcggtggacactgaccttgtcacccagggcaggagtatgaggctgccaccgggtgaatccactaccctgcccctctctaatcccgcgtgtgtgcctgggctggggtctccagaacctggctctggcctcctgctgtcaggccccagagccccaaccccaaggagggagaggtggggagtcatcacaaagccagacctcttcccacagactactgagtcctccctgagggccttcttgggggttgaggggcttccaaaggctggcgggtgctgtgacagagagctccacttcccatccctagtggagcaggggtcacttgttgctgagctgagatgcagctggctccccactgagcagtgatgagggggccaagtcattatggggggagatagagggcagggggtacagtcctgggcctaagcagctttgggtcatgagggtgtcatggggagcttggctggggaggtggcagtttcagcttaactcacctggttctctttgtgcatttccctggagctcaacagggacctaattaactgacagttggtctgattgccaagctgaggggcggggcggggaggggggcggtcagttgctgcttggctcacgtagcaaggagggcaacttttcatttctcacaaggactgggtgaagagttctgcagccttacagagactggaaaagaagcccaaaccaaggcccccagagaggtcccccaggcccctttgggtccctgagcctcagctggaggtggggggtgcctgcagtgcgctggctcagtctccttctgaaaagctggatccagcttgtttgaagcccttgagctgatcttaggtgggcagggccacatgggtgccatggcccgtggggcatcttccccagagggcccagccgtggcagctggagctgtagccagctttggcttccgaggtctgatgttttcagaaactggagagaggaagggccttggtgggagaagataggaagggagatgtctgttctggagtagccatggagtgggacaggcatgggctgggagtcagtgactggggtttttctcgtcctttggacttgttgtgctgtgtggccttaagcacattgccaaatctctctgagccctgctttttcacctctgtaaaatgagggggttaggtgagctacagagttccttttggctctgacagactttgattcaaaggttccctggggactccaaagcactgtttgttccctgctgcctgggggtgggggagggctgcaggtgtccatccagtcacccctccctccatctccttagatccggcgcaggagaccaacgcctgccatgctgttccggctctcagagcactcctcaccaggtaggcccctccctgcccacttagccctggccccaccctagctctgatgccttcctaggggccctgccaaagtcccatgaacaggagtcaaagctggagactggggagtggataaggtctgggaacccaactctattggctttatttattgacatgacacctcccagccgcaggagggagagggcacactttccctgtccccagagattgagaccctggggaaaataactcggattctttctctctctccctcttctcttttcctcctcgcttggttctggttcggttggctttggtggccttcctcagaggaggaagcctccccccaccaggtgagtttcctggggcagctggaaggagggatgcctgggccccttggggtggggtggacgggtgcctgcagtgacaaccaaccagtatggggtgccacccaagaggacacattagcatatcaatgggcagtcctctgagagtgcctcatgccagggtgccaccagcagatcctcctctgctcagactcagggtggaacctcctggacctagagtcctgccctgaaccaggccatggcttatggggggccccccctaaagccacagggtggggaggctcagcctaggtgcaggacccattagcagtggctaaatcagtctgcttgggtggccatgggtgggatggaatggagggatggtgaaggcaagggcctctgctgagcccctttaacctggcacttcccctggcagagagcctcaggagaggggcaccatctcaagtcgaagagacccaacccctgtgcctacacaccaccttcgctgaaaggtactatacccccaccgaccttcctggctgtccgcctgatccctggaactgggcagacgctaggggagcttttgtcagtggggagggattgtttcgccacacatagcccgctgtcagcgtggcgcaacaacccaacgtaaagaccaattttttctcagtctggccttgcaaaacacaggagtcccgaggctgcaatgggcagctatgggccttaacatcgggttgtgggcttgaaagaaaagagatggctggcctaagacaaccagcaggcatccgcgtggaagggactccacctgcagctcctcttcaccagcctgtggtggaccacctcccacccctgctcatccagggcgccttctcctgtgggcttcacccctggcctcccctcccatttgcatcccatttgcacagatctgcacactggtctcctctttcctgcttccctttctccatggaaaagcaagccattccttttgcacacttactcaacacctagtatatgccaggccaagttggtgggcattgggcagaataagatgagtcagatttggtccctgcccccttggggctctttgcctcaaagggtcagggaggggccaagtaaggtggctcacacctgaaatcccagcactttgggaggccaaggcgggaggactgcttgagcctaggagttcgagaccagcttgggcaatacagtgagacccccatctctatgaaaaatttacaaagtgagctaagcgggccgggcgcagtgactcacgcctgtaatcccagcactttgggaggccgaggcgggcagatcacctgaggtcaggagtttgagaccagcctgaccaacatggagaaatcctgtctctattaaaaatacaaaattagccaggcgtggtagcgcatgcctgtcatctcagctactcaggaggctgaggcaggagaatcacttgaacccgggaggcagaggttgtggtgagctgagatcgcaccattgcactccagtctgggcaaaaagagcaaaactctgtctcaagaaaaaaaaaaaagtgagctaagcatagaggtgcacacctatagtcccagatacttgggaggctaaggcacaaggattgcttgagcccagaagtttgaggctgcagtgagctatgatcgcaccactgtgctccagtctgggctacagagtgagagcctgtctcgggaaaaaataaaaaaagaaaagggtcaaggaaggtacacaaagatgtttaagcttggatttgaaggatcataggaatttaacaggcaggcaagggcatcccaggtccaagaagagggaagaaggtgtgcaaagagaaagagatgcgagtcagagggggacttctgggccaacctggaggaggcttcgtttctagtcagggagctggggagatatacctgaaggacataggagggcctcttcctgactaagccctgttgcctaccaaccccccacctcaactcctgcctggggctcttcctgcccggccagccccctccgctcctgcggaggttgggagggagagctaccggaagagtatgctgggaagtggttcgggggagggtttaataagttcccagcaccagccaaggtcaacaggtatacctgtcagcccacttgccagggttgggaacagagaggagaggctgggaagggaggagagaagggaaggggttattttgctttccccaggacaggaaaatgaagggtcagagctgcagcaagtgggcagtgtggctcagcacctggaaggacctccccacctagaggggtgtgtggaagggccccaaagcaggcatgagggacagagtgtcatcttctcaggagagaatttaagaaatccctctccctcccaccttgggctgggtagggagaggctgggtggatgtgaggggaagacctggctcttgactgcaagcatgggcgaacaggccaggatgaagatgttagggccagggtgctaccatgcaccgtgcagtggtcaaaattgtgcaccccctcaactgcccctttaggccacatcttaggagagtccaggtgagtagaggcagggaagaggaaagggatcaggagaggggtggccagtctggggcaaggctggggaccttccaactgaagaaggaagacttgtggtggggggagtttggggccccacagagtggggcagagaaggagacagcctggaaggagtgatggggagaccccagagagcccaggaggcatgagggaggtgggggaagcgagggaggctcacggggcaccagcgcaagcaccgcacacaccttctgttgtcactgtggctcacgaagtgaactctcctcccccgctgggggagaaggaagctgcctgggctgccacctgctctcctgccttacctccccccacagccctcatggatccttctctaccaggagggcactgttttgtaggcttcagtccttttgtgggcaagggaaggtgcccggcagggttggggcttgtcagggaagaatcgagggccttagagagaggggcacagcactaagtcttagcttgaggggttgtgctccaaggctggagctctcacacttggctcaagatgaagctctgccgcgtccccaaggtcagggtagggtgatttattgtgcttttattgcctggatagcttgcccagagccagcaggaggtactgggctgggagctgggggctgggtggggcagcgggcacatacaaagcaccctctgtgcctgtccccgagttggcaggagcatagcaccctgctcactgtgccggaggtttccagcctggccctacccctctgggccttctgaggggaggggccactggcagaccaagaaggaactgcagcaactcccccattccccacccccagcccctcctcagcatcttgtctgtggcctgtgaactttgtgtcgcatatgttctaagatcctgccagctcctgcagcctctcctcagtggcccctcaacctctgccatcccccagaacccctggccttggcccctttctctaaccccttgctcctttccatcttttggaaacttgtctccagctgcccacactgttcccttcccagccctatctgagcaggtctttggaggctgggggggttgctttctaggtcaccgcagagggagctgggaacctggggatgtgggtcaagattgtgggggccgcatctgagcatgccgcatcccccggcacagactgcactggctgcagactattatgtcctcagcctcggaattgttctgtcccttggagcccggggcaggagtatgtggattggcatctatgactgggcagtgccagggagtggggactatgcatcgcatgggaggtaggatcagggtaagcagtgagccctcagcaggctgggcacccccaagaaatggaaagtggcaaatccccaggccctggttcctacgccctgtgccttctgcctgggcttgaagctgggagacactgtctcccgtactgggtacttggaaaatcaagctctccagccagggaatgttaagctgctgctgtgcccgcctggtcttgcccagcctagtgccctatggtgtgggggagctgcctgggggctagcatcttaggacagcttaagagccaaacatgatcaaatctacccctggctgcctctgccctggtctgacacccatcaggctgacctgtcaactttggcctttgaacttgggcccctgagggggtattctctgccccaggcctacgggaaggaggctgggggctaggccacaggctatctccagatccatgggctgtgtctagctgacccttgctttcctcggtctcctctgtgccagctgtgcagcgcattgctgagtctcacctgcagtctatcagcaatttgaatgagaaccaggcctcagaggaggaggatgagctgggggagcttcgggagctgggttatccaagagaggaagatgaggaggaagaggaggatgatgaagaagaggaagaagaagaggacagccaggctgaagtcctgaaggtcatcaggcagtctggtaagctgaggggcctgtgacatgtggattagctgtgggtcctccttgagtatacgaggacgtccccttctagttcagtgtctcatacacgcaaactgtagtgacaccacaggggcctccctgtcttctcgctccatggggtgccccgaactcagccctacctgagacatgggtttcctccatccttggctcagtccctctcccaatcaggttttccctaataattcctctcttccctgagaattaaggccaaggccgtttggggtttgaggctagagccaaaagaggacttcccacctatggcagtaagggggcgtgaggacattcagggatggaggaccaggagagtccaacacccctgtcacctgcatttcacctacatttttgaacctaggatgtggtctctgctggggtgcagagggctgcctcatttacttgccctctccaggactgttgtctgtttctcctctttttccttcctaggatggagtgggagggtgccctctagtgtttagatgtagaatttaaaattcaagaaccagcccggcccattaacctttttagtctcattatttatgggaatactgaagagtcaaccacccctactagaagctgtcagctcttccacacaaacaaaaggccttgggcctcctgcctgcatatctggcagtgaagagattggccatgggggcaaaagctgttgctgggcttcagtccctttgtgggcaagagacagctggaagacctgaatcagtcctcactgagacccctccaaaacagtggaagaggggtgagaggagactgttccctcaggaaaagcagcaggtggctgggtgcggtggctcatgcctgtaattccagcactttgggatgccaaggctagcggatcacttgaggtctggagttcaagaccagtccagccaacatggtgaaaccccatctgtaataaaaatacaaaaattagccaggcacagtggcacacacctgtaatcccagctgcttgggaggctgaggcagaagaatcccctgaacctgggaggtggaagttgcagtgagctgagatcgcaccactgcactccagcctgggcaacagagtgagactccatctcaaaaacaaaaacaaaaaaccaaaacaaaacaacaaaaaaaaacaaacaaacaaaaaatgcagaagggcaccgggtcaaatgatagtcctatgatggagcaatataaaccaccacgactcctagtggctcctgggtgctggcgctgggctgggcagggtattcactattacatcttgtttaaggtaatctacacaatttccccctttctatttccttcagaaaggtactaactgacttacgtaagccatatggctagttgctgggagagctgttctagcccagttctctctccatgcttccatgatgcccctggaaagcttaacctcagccatcagacacttagctcacactccaggacagccggatggatacgcagagcctgtgttcttatctcttctttcccatccccagctgggcaaaagacaacctgtggccagggtctggaagggccctgggagcgcccaccccctctggatgagtccgagagagatggaggctctgaggaccaagtggaagacccagcactaagtggtaaggcttgggagtgtgaaatggggaggaggggctgggatcttggtgggtggggccaggccctgagtccctctctgcttgcctttcagagcctggggaggaacctcagcgcccttccccctctgagcctggcacataggcacccagcctgcatctcccaggaggaagtggaggggacatcgctgttccccagaaacccactctatcctcaccctgttttgtgctcttcccctcgcctgctagggctgcggcttctgacttctagaagactaaggctggtctgtgtttgcttgtttgcccacctttggctgatacccagagaacctgggcacttgctgcctgatgcccacccctgccagtcattcctccattcacccagcgggaggtgggatgtgagacagcccacattggaaaatccagaaaaccgggaacagggatttgcccttcacaattctactccccagatcctctcccctggacacaggagacccacagggcaggaccctaagatctggggaaaggaggtcctgagaaccttgaggtacccttagatccttttctacccactttcctatggaggattccaagtcaccacttctctcaccggcttctaccagggtccaggactaaggcgtttttctccatagcctcaacattttgggaatcttcccttaatcacccttgctcctcctgggtgcctggaagatggactggcagagacctctttgttgcgttttgtgctttgatgccaggaatgccgcctagtttatgtccccggtggggcacacagcggggggcgccaggttttccttgtcccccagctgctctgcccctttccccttcttccctgactccaggcctgaacccctcccgtgctgtaataaatctttgtaaataact

SEQ ID NO: 8189 - DNA, 431 bp, Homo sapiens
ggaatctggggtgagaggaaaacatctacgcattccggtagctctgcgtctcagtgtcatcccgtgtctccccaacttcctttcgaaacggccgtgaataacttcctaattggtattaaaagggccctttgaagtcttgagttcttagaggtgcatagtaccattgacactcatttctaatgacacgttccctcaccccgcatttttgggttagtcaatgtctcctggttttcttcgtaccgctctgacagtcggtcaaagtcccgcttcacgttttcctctgtcgcccaacccctcgctctgtacactgaatctcagtggtcttattttcccccacggcttcagctttacaccaactaaatacccagatccacatcttcagcgcagcccttccctggagctccacgcttgcccatccagcggccattggg

SEQ ID NO: 8190 - DNA, 323 bp, Homo sapiens
atacatcttaaaatcagaacactgttccctaacagtcatatatatatcagtgaaatcgaattcattttaaagaaatttaattattcactgtagtttaatttactatatctcttaattctaaggtgttgaatataaattaaatttagatgttagccagatatcccattatttcacttatcttaatatgatacatgtaaataattctttagtcttagcttctttctttgatagtaaactcacacatatttgtggggtatttttatttaaaatgtgttcaatttttaattatataaagtaccacctctcttttcagccatgtaagt

SEQ ID NO: 8191 - DNA, 294 bp, Homo sapiens
gcaatgtgcacttcataacgtgtttaaaaatgtaagttacgtgcttctgcatttgtcctggaagatcgcacgcacttaatcaaatcacactgtctcacaccgggtttccaaaaactgacatacacccaagcaacatttccgacaacatggtaagtagaaaattgtgattatttccttacataattatttcagagaattttgagtaaatacagacattcccactgaaacttgaagttataaaacatgtactacacagctctgaggttctatcttggctctgaaataccacctgtg

SEQ ID NO: 8192 - DNA, 226 bp, Homo sapiens
tgatcaggagctctggtcccagggaggaaactgggtttatgtggaacatttaatagccacataaggagacaatgaaagaagtgaccctcggcagagcccacctgttgccaaatacatggcttttccagttggggctgtcagaccagcgggggccaggggctccccaagcctggtgtcagcaggagcccctccaggttcgctcaggggaaaggggctttgttggaag

SEQ ID NO: 8193 - DNA, 168 bp, Homo sapiens
atcccagcactttgggaggctgaggcgggtggatcactaggtcaggagatcaagaccatcctggctaacgtggtgaaaccccgtctctactaaaaatataaaaaattagccgggcacggtggcaggcgcctgtagttccagctactcgggaggctgaagcaggagaat

SEQ ID NO: 8194 - DNA, 11127 bp, Homo sapiens
aacttaaatatattctttcccccaacagggttaatcatctcattttagtggagccttggggtttccctgaacgaccagaccttgctgatcaagacagaccaattccagtttggatcagagccttgggagcagcattgactccctttaaccctttagctggcctaaggattgcaggaccctttggtgagtgcttatgttctaggaaagcaaaatgtttgtaagttatgagaagagcagaattcactattgttagtcaaaatcttaaaaacaaacaagaaaaccctgaacccttactttttctcctcttcctctaataagtaccatgtcttgcacaaagacgaatgcaactaggttcttctcctcaaaggagagtctttatattgtaaacattgtgaataattagcaaagcagaaaaggagggaatgctgaggataaggttagtcagtcctcaacactctaaaaaaagccaggcaagcagagtgttttggggagtatataaggacctctgctagtccagggcctgggagaagtgtagcatgttgccctgctggtgagcactggagagcgtttggccaattgatgataccatttggtaccataaaacctgatttgattgaccctggggataacaggtaccaccacactcacagattcttcccttatccatgtcagagtgttggaaagataaagttattttttccacaacattttggggactcctgatatatatttctggtcatattttgaggcaccagtgtttagtccctgattgacttttatttgactctcagcagttctgtctcagccccatagccatgggaatttccttccctcattgtcacagataatgatgttctgaacttctgcctttcccccgtacaacttgtatgaatttggagtacttttagttgtaagtaactgaatacccaagaggcttaaactagaaggacttttattatttccttaataagcaatctggagataggttttagcacttgttctggttgcttgctcattgatgttagggtttgggtctgtgtctgtgattttcttgacttttttcctcacggtggtttgatgcctgccatagcattaagcatcatctcacaaatcagcgccctgagcaaaaagaaataaaagcacgaaaaatggtccttctctccataatgctttgtcagggaagaaagtcctctctggaaggctccacctgacctctgcttatgactcggcccactcctagtccttccaccagcaaagaagaaatttctgtgatgcaccaatcatgatttgtttccagggcctgctttcctgggcatgttgctgcctaattgatactatagaaaagatgcgttctaaccaggtgctgtggctcacacctgtaataccagcactttgggaggctgaggtaggcagatcacttgaggccaggctttgagacaagcccggccaacatgacaaaaccccatctctactaaaaatacaaaaaaattagccaggcatagtggcacacacctgtaatcccagctactcaggagaggaggctgagacatgagaattactcaaacctgggaggtggaggttgtggcgagccaagatcgcaccactattctccagcctgggcaacagtgcaagaccctgtctcaaaaaaaaaaaaaaaaaaaaggaaaagaaaagaaaaaagaaaagatgggttctgttagtgagaaaagagaagaggcatgggggtgtggaggaggttgtgggattaactgtcatgcaggtgactgtaaatgctgttcccttctgcccaaccctgacccctcctgccctagtgccttctgtttggattgggagagcagtgggactgcaggacttagaggaggatatgggggttgaattggtgaccacactttattgcttcagtgctcacagatggcacattttgcccacctgcagtctttcagccctccccagtagagccactccttagtatgcctggtccttctctggtaaactacttaagagcttcatttagtctttatagtcctgaaatataaatagattttactagaacacaggtacaaaaataacaattatgggaaaagtaaagtatgaagagaaattaggagacagtgatgggcaagggaggacacctaggagaggctctttaatgccatgccctcagcctgccattattgcttgcacttgggggtggggaggtgatgtagaatcaattgcatgacagaatttcttggtggagctgtataattcatcagagatgggaagagagggccagtagagaagtaaagccttgctggagttatggggtagtggtagcagaaagggagaccagtcagtctctggggcctcagaatagaaaagtgtgactagaagaaagcttctgctcttcatcctctttcccttgtgggccttgccctgggctttttcttttcttttctttctttctttctttttttcttttttttttttttgagacggagtctcgctctgtcgcccaggttagagtgcagtggcgcgatcttggctcactacaacctccacctcccaggttcaagtgattctcctgcctcagcctcctgagttgctgggattacaggtgcacgccaccacgcccggctaatttttgtatttttagtagagacagggtttcaccatgttggtcaggctggtctcgaactcctgaccttgtgatccgcccacctcggtctcccaaagtgctgggattacaggcttgagccatcacgcctgggtgtcctcggctttttctagagtggggctgtgggcgccaccagggataaccttagcagggagtctcgctagtgtcccaagaagaagctgaatttattttcacacagaaataattatgtataccagtttacttcatttagaagttaatgtgttataattatggaagaaatacaagttattacattaatttttacgtacgagctactcgccacgtttaaagaatttatttacctacaaaagtgccttctaacttacatgtttttgaggccctaaagtacatctgcaagtcaaaatacaatactctttacttcttatattaatatttccttggggaactttaggaggacagctatcagaatgtgtgctttttcccacctacaatatatatttgaatacatatatatatgtgtgcatataacactcattacacagacaagcactaaaactttctatattatttagttgataagttaactataatttaaaacatgcattttttaaatttcctgttaaataggtttaagtctagtgcagcgtttaaggcctgatttcaaacgaaagtattcttcaatgttcgaagacgatactgtgacagaatacatctaccactgtaatgtgcagactccaaggtgagggttaggattctcaattcactctgtgtgtgtgtgtgtgtgtgtgtgtgtgtgtgtgtgtgtgtttgtgtgtgttttagactattttttttaaaactatttatttatttatttattcattcaatacggggtttcgctcttgtcacccaggctggagggcaatggtgcgatcttggctcaccacaacctccgcgtcctgggttcaagcaattctcctgcttcagcctcctgagtagctgggattacaggcatgtgccaccacgcccggctaattattttgtatttttagtagagacggggtttctccatgttggtcaggctggtcttgaacttctgaccccaggtcatctgcccgcctctgcctcccaaaatgttgggattacaggtgtgagccaccgtgcccggcctttgtttaaaatatatcagtggtccagaagatttgtatcagtagttaaatgactgaatttaaaaggacaagtgtctaatacattttattttactcatctattcttagagtacccactgtataaaacattgtgctgagttctgatgggggattaagaagtaacatgttcactcttccctcaaagttctcatgaacatgttgagaaagtcttggtcttgggcatctccaagagatggtttgagttgagagttgaagaatttcacataaagaagtatttcccaaactgagtatgaatgtttcaaaaaaagaaaaaagggtgctggattaaacaaaagtaaatgattgtctatactatgaatcctcttagaacctttactataccgaagggtattgaatctcccaagtgaatgggagatgctatgtgtatttttcaagttcatttgatgattgtactcctgaacaactctaaagatctgtaggtcagcattagaaatgcagctgcagagggtgaggagtaagtgagggattctgcatgtattttgacagtgattagaaggagagagagagaatggggcatagtagcagagggagcaagagggccaaatgtatgttttaaaaatatgacttatggatgttgggtgaaaagtaccagtggagaaaacagagcctgaagatagtggggggctaggaggaggccgaatgataaggccctagagtttctaggaagagcatcaagaatagagtgcaaagatgagagctgcagttctcatgctatgttgtgtactggaattattgggggtgcttgttgaaatgtgactcctgaggtttgtttctaagactaatattagcatttctgggctgcatctctaacaaatactctggtgattctgtataggtgaactatggagcacactttaagacagagaagtggtatctcatcctttctaagactgaggtttggatgaaaggctaagaggcgagatgcagagacagcctccctctcttttatttcctccctcacttttggcagaaaatatgtacacctactttattaaaaagattgaggccatggtagctatttataggtagctgtagcctcagtctttttaataaagtaggttagaggttctctgccaagagtgagggaggctagaggttcaaggtcttcaagagattgaggttttgtgaattgctaggcagtcaggtttggtggattaggtctacacacttccaacagttttttttaggggtcttccccgggaacatcattcattttcctgcatggcgtaagttttactcttcacgtactcttatttcatgattacatgtgttcgtgtagtcctagtttgttactttgattgtagtgagacttgaattcttcataaaaggcaagttagaatgatgtctggttttgtaagaatagcagaagggaccaggcgtggtactcacgcctgtaatcccagcactttgggaggccgaggcgggcagatcacaaggtcaggagtttgagaccagcctgaccaacatggtgaaaccccgtctctactgaaaatacaaaaattagctgggcatggtggtgcgtgcctgtaatcccagctactcaggaggctgaggcaggagaattgcttgaacccgggaggcagaggctgcagtgagctgagactgtgcgtgcagctgcactccagcctaggcaacagagctagactccatctcaaaaaaaacaaatgaatagcagaagtgacagcaagatagacctatcctgagagcttgcaagaatatattgtctgagtttcttcttaacttggtaatggttttagcattgcaggtgaaacgctggtgccatgaacctggggataagctaccttctacatcagtttaaataaggacaaaaaaacatatttttaactatctccacaataaataatttaatgatagaaaattagggttgtacattttggtttacaagaaaacttttttaaaaatcagctggagtatacaacagccttgcttatctaacagtgatctgtgagatttgttccttacactgtctcataaattattttctatttaagctgaggtttttcttaggtgctggaaaagctaaatatgaatgtgttttgatagaagtgacagtgcaatgcatactcattcccaaaaatcatacatcgtgattttctccttgccgttaaagtggtgagacagctttcaagaatatgactattccttatggatgggcaaaaaggccaatgctccagcgaattggtaaaatgcaccctgacattccagtttcagtgatctttggcgcccgatcctgcatagatggcaattctggcaccagcatccagtccttacgaccacattcatatgtgaagacaatagtaagtgtgtggcttgatttgggtttttaggtataggtgaggtccgttttattatctcccttaaaagaggttttaggtcatcctcgtgttgcaggtcatctgagccatacctgcagcctcagtcggggacgtgataccacctgtgatgggtgcagggtttggcctgcacacatcttcatgtccaaaccgtgaactacctttctgaatgacttttcctgtccctagagccacagcattaggagagatggacagagggattggtccagtagcacttcaagtaattcccacctcacaaggcagcacactctcacttttttcagtttctctgttggcacttttattagtggtcaatttagtgttttttgcatattaaaattttattgagattcagtagatttttctattctcagatccttttaatggatatacttaatagttactatagattattgttattttttaatcacgtgttttatttaaatacagtggctctcacttttattactaagtgtctttgcttatatatcattctgttttattaaatgcttttactcactaactgtctgaatgcttttccttatccaggctattcttggggcaggacattatgtatatgcagatcaaccagaagaattcaaccagaaagtaaaggagatctgcgacactgtggactgaacacactgaagctctgatgggaaaacctggtgactgagatagttgttcagcaataattcatagtctgtgatgaagagtagtgaatacaacacacaaccaggcagccttcttgactatactttgcacatgttttctttaggaattcactcacacatttaaaccagttagtgccttctagaagaatggctttcctttctcctacacaaaattgaaatatacaagtctctaaatataatacctttaaataaaaggttatttgtccctctgatgtactgaaaaaatgtaatttttcagctgaaaattttttaatctaactttgctagttatttttatattgcaatctatattaccaatttaggaagtgatttctgagtctcttacactgtaaaggtgcactttattttctttgtcttccccatcatgtatttattgtgtcttgataactgatattaatctaaattcaatgtgtttttatgtaaaaatttgtcagttgtttagaatatttcactttgtttttgaaacggagtgacaaggcagatttttggttagaggacgggagttgatcactatcattactttttctagtttacctgttttttatatttaaggctgctaagccatgttcagcattttaaatgtggtctatcctgacatacagtgtataacaacataactccttggaacctcctatgtgtggtataattctactcttccaaggaacatgacttcaatactttcagtgattcaggtactgaaaagccttacctaaaaggctgttctttgtttccccctttcatactattcttttccatgacccaggatgcagcaaatgaaacagatttcttctcttaaggggatattaagactgttacttcctagtaagccaagtaataccatatttttattaacatctaacttttgtagatgggtgctaaaattgcatacattttaaccactaaaatagaaaaacaagtggtgctattatgtctcatggcaccagaaatgagctagcacttgggtttgttgttgctgttgtttattaagagtattgtgttaattaaatcattacatacttgaagttatattacaaaaattctagaaggttgattcaactatttttttaggaactaccatcaagtgtagcattttcttgcagttttaaaatgaggaaaacttctttgaaactgtgaaatgctccatgtggtaactggctgctgagaaaacccttcaccaaaaaaataaataaaaattgaataggattgtcatcaagaaggcatctttcgctaacgttgcttgtctaggagaaaggtagctatgtaaataaaaacagtgaactagagcaaatagtggtttaatggttttgttattgcatttttaaaatggttaattagggaatttgtagttgttaggaaatgtaaggttgtgtcactgttgattaactgccagaaagactgaatgttctattttcaacatttctcccctataaaagaatagacaaattatactgaagcatgatataaacatcttcccaatgaacaatttgtctcacttgtcagattaactaggttagtgcaggaagcaacatgagcgccaagatgtgttgtctgatttccctaccttaagaacaataatagtctttttagttagtattttggatggccaggtttcaaacctgtatgtggtacaaataatttgggtaatatttttgtatttttgttttacacactctctaatctcaattatcctttgctgggataagtgacaggtttcacttatacaggaaggtttttgcacaggaaatttggtcccagcccttggaaggaagaagttccttggtttacttagtgaatggagtttctggccacagatgtgccaagtgattgaagaaagatataccccaatatcaagtgataatttattttcctacagactgaatttgctttatttgaaagatgttgtaactctttttaaagttagattttaccctgaggtatagtatatgtaattttgtgaagattgagctggaagggaagttcacaatcctcacatttaaaaaaatatagtgggtgctaaatgttttcttaaaaatctagtacagcatttgatctttgttatgcacagcatacttttattttacagaataaattttcctgtgatagtcacaacaagacagctgtatagtttcttgagtcttttgtatggaccagtctctgtataatagttaactacaggactgtggatccagcaaatgttcagtaaatgctgctgttgttcttagggaaggctactctgggtgttgtggccgccatacatggctttacctgtgtccatgcattcccttaagatgacttctgttttcttcttttttcttctgattttccaaaaaaaaaaaagccttgcctaaggttggttttagaatatgatttgcagaacacttttgaaatgtcttcattcatatatgtaatatatatttatacttaaagggccatacgcgatttcaataaaacaagaagtactggaaagaataaacaaaaatagccagaagatgcctagaaaagaacaatgtggaaggagggataaccctattaaatattataacataatgtttacaatatgagaaagtctaggaatttagtacatgataaagcatctcattcagagaaaaaggctttaaaaatggtgttgagagaagtgtggttaaccatttggaaaaaaaaataaaattgaatcgatttctcacaggatacacaggataaaatctgaatagaacaaagacccaatttttaaaatgaaaccctctttctaactagaagaaaacatagatgaattattgtataatctgacagtgagaaaaactttcctaggactgaaaattcagaagcaataaaaagagaagtctatagaagaattttcagccagatggaatggctcatggatgtaatcccagcattttgggaggctgaggcagaaggactgcttgagaccaggaattcaaaaccaacctgggcaacctagtaggactggctctaccaaaaaaaaaaaaaaaaaaaattaagtacctggcctgggttccacctacttgggaggctgaggtaggaggactgtgagcccaggagtttgaggatgcagtaagccactgcactccagcctgggtgacagagaagaaaaaagatttttttggatagctgaaaatatttgcagcatttatcacagagggctaattgtagccctatatatgaagaattttaaactttgagaagaacccgaagaataggcaaaaggatgtgaacagacagttaacagaaaatagaatgcaaatggtctttaaacatacaaggatatgcataaaaagacaaatgcaaaataaaataaaataatggaaatacctttcttacctgtgagattggggaaaatccaagttaggcaatgcactctgttgagacaatagggaaacaggcactccaaaaattacaaatccctgtggatggtatttgttaactagcaaagttaaatgagtatatccttcaacctggcagacccagttctaagaatccatatgagatgcacttgcaagaatatgaaatagtatatgcacaaagatcttgattacagcactgtttctaatagctacagactggaagccagccaaatctccattgatagggaattgatggaaggaactagggtatatctatacaatgggatactacacagctgtagaaaggactgcgaactatttttgtagttctggtctggagaaatctccagaatataggaaatgaaaaatgtaaagcacagaagagaatgtatggtgtgctgtctgttgtataacgaagagacaaatggaaaaaatatgtatttgctttttttgtaaagcaatagaagaattagttataccaataactaataaaatgatctccttgttagtggtggtagggagctagacaaggacggcaactatttctgtatcttacataccttttattttgaggccctgtcaatgttttatataataaacattttttgaaaaggcaactcttaaaactaaaacaaacttaacagtctgtcaagttggtgatataaccccacagaagacttacttcaagtgacttgaaaacttagtattttgtctgtactttgctaatgtaatatatcctacagaccaaacaaccacaaataaatcttaaactgcattcagtagttttatttttagcaatgatattggtagtgtcatttgggtatttatgtgtgttaaaacaaatatttacttgtgtcattggaatcaaga

SEQ ID NO: 8195 - DNA, 344 bp, Homo sapiens
aaatgaaattgagcctgaatctaatcaagcctctacatctaataagtaaaaacacacaggagattgaaaagcaccttaatatgctaaatctagaatgtgggaaattccataggacagaaattccagtttcttcaacaaattgaagctgcaaaataaaagtgttaataggacttaagacttagagaaacttaaaggaccttgtttggatctttatttgaacaaaacaaaaagacatttttgaagcaattagaaaagagtttataatggactgggtatcagctgatattaaggagttattttattgagtgaaataatagtatagtgacttttttaaaagcccttac

SEQ ID NO: 8196 - DNA, 356 bp, Homo sapiens
actgactgaatggatcctcctcttggccgaggactttccaaagtcaacccaaaaaattagtttaggccatgatgggcaggggggtcagacatgcctcatgaaaccctttggagtgcaggcacagctgaccagcattgacattaaaccagagagaccttgagactgacaaaacaggctctttgtagcgataagataccaaattccaacctgactctagcatagcatcacatgacagatagcaggccctgaaagaaatcaaagtattttcccccaaaatagatttctttgacatattttgaagtggccctgaaaagctgtctcttgtggagaagacataagagatggagatggagatg

SEQ ID NO: 8197 - DNA, 32167 bp, Homo sapiens
cccagcactttgggaggccgaggcgggcggatcccgaggtcaggagattgagaccatcctggctaacactgtgaaaccccgtctctactaaaaatacaaaaaattaactgggcatggtggcgggcgcctgtggtcccagctaccgggaggctgaggcaggagaatggcatgaacccgggaggcggaggttgcagtgagccaagatcgcgccactgcaccccagcctgggcgacagagccagactctgtctcaaaaaaaaaaaaaaaaaaaaaaaaatgtatatatatatatatatatatatatatatatatatatatatatatgtatgtacattcacttccgttatcacaattcaagacaagtaggcttaaaagcagtctcactttacggcttaaaggcacaaaatccaagtagcaagcatgaaatgtggtttgcatattaaatcggtgcctttaacatttttgaccttaacccagtaagaaatacttttgtgcgtgacccagtacccacacacccacataactgaaacaaaacttttaaaaatgaacagccctgttcatctattaggaataattcctaaaacagtgttataggaatactgctatctggaagaagcaatattaagagtagtgtgtactaggcatttttcaaggagctctataacatttattgataagattctgctaccactcttgagatgagtactatttttattccattttagagattcagaaaatgatgcttagagaggttaagaacttctcaagataagcggtagaactgtcagtagaactgttaccttttactatgttaagatgtgcttcaaaatttctatttccttaagtatttttcatttttttaaatatcgctcagtttaaatgattttaacaatccactactgtaattatgacccacaggttgggaaacactgctctaaattaatcactccttttttttccctcagattagaaaacaggcttttgaaatttagagcttatttctcagatcagtttaaccttcctaggaaattacttgttactgatgcataagaaaaaattgttacataaagttagcttctatcatctttgttaattagcacggctcccttcttttcatttctcttctccttccttaaaattttctctttttttcatctttagtcctgtgtggcacatattaggaatagccaaatttatttctggagtatatttagatatacatcagttacacacggatatttcttgggttttgcccatatgtctattggtttgcacttgccacaagaagtacagatttcagccaaccatctgctatgcttgtgaaaccatcaaaacccaaccttccctcaaatattggaatcctgtgattttttttttcaaatgtagtaaatttcatgtttaaaatgcataatagggctgggtgcagtggctcatgcctgtaatccccacactttgggaggccaaaatgggagaattgcttgaggccaggagttcaagaccagcctggtcaacatagaccccatctccattaaaataataataataatataaaatgcataacgataagcatcatttgtcatgcccacacatttaagcaaaaaattatgctgaaaataaaattatgatgcttgttgaagcactaatagaactttaatagactgatttagtttgttttgatatttttcttattaaattaagaactacaagcagctgtcgaagagatactgccaagccttaaaaaagatgatgtgtccatctattatgtgagcagaacttctaacacagatgggattgactctttcctggacaaagtggatgaagtatcaactgaacctatcccagagtcatggaggtctgaagtcactttttccactcctgccttatacatttatacttctggaaccacaggtaaaaataaaggggggattctccaaaaaaattaatctgaaggagttaaatgttgacacaggttttcaaatctctttctttggcaaaacgtattgggtaactaatacttcaggagatttagttatttgcctgcgggaactgatcttatttcatagcatgtgatcccatttgcgtttctccaagctatgcatattttccgccagttggtatagaacagataaagaggttaaccaagaactacagaagtagttatgatgatgaatgagatttggcactgaatgggtagttggaattttttttcatgcttgttgtattttgattatattacatccagagtccatatagactgtataattgattataaatggaacacaggagaagaccagtgaacaatgaggaggttctatttatataaatgttttaaccgttatcttcccatgcaacactgatttggagctgtttggtgctgtggatgtggggtggctgtagcataagacctaaaatactgtatttcatcaaatctaggatgccttcaactgtaagctgccccattatgagccactaagaagaaacactgccaattaacaatgttatgggaacactgctgtatggaagaagcaatattaagggtagcatgtgtactaggcattcttcaaggagctttacaacatttgttgataagattctgcccccactcttgacatcggtactctttttacttccattttagagattcagaaaatgatgcttagagaggttaagaacttcccaaggtaagcattagaactgtcaggattcaccttgcaggctgattccacagctcatacaattgacagctctaccccagtaccttcttgtttattcgtgtgatagatatttagtgtctgcctactacaggccaggaagaccaaaatgtaataatatgaagcctgagggatatatttaaaagaaggacaggaagccagccccagcatgccaattattattattaatattggaaaattgaatctatgagtcttttacctctgttgattaaaattttaatttaatttaagcaggtaatacaggtcttctccttgttaaataatcaatagaccaggataaaatttccttgagccttttatctcagctgcagctgacaggaactgtctccttcacctcgacaggccctcagcacccacctgagctcacagttcctggacctgagtttaacctgattgttgacttcacttcatacagtcacttttgctaagtatttaagtaaatgagaggaagccaggaatgacatattaaagctggtgcccaaaacataatgtctatctttttttttttatttttattgccaggccaacagaaaggtgagatggcacaattaaccaattgcttctgctgcatgcagacactcccttaacatatgggacttttatcatcatttcttaatagaatggtaaaattaaattgtaaatgtttataactttgttacaatgcatgttttcacagtcaaatagaaaaccccttttattgggaggccgaggcaggcagatcacgaggtcaggagatcaagaccatgctggctaacatggtgaaaccccatctctactaaaagtacaaaaaattagccaggtgtggtagcgggcacctgtagtcccagctactcaggaggctgaagcaggagaatggcatgcatgaaccagggaggcggagcttgcagtgagccgagattgcgccactgcactccagcctgggcgacagagcgagactctgtcttaaaaaaaaaaaaaaagaaagaaaaaaaaagaaaaccccttttagggagaaaaaagagaatgagcatcctctgatttaatctcgtaagtcagaatttatatttaattggaagacaattagaagggtgtttattttacttttttcattttctctgaatcaaatatttgctaggccaagcacagtggctcacatctacaatctcagaactttgggaggccaaggcaggaggattacttgagcccaggagtttgagaccaggctgggcaacatagcgagaccacatctttacaaaaacattaaaaaattagctggcatagtggtacaccttgtagtcctagctacttgggagactgaggtgggaggatcacttgagcccaggagtctgaggctacagtgacgtgccactacaccccatgctgggtgacagagcaaggcactgtctgtagaaaaaaaatagtgctaagttactcttgtaaacattaattaaaagaatttgtttaaacagttggagaataaatgttcctgctcctcaaaggaagtcattagcacaaaattatataatagttaccagatattctcatttattcattaatacaaaatcttaatttaggaaagttctgaaagtacttcaaggcaacaaagatgagcatttctttttaaaaatttcagaggccaggcatgatggctcatatctataatctcaacactttggggccaagatgggaggctcacttgaagccaagagttcaacatcagtctgggcaataaagcaagaccttgtctctacaaaaaatataaataaacagccaggcatggtggtgcacacctgtggtcccagatacctggggggctgagacaggaggatcacttgacctgaggctgtggtgagccttgaacaccactacactccagcctggcaacagagtgaaagcctatctcaaaaataataataataataataataatacataaaacaaaacaaaaaactgggccattgtcaaagaaaatgaattttgaattgtgtttacaataatggtaggttgctagccatatttgtctgccttgtaacaagttgctgctatttgggcactatctggtgaaggtaccaccaagtattgaagaatctgagtcaacagagatctgtcttcctcttcacgaagtctgtttacccactcagatcttaaactcttagtccccttcccagtgacttcatgccctccccaattgaactgttcttccatgggaaacaacataagcatacacttacagaagaaaatcttacaaaaaacgtatataaattatggttaagaaagtgcaagcgcatttagtctaatgtactaaaactacactgagatacggtttttcacctttcagactggcaaaggccccaacatttaagagcacacattgacaaggctaggaggaaacaggcacactcatgtattgctgataggagaatgaatggggacagcccttataactggcaatgtggaagttatctatcaaaattacaaagactcttactctttttttgagacagaaactcattctgttgcccaggctggagtacagtggcaggatcagggctcactgtagcctcaacctcctgggctcaggcgatcatcccacccaagtagctaggactacaggtgcataccgccacacccagctaatttgttttactttttgtagaggaggggtctcactatgttgcccagactggtgctgaactcctgggctcaagcgatcctcctgcctcagcctcccaaattgctgggattacaggactggccaacttttatcttttgacacaacaatctcacttcagtgaatttatccaaaagatatggtgtcattcatagtgtgaattgccacgtggacgagcttcttcactgcagcatcatttataacagcaaatagtataaataaattataatacacttataaaaggacttgaaggagctgagaaagagaataaataaatgaataaataagggaaatctttatgtacaaacatgaacaaatctccagtaaacattgttaagcagcagagacaaaaaacatgcaaaagagtgtgcatatttcttttttttttttgagatggagtcttgctctgtcacccaggctggggtgcagtggcgctatctcggctcactgcaacctttgcctcccaggttcatgccattctcctacctcagcctcctgagtagctaggactataggcacccaccaccacgcccggctaattttttgtatttttagtagagacggggtttcaccatgttagccaggatggtcttgatctcctgaccttgtgatccgcccgcctcagcctcccaaagtgttaggattacaggcgtgagccaccgcgcctggccaagtgtgcatattttttaatggaaaaggcaagaacatataagcaaatgttcatatttgctttgtttgtataaaataactctagtacgtaagaaatctctctgactctcagccttcacatctgtggattggagaatataattctgtttatgtcatatataaacttgttatggatttttaaaatgtcttgcaaagtggtagccacagggcagaaattcaatggacagtcattcctctgtttctgtttctcttcagattactactgtcataaccatctaactcaggagttagcaatctatggcttgtgggccaaatacagcctcccacctgtttttgtaaataaagttttattggaacacagccacactccatttatgtatgtgtatggctgcttttgactacaatagcagagttcagttgttgcaacagagattgtatgacccacaatcccaaaacatttactccctggtcctttatagaaaacatttgtcaactcctggactaactggtcatggcccttcccagtgcaattctcaaaatacagggtgatgaatcttcctaagccagatctctctcctacactgtaaatgcccaatcttggttaactcatgccttctcttgtatatttacaaaggtcttccaaaagcagccatgatcactcatcagcgcatatggtatggaactggcctcacttttgtaagcggattgaaggcagatgatgtcatctatatcactctgcccttttaccacagtgctgcactactgattggcattcacggatgtattgtggctggtaagctttttctacaaaatgttggaggcgagtgcacatttacattttcccagaaggaacagtaatacaaaatttggctacgttgctgtctgctaggaacagttttcaattttgcattaacaataaggcaatttgaatcacatattacaagcaagcatctaaaataatctgtttttcatgcctgcctatctaataatgtaatgctataattgttcagtatatcaagagacaaactcctttaaaatattttagggctgggtgcaatggctcacacctgtattcccagcactttgggaggccaaggcaggaggattgcttgaggccaggagttcaagaccagcctgggcaacatagcaaacctcatctctaaaaaaaatatatatatatatatatatagccaggcatggtggctcaagtctgtagtcccagctacccaggaggctgaagtagaagaattgcttgagtccaagagttcaagattgcagtgagctgtgattgcaccactgcactccagcctgggtgacagagtgagaccttgactgtaaaaaaaaaaattttaggttatgacacttgagtcttagattctatgtcatgtcatttccatctttagaaacttgcatgttaatctccatcagctttaaacttctgcagttgtgtgcactcttctgtaatctcccatttccacagcttttcagctctactagaaggagagaagatggcaactccatcagaatacttggcttggcttggcttgccatctcttctgtttccttctcagactttactattcaaattggagttgccatcctctctccttccaggaggattcatgtcacttgtatacattaccgcaaagttcaatagccaactcttccaggaagctatatgtaactttctgactgagctaaataaacaactttttctctcatgtggcatttcattttaaataatcatatatgtatatataaaaatatatacacatatgtatatacacacacatatatgcgtgtgtgtatatgcatgcatgttatggatggatatttgtgtcccccaaaaatgtatatgttgaaatcctaacccccaatatgatggtattagcaggtagggcctttgggaagtaattgggtcatgagagtagtgccttcatgaaaggtagtgcccttatcagaacaggagacagccagcttctttcctgactctgttctgttccatgtaaggacacagggagatgatgaccatccccaaaccaggaaaaatgccctcaccagacaccagacaccttgatcgggacttcccagcctccagaactgcaagagataaatgttgtttaagccacccatctgtactattttgttatagcagctcaaacacacacacatacacacacacacacacaatccaaaaatttgaaatccaaaatgctccaaaatctgtaactttttaagcaccaggacaccacaagtggaaaatactacacataagtacttaacacaaactttgttttatgcacaaagttatttaaaatattgcatgaatgggccaggcacagtggcttatgcctgtaatcccagcactttgggaggttgaggtgggcgaatcacttgaggtcaggagtttgagactagactggtcaacgaggctaaaccccatcccttcttaaaaaatacaaaaattagccaggcatgatggtgtccacctgtaatcccagctacttagaggctgaggcacgagaacccacaaggcagaggttgcagtgagccaagatttcaccactgaactccagcctgggcaatagagtgagacccgggccaggtacggtggctcacgcctgtaatctcagcactttgggaggccaaggggtacagatcacgaggtcaggagattgagaccatcctggctaacacagtgaaaccccttctctactaaaaatacaaaaaatttgccaggtgtggtggcacgcgcctgtaatcccagctactcaggaggctgaggcaggagaatcacttgaacctggggggcgggtgttgcagtgagtcgagacgcgcaccactgcactccagcctgggtgacagagcgagactctgtctcaaaaaaagaaaaaaaaatagagcaagactctgtctcaaatatatatatataaaatacatatatatgtatgtgtgtgtgtatatatataatatatatgtatgtgtgggtatatatatgtatgtgtgtatatatatatacttgagacagagtctcactctatttatacatatatttagtatatatataatataatatatatatatattgcatgaaatctctttccctctcccctccctccctcttaggacttcatttgaatctcttactgcaagctaacttttattaaaatgacctttgtatgagtcttctcctccatagattggaagcccctatcgaacaaaaccatgtcttactaattttttgcatttgaatataaggtactcaatacttgtttgcaaatataatttatttttaaatttctaccgttcaaagttgacaaattaaacataactgggagaattttttccaccatttctttcttgacactttctgtgctttctctgtaggtgctactcttgccttgcggactaaattttcagccagccagttttgggatgactgcagaaaatacaacgtcactgtcattcagtatatcggtgaactgcttcggtatttatgcaactcaccacaggtaacactccccccgttttactatcattttgaaatgggtaagatggaaattcaagtcactttgggttgtgctaggcttcaactgatttgcatatatcagttttgagtttaggatacaattatcatgataaagtacttggcactatacctaccatatagaggggacttagtaggtgggagttaatattattattatgatgatgattatttcctgcctttttacttgttttcacatcttactccccacctagcatatcctgcatttccccctctgcttactaaaagccagtgtcaaagcccagttcaaatgatacctcatacattaaacatatttgggtcactccaacaaaagtcattactcttctcccctacgtcattttatttctaccctctgtggcccttgtcatgttgcaggagtttgtgttcatgtctcccatccttccttggctgtaatatctttgatggctggaaccacatcttgtctccttgttttctgttataccgaaggcatacaggaaacttttacttaatgctgtttaacaaataaatctctgtgtgactttgaaaccagccagccaagtctgtcaccaagctgggaacagatgccccagggcatctccaatggccttggatctgccctgtttgcagatgttcagctctcgatggggttgttctcaagagctcctcctgcccagtccctcaactctcatcagagatctggtatcagataggatttatcaatggtggcactgctgacattttgggcttttaattctttgccgcgcggacttattctgtgcattgtagagtgtttagcaccctttggactttgcccacgagatgccagtagtaacctccccacctccccaggtcatgatcatcaaaatgtctccagaaactgccaaatgtctcttggcagggaaatgctaacctagttgagaaccactgtactagacaatgcagtaaactcaccagattctaatccctttcaccagattctagttcctttattcagtcagtttaaactcaaaggatcactaagttgataaattgctattgataagcacctgttgtactcacctaacataccagctgccgtgtgacgcagaaagaagtgtcagatgctcttcccccaggtctctctcacctcactttactcagtctctgcccagatgttgcctcattagaagacaggcctcttctgctaataatcaaacatatcatctgcccctcactgtccagcttgtcactgcatttcatggcacctgtcactcctgacatagtaaaggtttatgtgattattgtctgccccccctcgccccaattaaatgaaagccgcatatgagcaggggctctgtccactaccagatctacggcaccaagatctgtaaatgacacatcataggcatcaacagattttgtggactgaacctctaaatccttgcccctgaaaaatgtgtagttgagttgagggagctaaaatgtttccccaaaatgtttgggcttagcacatattattctgattttttggcatattcaatagattctcgaggatcatcattagcagtgagttgggttagggtattttccacagcagttctgttcatgtcattattgaatttttttcacattaatattccacgtggcctccaagatagcatgtctctctattaaaatccagaaatccatatgggacccttctgctgggcttttcttctctaccttaaaggcactcctttgtcagttagaaaatctcctggggagtgtgtgttgtttctgtatgttctaatgggagcttcctttggactggacgaaaataaatatgtttgtgtgtagctgtcttcaggcccacacatatccacatatacacatgcacacatacacacatgcatgcactctcccagtttttctcttactgttgtctcaaatactggaaaacaaagacaatttcactggggttttacaacttcaaaatatactatgatttaatgcataatcttgaatgacccctggacttcctatttgccagtgcttccccacccctgagttctgtttggaaaatatttataaaaagtataataaaagatcaaagttatctcaaaaaaaaaccttcagttaaagatttttttaaattataggtcatcagtccaggcacggtggctcatgcctctaatcccaacactttgggaggtagaggcgggcagatcattcaaggtcaggagttcaagaccagcctggccaacatggagaaacccagtctctactaaaaatacaaaaattagcggggcttgttggcacgtgcctgtaatcccaactactcaggaggctgaagcaggagagtcgcttgaaagcaggaggcagatgttgctgtgagccaagattgcaccactgcactcaagcctgggcgacagaacaagaccctgtctcaaaaaaaaaaaaaaaaggaaagaaagaaagaaaacaatcatatgtcattagacaagcaggagatctatgcaaatttttttaaatttaatcataggtcatcataggaagtagaaagtacagattgtatgggatgtagggaaagattatatcaaaaagactttgcaaaaaaaaaaaaagaattggataaaaactagaatgaatgggggaagggcctggatcaatgtaatcaggaacttcttcacccttagagctgcctagaatacgctgttgctggagggactaaccccaccagcgacccccaagcactggatgccagggaggcaacctctgccttagcagaacagctaaaccaagtgacacccatccacagacatatatggcccagctcatcaggagaatctggggccagtgttgggaggtagaagccactgtgcttctctgccctcttcttaaccatattcagtagcttctctagtagagcagtgggctatggagaatgcttccagccctgctcaggtcagtggttcagatttggccccaggtacttaaagtaatgctgagagcaagtactctggagttagtcggcctgcattctgactctggcattggagcaggatagttaacctctctaaatctcagcttcccgtcagccaacaaggagataatagtacctacctcacatggggtctatgaagacaacctgagatgatatatataaaccacatagtagctggaacttagtaaattctcaacacatgttgccattattatcattatcactttccatgcctaacagtgtgtagctcataataagtaccccatacatatttgttgaatgaatcaatgaaaattctgcccacttacacaaaggaagaaataagggaaaacattctacttagttaatcactctcatctgaggttgagtaggggatgggatagcaaagctactgacttaagtgatttttaaaatattatagtgaatattttctattttgccgtcttcccgcattgtatttgggcctttgctttcaaagcgactgtttgtaatgaaaggccattctgattcatttcttgcagtgtatggttgtcagctcccattcggtttttgtagttgcctaaaaacaatgtcatctagggaaagttatttattggagcatgatattgctaaagctcagtgtttctttcctccagttacagactgaagctacagtctgtactggacaaggctccagtacaggggtctcaatgaggctttatgacacctgctggagtgtgggaggaggaagacagaaagggaaccaaaaaagagttccaggggccacacatagaaccatgatatttggaaggagaaataatattggccagaaccctgaaaaagctgaatagattcaacttacctctagtgttgactgcgtccccccagaattagataacctctgtggtcccttctagcctaaaatttctgtctctgcatcagcttcattctgttcaaaaaagagaatggatggatctgttgcagcacagagtggagagtggccaatatgactggggcccaagacagagggaggccaaaagaaagagggaaggggagcagaatcaggaaggttcgccagggaaggtgggctttgaagagtacggagaagttctgcagccaggcaagaaaagaagggcttctggctagcaggaaaatcacgtgagcagtgagatgaaggacccagcacactgggaactgcaagcagtctggcaggaggtgaagctgaggggctgggtcaggtggcaagggctttactctgctgagactcaaatgtgaacatgacaagccatgactaaagggccttacatggaagagcaatgtgggagatggcatttttagacagtccttttggctacgatgtgagaatacacagaaggatgaagggcctcttctgtaaagcaaacaggtggagccttgtccaggcagaagtgtaacatattaattattaagaacagggactctggagtttttctaaggtgataaagaccttcttccctttcacctcttggaagtcaccccaaaacaaggcgatgagaaaaacacacacaagcaccatcatctcagaaactaagagacattgcaaccatgaactacatagtataggaagctaaaagataacagtgactgacatagtaggctgagaagggtgaaacttaagaggcaagtcccaacaggaaggaagccagttgccttcctgaaggctgagaaattgcaggctttgaatacagctgaaggtgggatgaagtgtcagacttaaaacaggggagttatttgaaaatctgtgtaagaagtaaaatacggaggacaggatcatggcgagcgggaggcaggactagattgtggctccagacagagcagcatgagaggctcacattgtgaattttagctccagcttgactgcaagaactaaccagcaaccccaagaggacccacagaccctctgaaagaagtggattgctcctagaggacccgggagacaccccaaatactgtgatcgccccaactgcagaagtgggaaagggagaccctcatctcccgaacacatactggagaagctgaaggtctgtttgtagaacttcccgactttacctggagcctcgtcaagttagagagccaaaccgagcaaaatacaaaggtagaggaagctgcagaaaggccctgggagctcactggctcccctagcagcccattcccgcctggcaccacagggatccatcaggagggtggccagaggagcagggggcaaaactccacagggagaaggaattctctagctaaactttgggataatttgaacggggcaagaagactcctggccagaactccagggagggtgtgaatctggcttgcagactccacaggcggagaagaactaaagccctttctttaacagctgggaggcagaaagccttgggcaagttttcaagcctgactcgccctccacctggaaacagactcggggccgttgagggggcacggtgggagtgagaccagcccttcaggttgcctggaagctgggtgaggcctgtgactgccaactttcccccacttccctgacaacctgcatgactcagcagagacagccataatcctcttaggtacacaactccagtgacctgggaatctcgcccccatcccccacagcagccacagcaagacctgaccaaggagagtctgagctcagacaggcctagccctggccccacctgatggtccttccctatccaccttggtatcagaggacaaagaacatataatcttaggaattctagggccctgcccactgctggtgcctgtccacactattacagctgatgctttctggaaagtaccacctcctggcaggaggccaacagcacaaaacagggaattaaaccaccaaagttaaggatcccatggagtcattgcatcctctgccacttccactggaacaggtgctggtatccatggctgagagacccataaatcattcacatcacaggactctgttcagacaacccccagtaccagcccagagccaggtagacttgctgggtggctagacccagaagagagacaacaatcactgcagttcggctcacaggagccacatccataggaaaagggggagagtattacatcaaaggaacaccccatgggacaaaattctgaacaacacccttcagccctagaccttccatctgacagagcctacccaaatgagaaggaatcagaaaaccaaccctgctaatatgaaaagccaaggctcatcaacatccccaaaagatcacactagttcaccagcaacgaatccaaaccaagaagaaatccctgatttgcctgaaaaataattcaggaggttagttattaagctaatcagggaggaaccagagaaatatgaagcccaatgcaaggaaatccaaaaaaacgttacaagagtgaaaggagaaatattcaagcaaatagatagcttaaagaaaaaaacagggccaggcatggtggctgaagcctgtaatcccagcactttgggaggctgaggcaggcagatcacaaggtcgggagattgagaccatcctggctaacacagtgaaaccccttctctactaaaaatacaaaaaaattagctggagtggtggcaggcacctgtagtcccagctactcgggaggctgaggcaggagaatggcatgaacctgggaggcagagcttgcagtgagccaagatcgcgccactgcactccagcctgggagacagagtgagactctgtctcaaaaaaaaaaaaaaaaaaaagtaaatgaaaaaaacaagcaaaaattcaggaaactttggacacacttttagaaatgctaaatgctctggaaagtctcagcaatagaattgaacaagtagaagaaagaaattcagagctcgaagtcaaggtctttgaattaacccaataaataaagacaaagaaaaaataataaggaaatatgaacaaagcctccaagaagtctaggattaaaagaccaaacctaagaatacttgatgttcctgaggaagaagacaattctaaacacttgaaaaacatatttgggtgaataattgaggaaaacttccaagccttgctagacctagacatgcaaatacatgaagcacaaagaacacctgggaaattcatcacataaagatctttgcctaggcacattgtcatcaggttatccaaagttaagaccaaggaaagaatcttaagagctgtgagacagaaacacctggtgacctacaaaggaaaacctattagattaacagatttctcagcagaaaccctacaagctagaagggattggggccctatcttcaaccacctcaaacaaaacaagtgtaagccaagaattttgtatccagcaaaactaagcatcatatatgaagaaaagatacagtcgttttcagacaaacaaatgctgagagaattcgccattaccacgttaccactacaagacctgctaaaagaagctctaaatcttgaaacaaatcctgcaaacacatcataacacaacctctttacagtataaatcacacaagacctataaaacaagaatacaagtgaaaaagcaaacaacaaaaaaacaaaagttcacaggcaacaaagagcatgatgaaagcaacagtacctcacatttcaatactaacattgaatgtaaatggcctaaatgctccacttaaaagatacagaactgcagaatggataagaactcaccaaccaactgctgccttcaggagactcacctagcacataaggactcacataaacttaaagtaaacaggtagaaaaaggcatttcatgtgaaaggacatgaaaagtgagcagaggtagctattcctatatcagacaaaacaaactttaaagcaacagtggttaaaagagacaaacagagacagtatagaattgtaaaaggccttgtccagcaggaaaatatcacaatcctaaatatatatgcacctaacactggagctcccaaatttataaagcaattgctactagacctaagaaataagatagacagcaacacaataacagtgggggacttcaatactccactgacagcactagacaggtcatcaagacagaaagtcaacaaagaaacaatggatttaaactatactttggaacaaatggacttaacagatatatacagaacatttcatccaacagcagcagaatacacattctattcaacagcgcataactttctaactttcaccaagatagaccacatggtggcccataaaatgaacttcaataaatttaagaaaattgaaattatatccagcactgtctcagaccacagtggaataaaactggaaattaactccaaaggaaccttcaaaaccatgcaaatacagggaaattaaataacctgctcctgaatgagcattgggtcaaaaacaaaatcaagacagaaatgaaaaaattcttcaaactgaacgacaataatgacacaacccatcaaaacctctgggatacaacaaaggcggtgctaagaggaatcttcatagccctaaacgcctgtaacaaaaacactgaaagagcacaaacagacaatctaaggtcacacctcaagaaactagagaaacaagaacaaaccaaacccaaacccagcagaagaagggaaataaccaagatcagagcagaactaaatgaaattgaaacaaacaaacaaacaaaaaaaaagataaatgaaacaaaaagctggttctttgaaaagataaaattgatagaccattagtaagattaaccaagaaaagaagagaaaaaatccaaataacctcactaagaaacaaaacaggagatattacaactaacaccactgaaatacaaaagatcattcaaggctactatgaacacccttacgcacataaactagaaaacctagaagagctagatacattcctggaaaaaatacaaccctcctggcttaaatcagattaaatcagaattagataccctggaacagaccaataacaagcaggaagattgaaatggtaatttaaaaattaccgacaaaaaaaagtccaggaccagatggattcacagcagtattctaccagatgttcaaagaagaattggtaccaattcttttgacactattccacaagatagagaaagaaggaaccctccctaattcattccatagagccagaatcaccctaataccaaaaccagaaaggacataaccaaaaaagaaaactgcagaccaatatccttcatgaacacagatgctaaaatccttaacaaaatactagctagccaaatccaacaacatatcaaaaagataatccaccatgatcaagtgggtttcatgccagggatgcagggatggtttcacatatgcaagtcaataaatgtgatacaacacataaacaaaatgtaaaaaatcacatgataatctcaataggtgcagaaaaagcattcaacaaaatccagcatctctttatgattaaaactctcagcaaaatcggcatacaagggacataccttaaagtaataaaacccatctataataaacccactgccaacataatactgaatggggaaaagttgaaagcattccccctgagaactggaacaagacaaggatgcccattctcaccactcctctttaacatagtactggaagtcctagccagaccaatcagacaagagaaagaaatacagggcatccaaatcagtaaagaggaagtcaaactgtcactgcttgctgacgatatgatcatttaccttgaaaactcttaaggactcctctagaaagttcctaggactgataaaagaattcagcatagtttccagatacaagattaatgtacacaaatcagtagctcttctatacaccaacagcgaccaagcaaagactcaaatcaagaactcaaccccttttacaatagctgcaaaaaaaataaaatacctaagaatatatctaaccaaggagtcaaaaggcctctacataaaactacaaaatgctgctgaaagtaatcataaactaaacaaacaaatggaaacatatcccatgctcatggctgggtagaatcaatattgtgaaaatgaccatactgccaaaagcaatctacaaattcaatgcaatcccatcaaaataccaccatcatccttcacagaattagaaaagaaaattctaaaattcatatggaaccaaaaaaagagcccgcatagccaaagcaagactaagcaaaaagaacaaatctggaggcattacattaccccacttcaaactatactataaggccatagtcaccaaaacagcatggtactggtataaaaacaggcatgtagaccattgccacagaatagagaacccagaaataaagctaaatacttacagtcaactgatctttgacaaagtaaacaaaatcataaagggggcaaagtacaccctattcaacaaatggtgctcagataattgccaagccatgtgtagaataaaactggattctcatctctcaccttatacaaaactcaactcaagatggattaagaacttaaacctgacacgcgaaactataaaaattctagaacataacattggaaaaacccttctagacattgacttaggcaaggatttcatgaccaagaacccgaaagcaaatgcaataaaaacaaagataaatagctaggacctaattaaactaaagaacgtttgcacagcaaaaggaacagtcagcagagtaaacagacaacccacggagtgggagaaaatcttcacaatctatacacctgacaaaggaataatatccagaatctacaacaaactcaaatcagtaagagaaaaacaaacaatcccatcaaaaagtgggctaaggacatgaatagacaattctcaaaagaagatatacaaatggccaataaacattaaaaaatgctcaacatcactaatgatcagggaaatgcaaatcaaaactacaatgcgataccaccttactccttcaagaatggccataatcaaaaaaatcaaaaacagcagatgttggcatggatgcagtgaacagggaacacttctacactactggtgggaatgtaaactagtacagccactatggaaaacagcgtggagattccttaaataactaaaagtagaactaccattgatccagcaatcccacttactgggtatctacccagaggaaaagaagtcattattcaaaaaagatacttctacacgcatttttatagcagcacaattcacaattgcaaaatcgtggaaccaacccaaatgcccatcaatcaacaagtggataaagaaactgtggtgtgtgtgtgtgtgtatatatatatatatatatatatatatatatatatatatatatatagtatagtttgaagtgaggtaatgtaatgcctccagatttgttctttttgcttagtcttgctttggctatgcgggctctttttttggttccatatgatatatatatatattccataaaaatatatatattccataaatatatatccacaaaatatatatattttatggatatataaaatataaatatatagtacatatatccataaatatatatatattccataaaaatatatatattccaaaaaatatatatatattccataaaaaggaataaattaacagcatttgcagtgacctggatgagactggagactattattctaagtgaagtaactcaggaatggaaaaccagacatcgtatgttcttactgatatgtgggagctaaactataaggaaacaaaggcatgagaataatacaatagactttggggacttggggggaagagtgggagggggacgagggataaaagactacaaatatggtgcagtgtatactgctcaggtgatgggtgccccaaaatctcacaaatcaccactgaagaccttactcatgtaaccaaataccatcggtacccccaagaacttatggaaaaataaaaataaataaataaaatctgtgtaagaagtagctggacctgctattcccctcttccactgtgtgggagacaggaggatttttctctggagagctaaagaagctttgactgaaggaccccaagaacagaggagagcagggacgaggcactgaaaacagagattaagaaagtatctacgtactaaccagggagaccccaccagctcctttcccctgcacagatactggaactccagtagccaggttatgcttgcaggcaggatattgaaggagtgtaattcttaggaagaactaaactttcccggaaaagacattggacatgggctcactgcctcgtcaaccagcagtgcagcccagctagcagtagccccctcaccctgcccccacagaactgcctaatcatctttctgttgcattactcttaaatctgaacaaacatgaagaatcaccaagcacctgaggaacgcctcctacaggaaggatcatcaaaagaaaagaagcatcaactcaaaaaacagaagaggccaggcacggtggctcacgcctgtaatcccagcactttgggaggctgaggtgggcggatcacaaggtcaggagttcaagaccagcctggccaacatggtgaaaccccatctctactaaaaatacaaaaattagctgggcacggtggtgggcgccagtaatcccagctactggggaggctgaggcaggagaatcatttgaacccgggaggcagaggttgcatcgagccgagattgcaccattgcactccagcctgggtgacagggcgagaggcgagactctgtctcaaaaaaaaaaaaaaaaaaaaaaaaacccgggagaaatgtttttaatgtatcattaatatcctcagagagactggagaagatattgtatccataaaacaagaatagtgtactgttttaaaagaaaaaaagaatcagacttgaaaactaaaatgatgtttaaaaatctttaattcatagaaaagttggaagataaagctgagaaatcttacagaaagttaaaaagataaattgatggtcataaagggagagtagataggaaaattagagactaatcaaagaggtcccatatatatttaattggaaatcaggaaaagagaatagagaaagtggagaggaggaaatgatcaaagaaatagtacaggaaaacatccgagggctggacagactgaaagggctaatggagtagccaataaaattagtgcaggaaaaagaaattgtgccatgatgaaatttaagactaccaaaaaaagatagtgaaagtttgactgtcagtagcaacactgcaagctgaaaaacaaaggactggtgctttcaaaattctagatacaaattattgcccatctagaattctatatccagccaaatcatcactcagatatacaatattcagatattccaagtctccacaaaaaaatagtaaaaataaaattaaaaaaacttaccatgtacatactccccttcgggaatttactaaagaaaatattccatccaaacagaatgaaaaaaaagcagaggaaaacacaggatcaaggaaagagagacaaagggaccccccaggcttagaaaataactagtccagactggagcagaggagacaaagaagcataatggaaaacaggaaattccatgagcagatagatttcaccatgaggaaaattttagaggctgttggaggataaggggaaacttaccaatagaaactaaggaaatgaagcaaattggaagaaaggcaattaattccaggaaaaataaaaatttgttcatagtgtattacttggctcctcagtgttgtattatgggcagaataatgtgaacactgaatattggtttaaccaaaaattgtgatactggaaaaatgggagagagaataggaaagaactgaatcctcatctaccacaataggaaatctgaaattgacgaaacaagagaaagaagtataagcatttaatttagaatttaatttagaaatatgcagatagcaagaagcagctacaagagttaactgtctgcctctgggtggtaaactgggggtgaagggtgggaacaggtagatggcgtgaatacagcattgttcacttaagggtctttcaggactatttgtttcttatcttacactatgtgtgtggcactctctctttgttgctttttttccttttttcttttttttgtggggggtggaatttattggtgggcatgagtaaggaggggcagcacagtggacgccctctcaagtgcagggctttaaaaaaaaaataaggaaaagagctctctgaagccacattgattcagatttgaatcttggagcaaccgttttgctacctttgtgatcctgggaaaataattttaagcttcctgagtctccatttcctcaattgtaatatgaggcaaatacttttattagctatcacctttcatagggttctttagaaacaggtcaactgcctgacccacagaaaagccttcaatagaagctttctgcctgtgttaattacctggcacccttcattcctctctggacatcttgacctcttgctcctcatcagtcccccaggtgtgtttgcatgtttcaccttagctctaatgtgacgaagaaggtttttttcttgtttaaaaaaaataagctggtgacccttgatctagaaatcagttcctctgaggagtagctttggtgatggagaaacactgttcgccctatgggaaaggaaaacttgagtcatactctttcagccactggtgagcaaaagcttaggtgagaaccagacatcttagaagcctccaggatctcccatttgtgcccacaaacatttccagccttaatcccttttgctgatgtaataagattcttcagctggatgatgaaaactgagcccatggtgttgtgattatgagctcagctacctgctactggcaggtgatagctgcacctgtgaggctggtcagcttcccacacacccagggtgcctgcggcctcctgcaccctaagccctgccctgacctggccactaattattgaacagggagtgaggtttcctggtagagattatctattttactgccaggattatgctctatgcaaagcacaggtccaggcactggggatgacatagagatacatgtacatttggcctcaaaggagtttaccatttaatgagggagatagataatcaccatccaatagacaaggaaataaacgaagtgggtaggagaagggctgctggcgggctgcatgtgggataagtaagaccttgggtctacatgtgggaatgctgctttggagcttccattgcaagcctgggagcaggtgagcacccagctcaggtgatcttctttaagcaaaagcaagtcttcaaatatgtgtgatgttttatccttggggcggcagtgggagggggtggtctctgaatactgacagtccttatggaagaggatagtgccttgtgggcagggtgaccctacaattcagtatccaaacagggacacttgagagtgaaggtaatgaaagataaccagcattccaggacacgtatagccagggcttgccctggcaaaccagacatatgatctctggacttaacgggagcttggtaattataaagcggggtagagtcagtgacctagggaccagaagagaatagattctggctgggcacagtggctcatgcctgtaattccagcattttagggggccgaggcaggaggatagcttgaggccaggagttcaaaatgagcctgggcaacatagtgagaacttcatctctacaaaattaataaataaattagccaggtatggtagcacgcacctgtagtcccagccactcatgaggctgaggcaggaggatcgcttgagcctgggagttaaggctgcagtaagccataattgcaccagcctaggcaatggagcaagaccctgtctcgaaaaaaaaaagagagagagaaaatagattcctactcagtctgaatgtctaggtctcatgcaggttcaaaaggcttctcaggcagctcccccagacaccctgggtaagagccactggcggtggggtgggggtgggctggtctctcttgacacatttcctcctcagaatgactgctcaaggggcccattttcaccagtgaccagcatcagtccacctctctgggtgggactcctcaaaaagccgcatatgttctggccaagctacttaaagattaaatgtttattttctgcttccctggcgccttagctcctcctgcatggaaaccaattcagagtttgccttggtgtggtttttaattgccatgccaaagtcccgtacccttatagtgcttttcaaagagtaattcttattccaaaaccacttcacagtgatttcacagtgtaagaaataatatagaaaaagctctaaccaattgctgttttatcaaagaaattaacagttgatgtgagaggacagccctaatgacctagcactgttaccccatttcattctgtatcctgatagaataaaggtcatagagtaacagaatttacaacgtaaaattatacctatttatttgtctcttccaccaacctgtgatttcctggaggacataaattacattattaacataagatattaaaaccatcaccgggctggtctgaaggtagtgagttacctcaattgattgttcacagttatagatcaaacttcttgttctactctttcccctcttctcactactgtacttgactagtctttgttaacaattaaaaataataaaataaaataaataaaaccatcattggcatggacatatttgtggggtctcctaaatgactgtggttgaatggaaggcagcctggtcatagccccacctctcttgctgacaccagagagactcctttcagtccttacacccaaaacagactttcctttgtgatctttacttacagcaaatcatattcttcccaggccacctgaggcaactgggaggtggcctcctccttctcttcccctccccatcccactgggacagttttgttgtctcggttcagctctgcctgatcttatgaacactggagtctacctgttaaatggggcagggcatggtcaagactcttccctgcagttcccacaggatccaactgttgctctttaatggctttgtggaaaatggctttctctctctctctgtcgctcactggactgtgtttcctggtttcttctttattgtcataaaaatcctagacactgctcagggtcccactggtagtagattgtgcccatctctgacagatctttcccatgtggctcttcctttctggaaattcaccagtgttcaccagccccatcaagaaaactatgaacatattatacacattattctaactttagattggatatggattaaatgttggcatcacctggttctgtcagattgcctcatctggctccttagaaaccaaaatgggagaattcacatgttttggttgttaaatcatagttccagctgtcagaccatactgcttgtgctagaggaatagggaacgatgtgtgtgggtggcaggaaaaaggcagacactaaggggcatttataaccaacataaatatgtaataaaggcaatgtcagtataaattaaatacatacaaaataaaggcaattattaatatgtaagcataggctccagagatgtttcagtttggtctccttcttctcccccaccacagaaaccaaatgaccgtgatcataaagtgagactggcactgggaaatggcttacgaggagatgtgtggagacaatttgtcaagagatttggggacatatgcatctatgagttctatgctgccactgaaggcaatattggatttatgaattatgcgagaaaagttggtgctgttggaagagtaaactacctacagaaagtaagtacattgaaaaatgagagcatacgtagccagttttcagaatacagagacttcttaaaagccaagtcatgatgatgttatcagaagtcaggcagcatcagagccatggcccattcctatcaccaagagaagttttgctcattctctgtgatgatgacttcaaaaaatcagatcctccaattaaaagcatctcaacttctattaagaacaatccattgtgcccttgccatctgcaacttaggtgaagtcttcctgatgccatttatacttgcatgtgataaaacacctgaaggttacaagttccgtaagctaatcgtacactgtgaaacatagtatttccctttaattgtgtcgtgcagcaccatcacctggggagttttttttatatgcacagatgcaaggaccaacccgctaggctttggattcagttgttctgaggtggagcccaggcatctcagtgctaggatctggtgaacatttatgtctacctaataattccaccagaaagatatttgtaagccagctcacatagccgtctcttttccctgtcagtcattttattgctcatgggtctctgttgtcttttttgtactcaagcagtcagtcttccagataaccaacaattctgcaaatatccagaaatgttcagcaaatgctgagcctcctttggcttgagaagtcactgcggtcattgtgcctctgggcagctcatcctttctggccatgaaacagccgcaccagaactcccacgcaacctgtgtccccagggacaggccagcagaatacagaggacagtagttcatgtgcgtaagagccctggctgtggagagcaaatctcagtgccaccatatgctagctgagtgaccttgggcaggtcacatatgctcctcaggcctcaatttcatcatctgtaaaacagagataacaagagaaaatattgaacccagtgcctagcccacactcgataagggaaaaggattgttgaaaggattaaacagccaggcgcaacggctcacgcctgtaatcccagcactttggaaggccgaggcaggtggatcatgagatcaggagatcgagaccatcctggctaacacggtgaaaccccgtctctactaaaaataaaaaaaattagccgggcatggtggcgggagcctgtaatcccagctactcgggaggctgaggcaggagaatggcgtgaacccgggaggcggagcttgcagtgagtcgagatcgcgccactgcactccagcctgggcaacagagcgaaactccatctcaaaaaaaagaaaggattaaataacttatgaaaaggcccttagaggctatagcccaatgcctgtcatttaacagccttgaataattgttagccgtaatgatgataatcactctatttcttatattctggcctaatctcaaggtgttcccaagttcaaggaccctctctgacaatgacagctccacctacgctacacaagtccctccacagtcctctagacctgcgctgtccaaacagtagccactagctacatgtggctacttaaatttaagttatattaataaaagtttaaatccagttcttcagtcacactagccacatttccagtgctgaatagccacgtgtggttagtaactaccgtattgagcaatgcagacagagaatatttccatcatcacagcagattcctgggcagtgctgctgcagactgagaatcgatctcctacaccccactggaactgctgctgagggtcagctaatgctgtatattacccattctttactttctcatccattgattgccatattttattgtcagtttttctactttaagcaaaacattaaaaaaaaaaactttaaaaaccggatgatcccatgcaattgatgtagaaaagaacatttattactacctataaattttttacattcctgcaaataagatctacatttgttgaccataaacaccacttgtttttttaacaagtactagctgtctgctaatactaaagcatatgattgtttgcttcatcacatagacttgaatataaatttgaaatagacacagtaatcatggctaataattatatccaaatactgtcatgtttgcatttttcttccaacaaggaaaataatatatttattattgctcttactgaattgctgataattaaattcttatgctttgaattatatgttaaatatgatagagttttcataattttatagtcatgggcatgaaataattatggcttcgattctaaaatatattagataacatttccttagaaacatgaaaaatctaatagtgtcatattaatataaggttatacaagattttaaaaacccatttgtgatacatccaccaaaagacacaagaatgttcataacagctttatttataataggccaaaactagaaataatccaaatacccattaacaggaaaatagataaataaatcgtggtatgtttatacaagggaaaattgcatggcaataaaaaacaccaacatggatggatgaatattatagacatatttagtgaaagaagcagacacagaagcatacatttatttcatttatttgatatttaagattaattgacagcagtataagtcagaatagtagttaacttcacagaaaagggcaggaggaaactttctaggtgaaatgaaagttttctctgtctctctctgggtggcagttttaagggtatatgcaaatgcaaaatttcttcaacctgtacgcctaagatatactttgtgttataccacaattaaaaagggaaaaattataaaagatttatactcaaaattattttaatcttgctagaaaatcataacttatgacctgattaaatatgatgtggagaaagatgaacctgtccgtgatgaaaatggatattgcgtcagagttcccaaaggtacagtggacttttgttcaatcaacctgtgccccttcttatcttgatcaagtgacttttaaggactaacatattattgccacatggtaaaatttatcagagtggggaaaaggggggtttatttaagtaccctccaatatacaggaattccaaaggtgctaatttaccgctgcatgtaacataattctagttttaaacatagcttaacaacttcttgcttatgaggtaatgttttgtgggaagggatatgtaattgtggttgcaaaactatagttttaggtggcctttacctttaagctttaacaactgtgcgtttgtgtaagtgtgcataaatcattattcagtaaaaaattagcagtaaaagaattacaggccaggtgtggtggctcacgcctgtaatcccaacactttgggaggttgaggaaggctgatcatttgagataaggagttcgagaccagcctggccaacatggcaaaatcctgtccctactgaaaatacaaaaattagctgggcacgatggcacacacctgtaaccccagctacttgggaggctgaggcaggagaatcccttgaccatgggaggcagaggttgcagtgagccgagactgcaccactgtactccagcctgggcaacagggcaagattccatctcagaaaaataaaaataaaagtaaaataattaggccatatacaataatgtacagtatatgtgtgtgtggtgtatgtatgtgtgtctgtaatatatatgtacatataattcacaggtatacatgcatggaaaatgatacttcctacagccagcttgttgccagcaggttgtatggcattagttttaagagaaggttgatgtataaatttgacctctagcacataaaataagtttactttcttctgtcttaggtgaagttggacttctggtttgcaaaatcacacaacttacaccatttaatggctatgctggagcaaaggctcagacagagaagaaaaaactgagagatgtctttaagaaaggagacctctatttcaacagtggagatctcttaatggttgaccatgaaaatttcatctatttccacgacagagttggagatacattccggttggtttttctgaatcattgagccaaaaacaaacacacgcacagtttggcttactcctagtggaatcgcattccactttggttatggtgcatttccttctctatctttggcacatcaggtcaaactcctgtgttcccagagaatgaggaatgaagtgcatgaagtgtcactctgcagtgcacggttaacttggctgagcaacaccagatgagaataaggcaggaaacctgtatctgatttctggagacaaaagtacatttaactcctcttgtttctcctgcattattactggtcactcttaggacagccaaggattttcacctttccaatcatggaggtgtttagataaaatcagatgcaaattaatgtggagctgatctagttgaagaggaggtgaggggttcggagccccttcccccaacccctttcatccccaaccagatggtttcccacagaacccccaggtcagcacaaggaagtttggaagtccttctaacagaccatggaattaacttccaaccatagcacagtcctccagcctcatgacacagcttccttcctgtgtaaactccctgagggcagcccctgtgtctgcctgttcacccccagcacctaccatggtgcctggtgtcattttttgcatgaatgaatgaggaagggatggaagttgtctaactgcagtagaaagacagcaggtggaatgaggagaaccaggctcacctctcccactgagcagcagtggtatcaagacagataaccattctggacctcagtccttttgcccttgag

SEQ ID NO: 8198 - DNA, 17965 bp, Homo sapiens
  SITE (488): n equals a,t,g, or c
ccacagaaaccaaatgaccgtgatcataaagtgagactggcactgggaaatggcttacgaggagatgtgtggagacaatttgtcaagagatttggggacatatgcatctatgagttctatgctgccactgaaggcaatattggatttatgaattatgcgagaaaagttggtgctgttggaagagtaaactacctacagaaagtaagtacattgaaaaatgagagcatacgtagccagttttcagaatacagagacttcttaaaagccaagtcatgatgatgttatcagaagtcaggcagcatcagagccatggcccattcctatcaccaagagaagttttgctcatcgtcggtgatgatggatcaaaaagatcagatcctccaattaaaaggatctcactttttattaaggaacaatccatttgtcccttggccatctgcaacttaggtgaagtcttcctgatgccatttatacttgcatgtgataanacacttgaaggttacaagttccgtaagctaatggtacactgtgaaacatagtatttccctttaattgtgtcgtgcagcaccatcacctggggagttttttttatatgcacagatgcaaggaccaacccgctaggctttggattcagttgttctgaggtggagcccaggcatctcagtgctaggatctggtgaacatttatgtctacctaataattccaccagaaagatatttgtaagccagctcacatagccgtctcttttccctgtcagtcattttattgctcatgggtctctgttgtcttttttgtactcaagcagtcagtcttccagataaccaacaattctgcaaatatccagaaatgttcagcaaatgctgagcctcctttggcttgagaagtcactgcggtcattgtgcctctgggcagctcatcctttctggccatgaaacagccgcaccagaactcccacgcaacctgtgtccccagggacaggccagcagaatacagaggacagtagttcatgtgcgtaagagccctggctgtggagagcaaatctcagtgccaccatatgctagctgagtgaccttgggcaggtcacatatgttcctcaggcctcaatttcatcatctgtaaaacagagataacaagagaaaatattgaacccagtgcctagcccacactcgataagggaaaaggattgttgaaaggattaaacagccaggcgcagcggctcacgcctgtaatcccagcactttgggaggccgaggcaggtggatcatgagatcaggagatcgagaccatcctggctaacacggtgaaaccccgtctctactaaaaataaaaaaaattagccgggcatggtggcgggagcctgtaatcccagctactcgggaggctgaggcaggagaatggcgtgaacccgggaggcggagcttgcagtgagtcgagatcgcgccactgcactccagcctgggcaacagagcgaaactccatctcaaaaaaaagaaaggattaaataacttatgaaaaggcccttagaggctatagcccaatgcctgtcatttaacagccttgaataattgttagccgtaatgatgataatcactctatttcttatattctggcctaatctcaaggtgttcccaagttcaaggaccctctctgacaatgacagctccacctacgctacacaagtccctccacagtcctctagacctgcgctgtccaaacagtagccactagctacatgtggctacttaaatttaagttatattaataaaagtttaaatccagttcttcagtcacactagccacatttccagtgctgaatagccacgtgtggttagtaactaccgtattgagcaatgcagacagagaatatttccatcatcacagcagattcctgggcagtgctgctgcagactgagaatcgatctcctacaccccactggaactgctgctgagggtcagctaatgctgtatattacccattctttactttctcatccattgattgccatattttattgtcagtttttctactttaagcaaaacattaaaaaaaaaaactttaaaaaccggatgatcccatgcaattgatgtagaaaagaacatttattactacctataaattttttacattcctgcaaataagatctacatttgttgaccataaacaccacttgtttttttaacaagtactagctgtctgctaatactaaagcatatgattgtttgcttcatcacatagacttgaatataaatttgaaatagacacagtaatcatggctaataattatatccaaatactgtcatgtttgcatttttcttccaacaaggaaaataatatatttattattgctcttactgaattgctgataattaaattctcatgctttgaattatatgttaaatatgatagagttttcataattttatagtcatgggcatgaaataattatggcttcgattctaaaatatattagataacatttccttagaaacatgaaaaatctaatagtgtcatattaatataaggttatacaagattttaaaaacccatttgtgatacatccaccaaaagacacaagaatgttcataacagctttatttataataggccaaaactagaaataatccaaatacccattaacaggaaaatagataaataaatcgtggtatgtttatacaagggaaaattgcatggcaataaaaaacaccaacatggatggatgaatattatagacatatttagtgaaagaagcagacacagaagcatacatttatttcatttatttgatatttaagattaattgacagcagtataagtcagaatagtagttaacttcacagaaaagggcaggaggaaactttctaggtgaaatgaaagttttctctgtctctctctgggtggcagttttaagggtatatgcaaatgcaaaatttcttcaacctgtacgcctaagatatactttgtgttataccacaattaaaaagggaaaaattataaaagatttatactcaaaattattttaatcttgctagaaaatcataacttatgacctgattaaatatgatgtggagaaagatgaacctgtccgtgatgaaaatggatattgcgtcagagttcccaaaggtacagtggacttttgttcaatcaacctgtgccccttcttatcttgatcaagtgacttttaaggactaacatattattgccacatggtaaaatttatcagagtggggaaaaggggggtttatttaagtaccctccaatatacaggaattccaaaggtgctaatttaccgctgcatgtaacataattctagttttaaacatagcttaacaacttcttgcttatgaggtaatgttttgtgggaagggatatgtaattgtggttgcaaaactatagttttaggtggcctttacctttaagctttaacaactgtgcgtttgtgtaagtgtgcataaatcattattcagtaaaaaattagcagtaaaagaattacaggccaggtgtggtggctcacgcctgtaatcccaacactttgggaggttgaggaaggctgatcatttgagataaggagttcgagaccagcctggccaacatggcaaaatcctgtccctactgaaaatacaaaaattagctgggcacgatggcacacacctgtaaccccagctacttgggaggctgaggcaggagaatcccttgaccatgggaggcagaggttgcagtgagccgagactgcaccactgtactccagcctgggcaacagggcaagattccatctcagaaaaataaaaataaaagtaaaataattaggccatatacaataatgtacagtatatgtgtgtgtggtgtatgtatgtgtgtctgtaatatatatgtacatataattcacaggtatacatgcatggaaaatgatacttcctacagccagcttgttgccagcaggttgtatggcattagttttaagagaaggttgatgtataaatttgacctctagcacataaaataagtttactttcttctgtcttaggtgaagttggacttctggtttgcaaaatcacacaacttacaccatttaatggctatgctggagcaaaggctcagacagagaagaaaaaactgagagatgtctttaagaaaggagacctctatttcaacagtggagatctcttaatggttgaccatgaaaatttcatctatttccacgacagagttggagatacattccggttggtttttctgaatcattgagccaaaaacaaacacacgcacagtttggcttactcctagtggaatcgcattccactttggttatggtgcatttccttctctatctttggcacatcaggtcaaactcctgtgttcccagagaatgaggaatgaagtgcatgaagtgtcactctgcagtgcacggttaacttggctgagcaacaccagatgagaataaggcaggaaacctgtatctgatttctggagacaaaagtacatttaactcctcttgtttctcctgcattattactggtcactcttaggacagccaaggattttcacctttccaatcatggaggtgtttagataaaatcagatgcaaattaatgtggagctgatctagttgaagaggaggtgaggggttcggagccccttcccccaacccctttcatccccaaccagatggtttcccacagaacccccaggtcagcacaaggaagtttggaagtccttctaacagaccatggaattaacttccaaccatagcacagtcctccagcctcatgacacagcttccttcctgtgtaaactccctgagggcaggccctgtgtctgcctgttcacccccagcacctaccatggtgcctggtgtcattttttgcatgaatgaatgaggaagggatggaagttgtctaactgcagtagaaagacagcaggtggaatgaggagaaccaggctcacctctcccactgagcagcagtggtatcaagacagataaccattctggacctcagtccttttgcccttgagatgtgggtcacgatgattctcagggtccttccatctctactattccatgtcttaagatccatatcactttatgccatcttcatgttattaagatgatacttctgggagggctaaagaatttttaatgggccaggcgtggtggctaacgcctgtaatcccagcagtttgggaggccgaggcgggtggatcacctgaggtcaggagttccagaccagcctggccaacaaggtaaaatcctgtctctactaaaagtacaaaaattgctggacatagtggcacgcgcctgtagtcccagctacttgggaggctgaggcaaaagaatcacttgaacctgggagacggaggttgcagtgagctgagattgcaccactgcactccagcctaagtgatagaatgagactctgcctcaaaaaaaaaaaaaaaaaaaaaaaagaatttttaatgaaaacaaaatttaactctttattaagtgaaaaatagcacctggttgggccttaacattagaatctccctgtaactaaagtgtgattttttttttcctttcttgttgccgtgagaccctgaaataaaatatgaagttctattaaaaagaacttcagaaactgaattaagtagcaactgagttagtaaatgagaaattgagagacctaaacagcagaaaatcgttgagatttctttctaatttccactgcctttcttagctagggctgtattttaacattagaacattattctgtgtattgtgtttcatgtggcaacattgaaattccatattttgttatctaggtctatacttttcccttttatgcctcaaacaagataccccggccaggactaagttggggagtttgaggggccaagatgaggaacacgagatcaggatcatgcagaaatctaaaggaaacaccagctctccgacattgcaacctgggccagaaaccaccagtgacctctgctaactttgtcctttcttccaggtggaaaggggaaaatgtggccaccactgaagttgctgatacagttggactggttgattttgtccaagaagtaaatgtttatggagtgcatgtgccaggtatatacaagatatgatctgtacctaaacccatagagtaactgaacataattttggcctcaaggcgaagtttgtcattgctttctcccgccatccagagttaaacagttctttcagctgccagggagtaaggagcttatgtctggcttatgttccactataaaagccaactcagtgcatctgaacatggccttctcttcatttcagctcccagccattcttgggctctcaggcaaacaaagtctcaaatatgggagctccatgccacatttggcacacctcgagaaaagtcgtgtcatgcttaagagctgggaaatgatgtcctagcctctgaactaggaggcaaaaagaagagccagtgcagttgctagaagaaaaagctggggaaaagtggattttgtacagcctcttctttttaagatttctaagcccagttcaccacactaagtttcagaatcatcacacaagaacgttgtcaccgcagcttcatctgcagatccacttctgccagcagagtcaggagggccagtgtctgaccttgaatcctggcttcaacatctgctggctgtttgactgcaggcaaatcactaaaattaaggataatgccagccctgcagttaagcttgtcaagagaacaaattcattttaattacatcaacgctaagcatatatttatcaaatatatatataagggttgttgtgacaataaatcacattaataatagacatcagagaggattccagcctcaaaattactgtccaaatataaggcattaggggtattattattcccccacaactcatatttgggattcccacccatattcaaagtagaaatctaaaagtccctttttcccaagctctgacacttctacatggccctgtgcttgttattttttaaagaatattcaaggccgagcatggtggctcactcctgtaatcccagcactttgggaggccgagacgggcagatcatgaggtcaggagatcgagagtatactggccaacatggtgaaaccccatctctactaaaaatacaaaaattagctgggtgtggtggcacgtgcctatagtcccagctactcgggaggctgaggcaggagaatcgcttgaaccagggagtcggaggttgcagtgagccgagatcgtgccattgcactccagcctgggcaacagagcaagactctgtctcaccaaaaaaaaaaaaaaaaaaaattaagtccggacactgtggctcacacctgtaatcccagcactttgggaggccaaggcggatggatcacttgaggtcaggagcttgagaccagcctggccaacatggcaaaacttagtctctactaaaaatacaaacattagccaggggtggtggctcccatctgtaatcccagctacttgggaggctgaggcaggagaatcacttgaacccgggagatggaggctgcagtgagccaagatctcaccactgcactccagcctgggtgacagagtgaggctccatctcaaaaaaacaaaaagaatattcaagaatatctcttgcttgttcctccccaactcagggacaatgacacgaggggaaatatggccacatcttgatgtgagaggggacagaatggaagggggtgtgaatactcccattggagaactccccaggccttatgctgagttaacacaagggtctaagttgtggttgtcagccattgtgccaccctacgctcttgcagacccttcctcaaatgttgtgtaaacatctaaatgcttgattttaaaaagaagaatcatacaaaagagtatgtgtgaggtgagagaatctagaagatgaaacagaaggatctagcctagtgttcctcaaagtgggtccccagatcagcagtgtcagcatcacccaggagtctgttacaagtgtaatttctcaggcccaccccgaactaccaagtcaaaatctctggggtggggccaggaaactgtgctggcacaaacaccccagagattcttaaaaacattggaagtctgatttagggggtgatgaaaatgcactagaactagatcctggtaatgatagtacaacattgtaagtgtgtaaaataccactgaattgtacactttttttttttttttttttgagacggagtttcgctctcgttgcccaggctggagtgcaatggcgcgatctcggctcactgtaacctctgcctcccatgttcaagcggcaattctcctgcctcagcctcctgagtagctgggattacaggcatgcacgaccaggcccggctaattttgtatttttagtaaagatggggtttcaccatgttggtcaggctgctctcgaactcctaacctccggtgatccacaccccgaccttggcctcccaaagtgctgggattacaggcatgagccaccacgcctagcaaattgtacactttaaaaatgagttggaatgataaattttatgttatgtgtttatcacaatttaaaaaaaaacacacacactgaagtctgagaagcactaaagcccagtggttccaaaaatttggccaatcatcagaaccatctgggaaactttttaaagcctggatctaatggaccagaagctctggagtatgggactcagaatctgcatgtcttttttttaattcccaagtgaatctaatgatcagtgagttctgggagccactgaaacagaacaaagggaaggagattgacagtcttacagtgttggcagacagtcagataggatgaggagcaggtgtgttctgtgctgctccagtgatcagaactaaaaccaatggattaaaatgaccagggagccagttttagcctgagaactcccctgtaaccaaaggaaccatcaatagaatgggcttgtctcccaggataggaaatgcccccaccaactagggcatgtaaagagaggctggatgtccacctgggatcctgggagaactcttgcagcagtgaaagattagagataaattctaaagtccctcccaactttcagattctgtgattcccagtgccacaactgctgctgtctggccccccatccacagaggccagtcccattccagactagaaatgcagcagtactgtctgaagtaaggcatcattccactatgggtgattctgcacaaggcaatcacacacctcagctttggaacaggagagaatttccaggtttgggcctggagaggagttcactttttctaggtgtcacacctgaactgcccaactactctgtagaactttctgcaatgatggaaatgttccatatctgcactgtccagtatgatagccaatagccaccatgtcactatggaacacttgaaatgtggctagtgcaactaaggaactgaatttttcataatatttaattataatttattttagttttaatagccacaaataaccagtgggtgtcatattagacagtgcagctctagagaacccttggccaaaattgacctttacaattagcccagagctcctataggctggaaccattccccctgaagctgaactagtcccaaaccaccctccgagagttggggcagaggcctgagacctgacaggcccatttgcccgtaggtccagcgtcgctactaccagagcaagaagcaaggagacggtgaatgtggaggatttctgttgcatgagccttaattctaaaaggagcttattggagacacttgagatttctaagacaggtgctagggaccctaaactaagaggatctggtgccactgcctctctccctcagacaagaagcaaaccaaatgagggggcatctttttttccttttgctgtttgccttctttagagctataggtaaacacacaatcaccataggagagatttcgaaagctggggcccaggtaaccaagggaggctcctgtctcctctctgattacagctgagtagtttagggaagtggaactggactcccgctgggtctgctggatcaggtagaagatacattaatacctaattaccactgtcctcacaagaaggcagtggtaattgttggaaacttctctgggctaaattccctgatgtaggatctgttctctctgtggagagcacatcctcttgggactaatgggccttaatgggagggcacaaaacagctcctccctgtgcctgccttcacctcctgtcccacatcctctccaaaatgcagacaagaaaagccattagaaccttgattagataagtaggtctccaaggtggtatttgtgcccagaagtgcaacaaacctgacattgcaacctgaagaacaacccaagctcagtaagtcatgcatggaggtggagcaaggactttcactggagtctaaagtaacttcctgtagccaccagtccaacctactccctactaagatgtgtttgtataggctgctagaaagaaggatgatggttataagcacaggatctggagccaggctgcctgaattcaattctgtaccctgcctagtatttgctgtctgaccttgaataagtctcttaatgtctttaagcctcagtttcttcatctgtaaaatggaaataatatctacatctcttcagaaggttgttgtgaggattaagtgagatcatcaatacaacacacttagtatagggcctggaatataataaagattcaaccaactgttattattgctattagtattagtacaatcactttacagtatcttcatgtatttttaataaaaattccagctatccaaatgaaacccatgctataaatgttgtctgagcccacagttctttgaactaataaagcatcataaatagccttaacacttctaattttttctcactttatttctagatcatgagggtcgcattggcatggcctccatcaaaatgaaagaaaaccatgaatttgatggaaagaaactctttcagcacattgctgattacctacctagttatgcaaggccccggtttctaagaatacaggtgagatctcttattatccagttcaatgatctgtcctcttggagattcctaccacttagggaacaactcgccttctcccaggatgactacatttgccaagttttcaccgcactttccaggaagctcagaaaagtgtcatagaccaataaggaagtggtaatatcaggctgggtgcggtggctcatgcctgtaatcccagcactttgggaggccgaggtgggaagattgcttgagctcaggagtttgagaccagcctaggcaacgtagtgagacttcatgtctactaaaaatgaaaatttttaaaaaaggccaaacgcggtggctcacgcctataatcctaacactttgggagacagaggcaggtggatcacctgaggtcgggggttcgagatcagcctggctaacatggtgaaacccggtctctactaaatagacaaaattagctgggcgtggtagtgcatgcctgtagccccagctactcgggaggctgggacaggagaatcgcttgaacctaggaggaggaggttgcagtgagctgggatcacgccactgcactccagcctgagcaatggagtgagactccatctccaaaaaaaaaaaaaaaaaaacaattagccaggcatggtgatgtgcacttgtagtctcatctacgtgggaggctgaggcaggaggattagttgagcctggcaaatcaaggctgcagtgaggtatgattgcaccactgtactccagcctgggcatcagagcaaggcccagtctaaaaaaaaatatatcagaaaacagctagaagaaatccaatcctaatccctttctccttacaatgacaggccagttcattcagcaagagacttagcacataactcacaaagtctgtttggtgagtcctgacagatagcgcaaatagaaatgctctgaccctgtttgttgtttccagttttaaagaacacagaaatccacagaagttctacacctttctgtggtgtgaaatttaattggacattagccagctggaattgcctaagacttaactatcaccgctaggaggattttttttcttcctccaacattaaccctttggttggtttaatactctcacttttagactttgagctctgtgattctgtagctgaagacttgacaaaggaggtcttaagattccagatattgtgtgtataggattattcctgttgatgttcatagggcaccaacatttgctttgcaaccagatggtaaagtggcatgaaaatgaaatatcctcagatattttgattaacacataattgaaggaaaaatcagtcttcaatctaatctaatagacaagcagactgagaaaacagagttgtctgtaaatgatccctccttctaatcccaccatgaatcaggatatcctagcggtacctgaagccttaccaagaaataggcaccacccctctgctcagaaatctatgcacaggtatctcatccttggcaggtcctccctccccacaggtgatcctaaagctttaagggaataaaaaatacctcacaaagggctccctaatggagatcctgcaaacagaatgtatgggtatcatataaaactttcacttcgctagaaaatgtaaagagtggatgttacttgcccctaccacaaaaatgatatctatatgaagtaatccatttgctaactagccaaactattccacgatgtatatgtacttcagcacatcatattgtacatgagaaaaacacacaatgttatctgtccatttaaaaataaattaaaatggaaaactttattttaactttcacttcccagctctcacatgagccagggatgctaatgatttgctagatccccatgccccacccctaccccttgctctgcatcctaatctattgcaaaatgcaaccaaaatgtggattatttgatgtttttcaggacaccattgagatcactggaacttttaaacaccgcaaaatgaccctggtggaggagggctttaaccctgctgtcatcaaagatgccttgtatttcttggatgacacagcaaaaatgtatgtgcctatgactgaggacatctataatgccataagtgctaaaaccctgaaactctgaatattcccaggaggataactcaacatttccagaaagaaactgaatggacagccacttgatataatccaactttaatttgattgaagattgtgaggaaattttgtaggaaatttgcatacccgtaaagggagacttttttaaataacagttgagtctttgcaagtaaaaagatttagagattattatttttcagtgtgcacctactgtttgtatttgcaaactgagcttgttggagggaaggcattattttttaaaatacttagtaaattaaatgaacaccaacatgtgagatggcactgtctctgtgttctttcctcactttactctaaatacaaagcctgtgtcaattactccaaagcctgaagtcctcactggtaacttttcataggtgtcccattcgtaagagtaaagacgttctaggtaaaaatggctgggaacggggggtggggtgagggatggtagggtgaggcggctagatcagcagtggccaacacaatggaaatctactccaatgtgaggaggccaactttccctacccggaggcatcctgtccactgtgtataggtagcattatccaacaggtaataatgccatctatagtccttacaggagcctaattctatggcatcagagttctgtacacaaaaggtgttcaggccgggctcagtggctcacgcctataattctagcactttgggaggccgaggcaggtgggtcacgagatcaggagttcaagaccagcctagccaagatggtgaaaccccatctctactaaaaaaatacaaaattagccaggcgcagtggcaggcgcctgtaatcccagccactcgggaggccgaggcaggacaatcgcttgaacccgggcggcagaggttgcagtgagccaagatcacatcactgcactctagcctggatgacagagtgagatgccgtcttaaaaaaacaaacaaacaaacaaacaaaggtgttcaatacattttagctactttaggggttgcaaactcaagtgtcttcagaattcacataggtaatgtggatgagaaaagcaggtcacaaatgaatgtggtaaacttggggacggccactaagcttcagtcagctaaatacaggccaagtattgctggaattttttaattattcagaaaacagaaatccatcagaacttattaacattagtgtcactaaagttgatctacaaccaccccccccgcccacatacacactctcacaactacgaagtttgactggctttttaaaaagaaaacaaatccagatatgtatgtgaatctcccaatttttgaaatctgaagtctcaaaatttttaaaacttctatgcatcccaaacaaaatgtgtgtctgggccagataaatcccagctgtccagttagcacccgagtcccacttacatgtgcccctactcctcagatggcaactggtttcactccaaagccagtctcctgcccacggacccttttcaaagaccggaggacctttagggtggcacgggaggctttgggaaattctgaggagctctttcacataagccctttctccttagacccagctgcctcccttcctgggtttaattgctttacctctgcatgtatgagctgcaacagaattccaggagcaggtcatgggtgaaagcattcaagacgacatgtaccttacctagagcttgtcctaggcatgggagcatcatggtcattgagttcacatccagaaagcatggcccaagtttaccacagcctctctagaagtttctgtcatggagtttccttccctagaggacatcttcagatgaccaggagctggtaatgtgtgctaattctcccccagtttagtccccataaagccccaggcaaacacttctaggacttctcaatgatacatgatgagaggtgttgccacccccagccccaacagagtactagaaatattttttttaactctctccactcttttgggtgactttaagaagaatcatgaccaaaatccttgcccccactcattatacctaacaataaacatttcctgagtgcttaatatacactgaggacttgaggagggtctaaagaaaactctagataggctgcacctttgtgaattttgccagtaattagaatgattattgtttgtgggtcagcacttgcgaatttttgcaaaattctctctgcctttgagttacaggagaatgtgaacctaagtagtgggagataggacagcctttgagtatcacattgtgcaattgtgttacctggaatcttgtcaaaggagaaggttgtcagcaggggtcatgttagagcagtggctgcattctgtgtcacaaggggtatctttttgggtaagaggtcagcatttacactgttggccagaatattcgtgttatattaaccagaacctggttgccctgatctcatttgacccatgttttagaccttccagtcagaaactcagagacccaggtcctcgcatccacaccctgcccagctctgcctcccagcctgatggtttcctcagtcttccacttccccacacctccctgaatctggccaggtaacacagctccattgagataaatagagacacccccacaatgtcctcagcccctaggtttgcatgtatgtaaacaattttaagccatcacctgtgagagataataccttaaagactgatttttctctttgaaaagggtaagaaattgtgcccaagaaatatctgcacaagtcattctcatttgaaaatataagtgaatttaaaaaaataagctgatatccatgtaaattatccaacagggctttgatttcaaatgtattgtttggaaacctgtaatcagtgcatagatgggatgctataggcaccaaaataatttggggataaaagtaggaaatgtcagcctctgaaatggatgctaatgagaatcagtattaaaatgggtaaagttagccaggcatggtggggtgtgcctataatcccagctactcgggagactgaggcaggaggatcacttgagcccaggagtttgagtccagcctgggcaacatggtgagatcgcatctccaaaaaaaaaaaaaaaaagataggtttaactaactgcagtgactcaacctaagagataatttgctaaatgtgtcgttcattcatacatccaccctacaagcacttagtgggtgcctgctacgcaccaagaaatgttctcagcacaagagtgctgagtcccatccccccaaactagaattggagtttgcatttctaacaaatgcccaggtgaggctaatgctgtgggacgggggccacatttggggaatcactgacatcctgagttatacaacatgtgcacttacttagtgggtaactcagttcctcagagccaggtcatcccttactaactgaggctcagctcttagctcaagtggctcaaagtgcagtccccaggaaaggcccagcatcaagaagcaccttgtcatcacacaagcctgcaattgctcttggaaatttacatcaattagagcttatatctgcttgctagatacatacacatatattgtgatttgctatagcaaacgaaaagcaatcctagagagtagctagtcaaacctctttacttgataaatgaaaaaactgaggcctgaggttaagtgacatgactgaagtcacacagctaattggcatcactaagctctcacctagtacttgcaggaagagagtaccatcatagaccagtagttctgagtgtggtccctgagccagcagcatcagcagcacctgggaacttgctggaccaacaaattcttggaccctgaaaaattctagacctactgaatcagaaacacagagggtaggcccagacatctgtgttttgacaagccaaagccctcctggtgttactgatgtggactcagtttgacaatcactggcttaaagcagtgcacaagctttactgtgcatgagaatcacttggggacaccagtgctttgagtgcttggagtgcagtgagtgcttggggcacacacactgctttgagtagcatgtcaatctaaagcagtggttcccagatgtccctgcacattagaatcatctggggagccgtcaaaaatcccaaagcccaggcccatgccataccaattagatcaaggattctgggagtgagaaccaagcatcagtatttttttaaggacctccaagtgattccagtatgcagcaaagctcagggatcactagtagagaacaagtggctagttttcagcttttggccaggtgcagtggctcacacctataatcacagcattttgggaagccaagacaggagatgctcttgagcacaggagttcacaatcagcctaggcaacacagagagaccctgtctctacaaaaaaatttttaaaattagccaggccaggcatggtggctcacgcctgtaatcccaacactttgggaggccaaggcaggaggatcacctgagcccaggagttccagaccagcctgggcaacacagggagaccctgtctctgtaaaaagttataaaaattagccaggcatagtggtgtgcactcatagtcccagctactcgtgggactgaggtggaaagacagcttgagcctcagaggctgaggctgcagtgaactgtgttcacaccactgcactcacagaatgagaccccatctcaaaaataaatagctacttgggaggctgaagcaggaggattgctcaagcccaggaagttgaggctgcagtaagacatgattgtgcctctgcactccagcctgggaaagagagaaagcactagtctcaaaaaaaaaaaaaaaaaaaaaaaaaaaaaaaaaa

SEQ ID NO: 8199 - DNA, 101 bp, Homo sapiens
tgaggcaggagaatgctgtgaacccgggaggcggagcttgcagtgagccgagatcgcgccactgcactccagcctgggtgacaaagtgagactctgtctca

SEQ ID NO: 8200 - DNA, 944 bp, Homo sapiens
ttttgtttcagggacaagcataatttatttctgtgttatatatcatgtcacaagctgaaccacagaagctgcctgtctaccctcggccctttctcactgaccagactgctgaacccatctggatcatgctggcttaaactcttcgtttgtatcctattgtgggtcatgaacccctatgagaatttgattaaaattatgaactcgccccaagaaaaatgcatgtacacataagcacacaaagttggcatacaattgtgaggggttcacagagtccctgaagtatatcctcagactctggctgaaggccctgtgtctaaaccatggcctgcagagggcaacagggcagctggagtccacattgagagctgcattcaggaaagctggggacgctgtagaatttgatgagttttttgaaggcacttttcttcagcatcatcatgtcttctggaaacctggaaaagattctgaccctggaggagcccccattcttcacagaggcctctgtgggcagtggcttctgagcactcactggcacactgttgcaactgagggagcgcaccgtcttcttcttagtctgcacagacaagtaactgaacaggaaggaggacagcttgtgcttggtggcatctggggcctcttctgaaaagcagtcatcaactgggtccagcagggtttcaagatggaggccattttcccttttcatgggaccggctcccacacgctgaggctgcttgatgatcttcctggcctggactggatcatctcctgccccactgacagactgaagggacgttccacaggcccaggctctggcacccctgatttgggagatgaggttcccaacccgagggctgggttgggaagtacagtgctgactcaggatgagagtggcagcatctcgaatgagattccagtctctcaggatgtcatccctagtggtaaac

SEQ ID NO: 8201 - DNA, 944 bp, Homo sapiens; identical to SEQ ID NO: 8200

SEQ ID NO: 8202 - DNA, 1153 bp, Homo sapiens
cagctccagggccacgacgtgcaggagatgctgtgccacatcgctaaccgcgaggtgccctgcagccatggggcagagctccagagatctaggagtagggctgggtcggaaaaccagggaaccgggggcaacttcgggagaccagattgcaggctgatcagccaggaaggggtctcggggacaacgggcgaggtttgacgagccaggggtgagcccgagccacgagggaagaaaccagaagaggtgcaggcgggtcctgtgaggctagaggacgcggctggggtatccggatggggagaggcctagtggcagggccccagagaccaggggcggacctgagtgatgagggggtgaagctgggtatcaaggtgcctgcttaaggagggatgggagtgggcagtggtctccagttggaactagggcatatctcggaatggggtagggaggagggggaacgtgacttctcggtggcccctggccccgcccaccttcctctctcgcttcccatccccgcttagttcctcgccagcttagagggaaggctgcccgaatacaacacccgcatcgccctgccccttgccacttccaaggacaagttttttggtcagtatgggtggggggatgaaggggtgcggttggggccccaagctgggtagcaggaggttgtcagataccctgttcagggccaaggtgggggtggagtggggtggtaaagggaaggggagccagggattttttttctggatcccacatcgctggggggtggggcccccaccccccttagacgaagagagtgaggaggaggacaacgaggtagtgacccgcgcatcactcaagatccgttcccagaaattaatcgaaagtcacaagaagcaccgtcgctctcggaggtcctagactcgtcctgacacccaccaggcggcccccttcggagcccccgatccctccgggtctagcgcaggccccacggggccccttcaggggctgaacgcggcccggaccgggaacggaggcggccagcggcgcccggaggggaggaaggggccgggccagacgttcccacagtaaatctccccagctgggtccgccccggcctcagagttgcgcaataaatgttaccgaccatgcccctgggtattcatctgtttttgac

SEQ ID NO: 8203 - DNA, 1153 bp, Homo sapiens
cagctccagggccacgacgtgcaggagatgctgtgccacatcgctaaccgcgaggtgccctgcagccatggggcagagctccagagatctaggagtagggctgggtcggaaaaccagggaaccgggggcaacttcgggagaccagattgcaggctgatcagccaggaaggggtctcggggacaacgggcgaggtttgacgagccaggggtgagcccgagccacgagggaagaaaccagaagaggtgcaggcgggtcctgtgaggctagaggacgcggctggggtatccggatggggagaggcctagtggcagggccccagagaccaggggtcggacctgagtgatgagggggtgaagctgggtatcaaggtgcctgcttaaggagggatgggagtgggcagtggtctccagttggaactagggcatatctcggaatggggtagggaggagggggaacgtgacttctcggtggcccctggccccgcccaccttcctctctcgcttcccatccccgcttagttcctcgccagcttagagggaaggctgcccgaatacaacacccgcatcgccctgccccttgccacttccaaggacaagttttttggtcagtatgggtggggggatgaaggggtgcggttggggccccaagctgggtagcaggaggttgtcagataccctgttcagggccaaggtgggggtggagtggggtggtaaagggaaggggagccagggatggggacctggatcccacatcgctccctgctcatccccccaccccccttagacgaagagagtgaggaggaggacaacgaggtagtgacccgcgcatcactcaagatccgttcccagaaattaatcgaaagtcacaagaagcaccgtcgctctcggaggtcctagactcgtcctgacacccaccaggcggcccccttcggagcccccgatccctccgggtctagcgcaggccccacggggccccttcaggggctgaacgcggcccggaccgggaacggaggcggccagcggcgcccggaggggaggaaggggccgggccagacgttcccacagtaaatctccccagctgggtccgccccggcctcagagttgcgcaataaatgttaccgaccatgaccctgggtattcatctgtttttgac

SEQ ID NO: 8204 - DNA, 1152 bp, Homo sapiens
cagctccagggccacgacgtgcaggagatgctgtgccacatcgctaaccgcgaggtgccctgcagccatggggcagagctccagagatctaggagtagggctgggtcggaaaaccagggaaccgggggcaacttcgggagaccagattgcaggctgatcagccaggaaggggtctcggggacaacgggcgaggtttgacgagccaggggtgagcccgagccacgagggaagaaaccagaagaggtgcaggcgggtcctgtgaggctagaggacgcggctggggtatccggatggggagaggcctagtggcagggccccagagaccaggggcggacctgagtgatgagggggtgaagctgggtatcaaggtgcctgcttaaggagggatgggagtgggcagtggtctccagttggaactagggcatatctcggaatggggtagggaggagggggaacgtgacttctcggtggcccctggccccgcccaccttcctctctcgcttcccatccccgcttagttcctcgccagcttagagggaaggctgcccgaatacaacacccgcatcgccctgccccttgccacttccaaggacaagttttttggtcagtatgggtggggggatgaaggggtgcggttggggccccaagctgggtagcaggaggttgtcagataccctgttcagggccaaggtgggggtggagtggggtggtaaagggaaggggagccagggatggggacctggatcccacatcgctccctgctcatccccccaccccccttagacgaagagagtgaggaggaggacaacgaggtagtgacccgcgcatcactcaagatccgttcccagaaattaatcgaaagtcacaagaagcaccgtcgctctcggaggtcctagactcgtcctgacacccaccaggcggcccccttcggagcccccgatccctccgggtctagcgcaggccccacggggccccttcaggggctgaacgcggcccggaccgggaacggaggcggccagcggcgcccggaggggaggaaggggccgggccagacgttcccacagtaaatctccccagctgggtccgccccggcctcagagttgcgcaataaatgttaccgaccatgcccctgggtattcatctgtttttgac

SEQ ID NO: 8205 - DNA, 2854 bp, Homo sapiens
ccaggcaccgctgcaggactggggtgaagagaccgaggacggcgcggtgtacagtgtctccctgcggcggcagcgcagtcagcgcaggagcccggcggagggccccgggggcagccaggtgaggagggggtttggtgggtggcgcggggccggaagcgaccagttgagggcggagctggagagccgagcacaggccgccaggtgcagtgggcggaaggaagggaggggctcggaggcgaccagatgaggcgaccaggtagaaaggggactgggggcggccaggtaagtggggggagatccagggaatggggtggggccaggcgatggccgcgcagttcccgagaggagcctagggacaacttggtaaggacagaactggacggcagagttgggaaaggcaggtttagagggccggggctggaaggtggaatggggttggtttagaagtggctaggtgagggcggatggggcagccagtgaagcgcgacaggagggctgagggaagccctgggtggaaaagagtgtgtggggcgggggcgggggggtgggggggaggggacgggagggggaggggacgggagagggagtaggggacagggcatgggagagggagggtttccagggcaagttgcaggagctatttgtggatggggaggaacaataacttcaagcgggcagggagtggggcacacacctataatccctgcgcttcgagagaccaaggcagaaggccaggaattggagaccagcctggacaacacagcaagattctctctaataaaaataaaaattaaaaaactagctgtgcgtgatgatgcccagcagtggtcccagctactcaggaggctggggcagagggaccgcttgagtctaggacttggaggctgcagtgagctatgattgtgccactgcaccccagcctgggcaacaaaacaagacctgtttctaaaaaaaacaaaccaaaacaataactccaagaagccgggagacagaggaatcacatgaaagaatggtgctacaggcggggcgaggtggctcacgcctgtaatcccagcactttgggaggccgaggcaagtggatcatcaggtcaggagttcaagaccaacctggccaagatggtgaaacaccgtctctactaaaaatacgaaaaaactagctgggcttggtggcgggtgcctgtaatcccagatacttgggaggctgaggcagagaattgcttgaacccaggaggcggaggttgcagtgagccaagatcacgccactgaactccagcctaggtgacagagtgagattctgtctcaaaaaaaaaaaaaaaaaaaagtggtgctaggggctgggcacggtggttcacgcctgtaatcctagccctttgggagactttgggaggccaaggggggcagattacttgaggtcaggagttcgagaccagtctgaccaacatggtgaaaccctatctctacaaaaatacaaaaattagctgggcttggtggtgtgcgcctgtagtttcagctacttggaggctgaggaaggaggattgcttgaacccaggaggcagaagttgaagtgacccaagatcgtgccactgcactccagcctgggcaacagagtgagactctgtctcaaaaaaaaaaacaaaaaaaaaaagagtggtgctagtgatgaatgtgactagagaaggggtgctgtgaggaccactcctgctctctcatggccacctctcccctcctgcaggctcccagccccattgccaataccttcctccactatcgaaccagcaaggtgagggtgctgagggcagcgcgcctggagcggctggtgggagagttggtgtttggagaccgtgagcaggaccccagcttcatgcccgccttcctggccacctaccggacctttgtacccactgcctgcctgctgggctttctgctgccaccaatgccaccgcccccacctcccgggtcagtagcgaaccataacctccgtattctccaccctagaaccccaactgggcacccccctccacctcctcaggtgtggaacctggaaacacctcccagacccagagccctcttcctaagccccctctaggttcccccttcttcacctgctggggggcctcttcccagggtagagatcaagaagacagcggtacaagatctgagcttcaacaagaacctgaggtgggtccttcatccagataggggagtgcggggagggaaatccaagaggtcaaaggttagcagtcggactggggttttgaaaattgcaggttgggtaataagagactgggagtcaggtggggcgtggtggctcatgcctgtaatcccaacactttgggaggccgaggcaggtggatcactggaggtcaggagttagagaccatcctggccaatatggcgaaaccctgtctctactaaaaatacaacaacaacaaaaaaaggtagctgggtgtggtggcgcatgcctgtagtcccagctactcgggaggctgaggttgcagtgagtcaagatcaggccattgcactgcagccttggtgacacagtaagactctatctcaaaaaaaaaaaaaaaaaaggtaccaggagtcatattctatgtcccccactctggacccagctctgagaccctgcctctctggccagggctgtggtgtcagtgctgggctcctggctgcaggaccaccctcaggatttccgagacccccctgcccattcggacctgggcagtgtccgaacctttctgggctgggcggccccagggagtgctgaggctcaaaaagcagagaagcttctggaagattttttggaggaggctgagcgagagcaggaagaggagccgcctcaggtgtggacagg

SEQ ID NO: 8206 - DNA, 3271 bp, Homo sapiens
ccggccatggagcgcacagcaggcaaagagctggccctggtaaggggacaagggatccccggaccccgcatccctggtgacccgcaggtccagaaactccaagcgcccgcccgtcggacggtatctgctcccaatctgaacttgccctggagtcccctcctggggactcgcggcccttgacccagtgaagcgactggttcctcttagggatgggggcgcgagtctctgagcgcagtcggcagaaagagctagagacaggttctattagactgggccctgggacatccccaaatgccaccccatgtcctcaggacctgggaggaggggacccgcagcgaggaggggactagcctgggaccccagccctagtctcgcagcttctggccgggaaggggcgtggggatgcagcaggaggactcggcccgagtccgagcggccaaggaggctgaggccccagggacctgtgcccctttggtgccctgagtccgcctgtgcgtccaggcaccgctgcaggactggggtgaagagaccgaggacggcgcggtgtacagtgtctccctgcggcggcagcgcagtcagcgcaggagcccggcggagggccccgggggcagccaggtgaggagggggtttggtgggtggcgcggggccggaagcgaccagttgagggcggagctggagagccgagcacaggccgccaggtgcagtgggcggaaggaagggaggggctcggaggcgaccagatgaggcgaccaggtagaaaggggactgggggcggccaggtaagtggggggagatccagggaatggggtggggccaggcgatggccgcgcagttcccgagaggagcctagggacaacttggtaaggacagaactggacggcagagttgggaaaggcaggtttagagggccggggctggaaggtggaatggggttggtttagaagtggctaggtgagggcggatggggcagccagtgaagcgcgacaggagggctgagggaagccctgggtggaaaagagtgtgtggggcgggggcgggggggtggggggaggggacgggagggggaggggacgggagagggagtaggggacagggcatgggagagggagggtttccagggcaagttgcaggagctatttgtggatggggaggaacaataacttcaagcgggcagggagtggggcacacacctataatccctgcgcttcgagagaccaaggcagaaggccaggaattggagaccagcctggacaacacagcaagattctctctaataaaaataaaaattaaaaaactagctgtgcgtgatgatgcccagcagtggtcccagctactcaggaggctggggcagagggaccgcttgagtctaggacttggaggctgcagtgagctatgattgtgccactgcaccccagcctgggcaacaaaacaagacctgtttctaaaaaaaacaaaccaaaacaataactccaagaagccgggagacagaggaatcacatgaaagaatggtgctacaggcggggcgaggtggctcacgcctgtaatcccagcactttgggaggccgaggcaagtggatcatcaggtcaggagttcaagaccaacctggccaagacggtgaaacaccgtctctactaaaaatacgaaaaaactagctgggcttggtggcgggtgcctgtaatcccagatacttgggaggctgaggcagagaattgcttgaacccaggaggcggaggttgcagtgagccaagatcacgccactgaactccagcctaggtgacagagtgagattctgtctcaaaaaaaaaaaaaaaaaagtggtgctaggggctgggcacggtggttcacgcctgtaatcctagccctttgggagactttgggaggccaaggggggcagattacttgaggtcaggagttcgagaccagtctgaccaacatggtgaaaccctatctctacaaaaatacaaaaattagctgggcttggtggtgtgcgcctgtagtttcagctacttggaggctgaggaaggaggattgcttgaacccaggaggcagaagttgaagtgacccaagatcgtgccactgcactccagcctgggcaacagagtgagactctgtctcaaaaaaaaaaacaaaaaaaaaaagagtggtgctagtgatgaatgtgactagagaaggggtgctgtgaggaccactcctgctctctcatggccacctctcccctcctgcaggctcccagccccattgccaataccttcctccactatcgaaccagcaaggtgagggtgctgagggcagcgcgcctggagcggctggtgggagagttggtgtttggagaccgtgagcaggaccccagcttcatgcccgccttcctggccacctaccggacctttgtacccactgcctgcctgctgggctttctgctgccaccaatgccaccgcccccacctcccgggtcagtagcgaaccataacctccgtattctccaccctagaaccccaactgggcacccccctccacctcctcaggtgtggaacctggaaacacctcccagacccagagccctcttcctaagccccctctaggttcccccttcttcacctgctggggggcctcttcccagggtagagatcaagaagacagcggtacaagatctgagcttcaacaagaacctgaggtgggtccttcatccagataggggagtgcggggagggaaatccaagaggtcaaaggttagcagtcggactggggttttgaaaattgcaggttgggtaataagagactgggagtcaggtggggcgtggtggctcatgcctgtaatcccaacactttgggaggccgaggcaggtggatcactggaggtcaggagttagagaccatcctggccaatatggcgaaaccctgtctctactaaaaatacaacaacaacaaaaaaaggtagctgggtgtggtggcgcatgcctgtagtcccagctactcgggaggctgaggttgcagtgagtcaagatcaggccattgcactgcagccttggtgacacagtaagactctatctcaaaaaaaaaaaaaaaaaaaaggtaccaggagtcatattctatgtcccccactctggacccagctctgagaccctgcctctctggccagggctgtggtgtcagtgctgggctcctggctgcaggaccaccctcaggatttccgagaccaccctgcccattcggacctgggcagtgtccgaacctttctgggctgggcggccccagggagtgctgaggctcaaa

SEQ ID NO: 8207 - DNA, 24028 bp, Homo sapiens
gcgctgccgatcgccgggaggacccccgcctcgccgaagacgggcggggcaagccgagcctcacggggtccccggagctgggccgggcctccagatggagaaggcgcaacggggagttcttgagtaagccagagcggtgtccagcgcggtgtagccgcagccgccgctgtcaggcgcagcaacgggcaaccccgtagaagtcggtcggcaggtcctctccaacccgccgtagcgcgccgctgtgggagagaccccagcaggagcccaaaggcagctacgggggcgcgaagtggccgtggcgccgcctcggccagcccttcccgcgcggtgaggaccccggggctgtggcgggaagggacccgaggtgcgagaccgagcggcgttgccatggaaacgggccagggcgcgtagtagaggccccgggccagacgggctgcgggtggggtgaaccccaggttgggaggatgagagagcagaggtggagcggggtctttgggatagagagacgtggggtagggtgaggcggggagggggccaatgggagcaagtggagccaggggacctcagttcgaggcacctgacctggggtttctgtaacctccctggtttctataacctcaggattcccccaaacaggttccactgccttaaggatgacagtcgtagggaaccctcgaagttggagctgccagtggttgccaatcctgatactgttgctgggcacaggccatgggccaggggtggaaggcgtgacacactacaaggccggcgaccctgttattctgtatgtcaacaaagtgggaccctaccataaccctcaggaaacttaccactactatcagcttccagtctgctgccctgagaagatacgtcacaaaagccttagcctgggtgaagtgctggatggggaccgaatggctgagtctttgtatgagatccgctttcgggaaaacgtggagaagagaattctgtgccacatgcagctcagttctgcacaggtcagcctctccacattggctatcacgtagccctccttcccagagactaacagtgccttacatttatggttcagggtacctttatggaaattgtctgatttgattctaactacaatacaacccagtgtggcaggcaggttaggtgatgctattctaattcagttgactaagatacatacttgctcagaagttacttttttcaagattacatggacagtgatttgcagaactgatatcagagcccagggtttcttactgcaagcttctctgttggtcatgaggtcccaactatcagtcccacatagttctgtttccttccatgcctacctcttggctgtttcttagctgtttcctgtagtctctacctaaacttccctgtcatgctttttctttagtgaatcctggtacttctccttagtccactccagacctccttatacctcaccgctctcctttttctaggccttaaccctgtcaagccatacttgctcttttttggagaatctcaacatactagagtctaacccagtgattgtcaacagggaacagttttgtcccccaagggacatttagcaatgtctggagacattttttgttgttacagctgggggggtactaccagcatagaatgggaagaggccaggaaagctacatcctacagtgcacgggataaccccactatgacaaagaattatccaacccaggctgggtgtggtggctcactcctgtaatcccagcactttttttttttttttgagacagagtcttgctctgtcgcccaggctggagtgccgtggcgcaatctcggctcactgcaagctccacctcccgggttcacgccattctcctgcctcagcctcccgagtagctgggactacaggcgcccgccaccacgcccagctaattttttgtatttttagtagagaaggggtttcaccgtgttagccaggatggtctcgatctcctgacctcgtgatctgcccgcctcggcctcccaaagtgttgggattacaggcatgagcctccgcacccgaccaatcccagcactttgggaggccgaggcaggcagatcatgaggttgggaatttgagactagcctggccaacatggtgaaaccctgtctctactaaaaatacaaaaattagctgggtgtggtggtgggcgcctgtaatcccagctactcgggaggctgaggcaggagaattgcttgaacccaggaggcagaagttgcagtaagccgagatcgcaccactgcactccagcctgggtgacagagcaagactccatctcgaaaaaaaagaattatccaccccaaaatatcagtagtgctgaaggtgagaaactttgctgtaactctgcgcctggggagatcttgtgtgaccaactcctgacttgctctttataggtggagcagctgcgccaggccattgaagaactgtactactttgaatttgtggtagatgacttgccaatccggggctttgtgggctacatggaggagagtggtttcctgccacacagccacaagataggactctggacccatttggacttccacctagaattccatggagaccgaattatatttgccaatgtttcagtgcgggacgtcaagccccacagcttggatgggttacgacctgacgagttcctaggccttacccacacttatagcgtgcgctggtctgagacttcagtggagcgtcggagtgacaggcgccgtggtgacgatggtggtttctttcctcgaacactggaaatccattggttgtccatcatcaactccatggtgcttgtgtttttactggtgggttttgtggctgtcattctaatgcgtgtgcttcggaatgacctggctcggtacaacttagatgaggagaccacctctgcaggttctggtgatgactttgaccagggtgacaatggctggaaaattatccatacagatgtcttccgcttccccccataccgtggtctgctctgtgctgtgcttggcgtgggtgcccagttcctggcccttggcactggtgaggtgataaaaatgaattggggatttatctcatgggatagaactaggtagggagtttgttcagaaaaggtctgtggatcttctcttctatccagaggggcagacctaagggatagggtggctctagcaagaatgcacgtattctattgtagattttctggatagcaaaactgggggagattgttttgctggaggccctgggtctgggagaaggggggctgattcctctgaaattgctagaagagacacaggtgaggcctaacttgggctttccgctaccgtcctgcaggcattattgtcatggcactgctgggcatgttcaatgtgcaccgtcatggggccattaactcagcagccatcttgttgtatgccctgacctgctgcatctctggctacgtgtccagccacttctaccggcagattggaggcgagcgttgggtgtggaacatcattctcaccaccagtctcttctctggtgaggactttcctttccctggtgggcctttctggacttaggaatgaagaacacattgtggctggtcacagtggctcacacctgtaatcctagcactttgggagaccgaggccggaggatcacttgagcccaaaagtttgagacaagcctagacaacatagtgagaccctctctctataacaaaaaattagccgggcatggtggttcacatctgtaatcccagctacttgggaggctgacccaggaggattgcttgagcctggggagccagggaggttgaggctacagtgagccatgattgcaccactgcactctagctgggctgacagagtgagactgtctcaaaaaaaaaaaaagaacacatcatagaacttgggatagagtcaggatgaggcttgaagggaaggaatattgtaaaagaaagaagaaaaccaaaaaaaaacaagaatgcatttcttttgaatagtttaaaattactaagccctcaaaatgtcctaggcagtgtggaaagcactcagcaataactgtgtgaagtaggtaatatttccattccacagatgaggaaactgaactaaaggctgcttaagtaacttgtctgagattacactcctaaaaagtagtgaactaggtttcagcagtctgacttgtattctcacccattacactaaaataacacccttgaatttttattttgaaggtgggcccactctaggctttcaaaccagattgccctttcaaaggcagtagtagtctctgttctgaacccttcttgttcccaattctgtgtgtctgatttttatcccatcacatttatatttgaaccaaggctttctgaaaacagggccttaatccaaaggaatgtctcatgctaggaattaccaactccaaggcaagacaggcccctggaggcagatggatttgtgctactctcagattatgtagtagctacctggatccttaatgacaccgggttgggggatggtgttggtaagataaagagcaaagagtccgggtgtggtggctcatgcctgtaatcccagcactttgggaggctgaggcaggcagatcaccaggtcaggagatcgagaccatcctggctaacacagtgaaaccccatctctactaaaaatacaaaaaattagccgggcgtggtggcgggcgcctgtagtcctagctactcactcgggaggctgaggcaggagaatggcatgaacctgggaggcggacttgcagtgagcagagatcgcgccactgcactccagcctgggcgacagagcgagactctgtctcaaaaaaaaaaaaaaaaaaaaaaaaaaaacacagaacaaagaataatgggacctgaaagggtggaggtgaaggcagtcgactctgcagggacatccaggagcatgagtctgccgttagagtggcaggctgcttcagccccctccccttttggtcctggatgtaagtgggtgcccttagagatgtagctcctagtgttgaccctccctccgggggcccatccctgcagtgcctttcttcctgacgtggagtgtggtgaactcagtgcattgggccaatggttcgacacaggctctgccagccacaaccatcctgctgcttctgacggtttggctgctggtgggctttcccctcactgtcattggaggcatctttgggaagaacaacgccagcccctttgatgcaccctgtcgcaccaagaacatcgcccgggagattccaccccagccctggtacaagtctactgtcatccacatgactgttggaggcttcctgcctttcaggtatcctccctttattccatggctattactgtcaggttcctgacctcaatttttcctgtccctactcatccagtaccctaacccaacccgttgatccctggttcagtggtaccattcagagatcattaaatggttcctcctatccccaagcaggactgagcttgaatgatatgagagtgtctcacttataaagctctccggagacatttcccccttcaccttcctggtttctgactttaatgcctatggacatcatgtggggtttaaagcccatttgatgacccatttactttgttgaatacctctttgtgccaggcaaagaataaagtggaataaaatggacaagatccctgccctcaatctattagggaagatattcttgaagtgagagcggctaatcataggcaaaaaatccccatgaagccaggagatctggggcagagagtggagtgaactcacttttcacaatgacccagcaacatgggagagggtgggggctggatttcagcccagccactgtgctgatggtgcacagccctttaatgctgtgtatcatctcttttcttcacagtgccatctctgtggagctgtactacatctttgccacagtatggggtcgggagcagtacactttgtacggcatcctcttctttgtcttcgccatcctgctgagtgtgggggcttgcatctccattgcactcacctacttccagttgtctggggaggattaccgctggtggtggcgatctgtgctgagtgttggctccaccggcctcttcatcttcctctactcagttttctattatgcccggcgctccaacatgtctggggcagtacagacagtagagttcttcggctactccttactcactggttatgtcttcttcctcatgctgggcaccatctcctttttttcttccctaaagttcatccggtatatctatgttaacctcaagatggactgagttctgtatggcagaactattgctgttctctccctttcttcatgccctgttgaactctcctaccagcttctcttctgattgactgaattgtgtgatggcattgttgccttcccttttgccctttgggcattccttccccagagagggcctggaaattataaatctctatcacataaggattatatatttgaactttttaagttgcctttagttttggtcctgatttttctttttacaattaccaaaataaaatttattaagaaaaaggctcatgcagttggaggttttggtctggatataggaactcgagccctgctgttaagggcacggtcctttataaagccgagctggccactgaatgcccgaagctcgagttctccaacccagcttgggaactcccggcgtggggaacctacattgccagagtcgggtttccgcgattcagccggtgctcagcctaacggaagtggaggagccggacctctttgtgggaagcgaattgaatcaccttggcaacccgcggggcgtgcagcaacgccctttcctccggaagtgggtgtcagaacctccacgtgctgtccctccccctccccttttcggcccagtagcggcggctcagttgctgccatggagtcagccgggctagagcagctcctacgggagctgctgctaccggacaccgagcgcatccgtcgggtacggagcaggcgtaaccgggccagggcgagcgggaggttgcgggaaaggcccaactctcacccctagcttccccccaggccacggaacagctccagatcgttcttcgggcccccgccgctttgccggctctctgcgacctgctagcctcggcggccgacccccaggtgagaccccttactctcccctccgagcttcccactgtacgccaccggtcaagccccagtattcgcccactgcggtccgctcagcaccttcctgcccggacccccacgtgcttgcttcctcgtcctagatccgccagtttgcggccgtgctgacccgcagacgactgaacacccgctggcgacggctggcggcggagcaacgggagaggtgggctgggcctggggtggggcggggccaggcggagacttttcttgggcaggctgggtaccaaacacctgccacctgtgttccagcctcaagtccctgatcctgacggccctgcagagagaaacagagtaagtacctacccacttctctcgggatcttgacgactttgtctaggtttctgccttccttttcggctccaggctgggacttgtggggcagggacttcagttctagacgcaaggtggagtgaggattttaaggctgttttgaagactaaagttcttgaggaagggtgatgatgatctgccaaacccaagtcagaagaataagactgaaattcaggctaagttagactgaacttaccagattacatgcccacagtgctgttgggctccctctgagctgctgtctcatgtgtcccaacttggcaaagaccctgtgcccacacctcctgaaagtttctgtcctggctgccccattgagcctggccactgtgtgcagaggaaggtattgaagggtgattggaggagatctctcctgtttgcaggcactgtgtgagcctcagcctggcccagctctcagccaccatttttcgaaaggaaggcttggaggcctggccacagcttttgcagctgcttcagcacagtacccacagcccccacagcccagagagagaggtaccatcacatggttggcaggagggagggcctgagaggctggatagaccttgtaagcttgctctcccatcctctattcttggacagatggggcttttgctgctaagtgtggtggtgacctcccggcccgaggccttccaaccccaccaccgggagcttcttcggcttctgaatgagactcttggtgaggtgggctctcctgggctgctcttctactccctgcgcactctgaccaccatggctccctacctcagcactgaagatgtggtgagatgtgggccctcgttatctttgactccctttcctcatgccttcatgtcctcacccgtaaaagttacaaagctgctttggattctttacctgcctgtggcccttcctgacaattgagaggggatgctgtaggtgggcctggctgttatgcctgggctcctcctcgcaattcaggctgtgaggaagctgccagctgctggggtgtgagattgggctgcatcatgctctctgtgatgtgtccctcagcctctcgctcggatgttggtgcccaagctgatcatggccatgcagactctgatccccatagatgaggtgaggacaggtgggcaggagctctgttggaaggagagtgcagaagtgtccagtttggcccactgaagaagagcatggtaaccttgtgccttgtttgtctgtcaggcaaaggcctgtgaggcccttgaggctttggatgaactgttggagtcagaggtgccggtcatcaccccctacctctctgaagtcctcacattctgcctggaggtgagcctggagtggacatggcccctgctacatgctctgctgggactctccttccctgtcgctgatttttattattctgtggacaggtagctagaaatgtggccctgggcaatgcgatacgcatacgtattctctgctgcctcactttcttggtcaaagtcaagagcaaggtaagtgagtgcccattgacacacatcaccccacccccatctccacccttagtctcactcctggggctttcggtccatctcagggtatctaaagtactgtgggggttcaagccttggcctggcctcaccccagctcctgcctgggaggttgggaattttctgtcagaccccttatggcctggaagactggaatttttaatgtgagcccatcctgggagcagattcttagggacactgttccaccttctctgtcaaggccttactgaagaatcgtctcctgccacccttgctgcacacccttttccccattgtggctgctgagcccccaccaggccagttggatcccgaggaccaggattcagaagaggaagagttggagattgagctgatgggggagactcccaagcatttcgctgtacaagtgagatgtggggcaggacagagggggaaggtgttaggtggctgtgggacgttggggaggcagagatggagtcaagcaaagtaagtctccccatcccatctcaggttgtggacatgctggcactacacctgccccccgagaagctctgtccccagctggtaagtgtggctctgtccttctggtgtccctacctccaagtgtgcctagtccccctgaggccaacgacgtttagaccctgggaggtgtgaaggcctattaccacaggaatgggcaggctcttgctggggtttcagaagcgtgccacatgcttccctagatgcccatgttggaagaggctttgcggagcgagagcccataccagcgcaaagctggactcctggtgctggccgtgctgtctgacggagctggcgaccacatcaggcagaggtatgtattcccctgtcccagggtgagggttgcccacagggaggaccatggctgtcctggtttacgcttgttgttcaagcttatttatcaacagcgtttccccccattatcaaaagtgtcctggcttggaagataaatgacatggcttaccagctatagggaccaggggctgctgcccaccctctggtgacaggaaaagccttggtttttccagggaaaatgaagagaacaggtcagcctagggctctcaggtgtagcttctcagcctatgtcctcttgtttgccccatccagactgctgcccccactgctgcagattgtgtgcaagggcctggaggacccctcgcaagttgtacgcaatgctgcgctgtttgccctgggccagttctcagaaaacctacaggtgaaccaggctgaatgtgggagccaccacttgaatgtccccttcccctcatctttcatctcttcaagcatccctgctgccatcagcactcttgtgtgtgcccggcaggtgaacctgactcaggccctgcttgctccctcccccagccccatatcagcagctattcaagggaggtaatgccactgctcctcgcctacttgaagtcggtgcctcttggacacacacaccacctagccaaggcctgctatgccctggagaattttgtggagaacctaggtagtgatggcagtggggagcttggggaagggggatgaggcggcggctttggctgaatgtacaggatgtgcatctccctgcattgctgcctgtggtaggggaaagggtgtgatggtgccaaaaaaaggtttccgcctggagggaggtgggcgtgcaggtagcagacctgggttggttggtagaggagcatcctttcccacagggcccaaggtgcagccctaccttccggagcttatggaatgcatgctgcagcttctgaggaaccccagcagtccccgggccaaggagctggctgtgagcgccctgggagccattggtgaggagagaggcaggaggcagggatgtggggttcacccaaaggccctgtggctggtggtccctgccctctccagctctgattctgtccttccatcctgcagctacggctgcccaggcctcgctgctgccctacttccctgccatcatggagcacctgcgggaattcctgttaacaggccgtgaggaccttcagcctgtgcagatccagagcctgggtgagtgagaggttcccaggtggggctcccagtgccagcaaagggctggtgctcacctggtgttgacagattgcccccacaggagcacggatgtcttccttctcatcaaaggggtgtgcttcatgctgtaccaaggggtggggcgggatttctgaatccctcccagccaccacctttggtcccgtagcccacctccacctcctggtgctaatggagcccttgcccccacagagacactgggggtgctggcacgagcagtgggggagcccatgaggccgctggctgaggaatgctgccagctgggtctgggcctctgcgaccaggtagacgaccctgacttgcggcgctgcacgtgagtgacccctcaccctgcctctgcccttgtcccctcccctcctgtcttcccactggacccactggaatccccaccccagactccagtcgtctggtttggaccatagccaggtgttcccgggctcccccatcctgcctggtggtagcaggcaggaccttacagcttcttctgcctgctttgaccaggtacagcctatttgcagccttatcgggtctgatgggtgagggcctggcgccccacttggaacagatcaccacgctcatgctgctgtcactgcgttccaccgagggcattgtggtgagcaaagggtgggtgggctgggccaggcctgccctgcaatgggatttatctcctgggcccagctgagccaaagtccttgccgtgcctccgctccagcctcagtatgacgggagcagctccttccttctgtttgacgatgagagtgatggggaagaagaggaggagctcatggatgaggatgtggaagaagaggatgactcagagatctcagggtgcggaggggtgctcttctgatcaggaatctagactttggctttagacaagggcctagtgctggatctgctcctcttggtgcctgatcaccactgcctccccttcttactctaggtacagcgtggagaatgccttcttcgatgagaaggaagacacctgtgctgccgtgggggagatctctgtgaacaccaggtgagcattcgcccttccctggcactgaaaaccctgcctgggggccccttacccacggctgtgtctctctctgtagtgtggccttccttccatacatggaaagtgtctttgaagaagtatttaaactgctggaggtgagcgggccggcgggtggagtgggtggggttctcaggctgggggccctgtgttcacggtgcacatagcagacatatcccgcccctcctcatcctgcagtgccctcacctgaatgtgcggaaggcagcccatgaggctctgggtcagttttgctgtgcactgcacaaggcctgtcaaagctgcccctcggaacccaacactgctggtgaggagaggctgggccaggctgggggttcttggggaggggcagggcctgactggtgcttcagccaataatgtccccagctttgcaggctgccctggcccgagtcgtgccatcctacatgcaggcagtgaacagggagcgggaacgccaggtggtgatggccgtgctggaggccctgacaggggtgctccgcagctgtgggaccctcacactgaagccccctgggcgcctcgctgagctctgtggcgtgctcaaggctgtgctgcagaggaaggtgagcagggcaggtgggcttcgggaaggagaggtgctgggcctcggttggggactggctacaagtccaccccctacccccatgaaaagagaaggggcgtgaaagctccgctaagttgagctacttcttgtagacagcctgtcaggatactgacgaggaggaggaagaggaagatgatgatcaggtgagagccagggataaaaacggggaccaggcggtccaggcagtctccacagggacaggggtggacagtgtatttgggcttggcctggggcagccagggccactaaaagagactggtaatggccagagggatacaaccctgatcccactaagccagtgggagttcagggaaggagagcagtgtggactggggtgtgcttggagtgataggtaggagcagaagagccaggggaagaagctgggtcatggaaacacccagcttgagaggggccagccctatcaaccaagggcagccccagggacccctgcagctggtggcagagcgtgggagggaggtgtacagtcactgagctggccctggtgctccagcccctgacctggctccacaggctgaatacgacgccatgttgctggagcacgctggagaggccatccctgccctggcagccgcggctgggggagactcctttgccccattctttgccggtttcctgccattattggtgtgcaagacagtgagtgtccatcttctggcttcaagccctagtcccctcgtgcacccggtgcccaccacagcctttatccttggcccaggctgatctgtactccttcctgttctcccccatcagaaacagggctgcacagtggcagagaagtcctttgcagtggggaccttggcagagactattcagggcctgggtgctgcctcagcccagtttgtgtctcggctgctccctgtgctgttgagcaccgcccaagaggcagaccccgaggtgcgaagcaatgccatcttcgggatgggcgtgctggcagagcatgggggccaccctgcccaggagtatccttggctcgcaggacgggagggactggaggttgggggagtgtccccagggcttgcaggtgggcaaggtctacctgagcgtgtggccattccttgactgtggaccagacacttccccaagctgctggggctcctttttcccctcctggcgcgggagcgacatgatcgtgtccgtgacaacatctgtggggcacttgcccgcctgttgatggccagtcccaccaggaaaccagagccccaggtgagggagggagacatcaggcagggcttggaagctgaggagggagggtggtggagggcagggcaggttggcctgagacatttgtgtgcccaggtgctggctgccctactgcatgccctgccactgaaggaggacttggaggagtgggtcaccattgggcgcctcttcagcttcctgtaccagagcagccctgaccaggtaaccttgctgctggcagccctcagaggggaacgtgccgctccactcagtgataggcactgtctgctgatgaggctcgggagctccaggctgtcagttgcacctgatgcaaggtgacagtttcagctgttcttttggtactccctgcaccatttcttatttgtctgcaaggattggcagccagtcctgtgatgggacaggagggacttcctttctccacgtagcatttttcctgaggaagctccatttctaccctttggtctgagccagaagttgcagttttcctaggctggtttcctaaaccggggccctttcaaactgtgctctgtggagcccagggtacctctgggccaccacaccatacatttcaatcagatcagctctgctctctgaagagattttgcctgtaccaagtagctaggtttggagtcatgtcagagtgtttgtgtcacccttgtcttatacctttagagactgttgtgtaggtgaagctcctgagtgtctgggtttctttaggtcttgaggctatgactttaatcatcttgtcccacatcccccattccctccaaaaaaaatcattagcaccaagtttcattggttcttctcatgttcatagttgtcttggatgcctgtgaatcagtaccaggtgcaaccacccccctgataagagattctgccactccttggtcctgaccaccctcctagacctggggtctggggctgctgccctgagtcagccactctttcctcacaggttatagatgtggctcccgagcttctgcgtatctgcagcctcattctggctgacaacaagatcccaccaggtgagggtaggagtcataggcaggggcttgcgggaggctgggagtggcagggctcagagagcctggggcagcgaggctttaggagccccgacctttctccctccctctccacccagacaccaaggccgcactgttgctgctcctgacgttcctggccaaacagcacaccgacagctttcaagcagctctgggctcactgcctgttgacaaggctcaggagctccaggctgtactgggcctctcctagactgcaggctgcagccagtccagagagaatagagcctgcccaggccttaagaccacctctcagcccagttcagttctgccttaccaaagattctgagactcatacccatttggagccagccccacttgctgccttacagggctgtccctgaggctggatctgttacaaatgagtcatgacatcatactgtaataaaagcagcttgttttctgcttgaacaatagctctgagagcaagaaggctggaaatgcacattcagaaatgaggtaagcaggacccagtgaggcacgacgtggtttactagaagtggccggtttcctggcagctttgtaaatggactctaacctcagtggaatctgggccccggctggatcaggaggcgaccatatggcttttcttgtttcacgtgaagaatctgttgcgctgagagcactggtcaagaggcgaggagagggcaggtcgggggagtccctgtacgggcctctggtctctgtgtccctgccccacatacacacacacacatgcatacactcacccaggagcaggtagaagacccgggcagccatcctgcgggggctgagaggtgacaccaggctgctgaagtcgggctccctgttagcctgcagctccagtgccactgccctatagggatcaagaaccattagcagaggcttcagcccgggtccaccccatcaaggtgccacctccctggtacctgtgcactgcttccagtgagagcagctcgagctctgggggcagcaccaaaggcatctccatgggcacctcagggagttcaggcaccacgggcaatgcaggagcttctggcgcctccacctcaggccaggccctaggaggacatgagagagtagggaaggtggcagctgtgacagtgacaaggggcatacccatcccagcagctgtttccaccacctggccaagggctgtgggccctggctcccacggagcctggccgcttaccaccgttcttctggtgggatgaggctgatgcgggacttctcctcttcagctgcctctagggagatctctgttgggggaggaaaggcgctagtgggtgtctgcttgggtggcagttagggccttgtggccacctggtgtaagtagatggcagagccgtgcggtgacttgttaaaagcacataggtgggagagctgaggaggaccagtccgtgcttccttatgtcacacacacacgccttcactcataaaacagcttcagcagttgggatactagtttcctgggacagtggttagggtgtggtcccactgcgcctcttctctaggtgcttacctaaagacaccataaggggaacactgggctccagggcctccctcgggacctggggatgggagaagtagaactaagaccccaagcatctgggacttgggcctcagaaggcacaaggccagtgagcctgtgctgttggctctcatagcaggagagggcagccagctggtcaggcagaccctggcactggggcgatgcagtaaacaggtggtgcagttacctcaatctcacttggaacttcaatctttctcctttcctcctcagcggctgcctcctcaggcagctctcgcctgagggcttttgggggtggctgggcacaatgggtccagagacccagtagttcagggggtagccagccagctgtggacaagagggtagtaggcacggggtttgaggcgtgaggagcaccaggaatgaggaattggttttgaggatacttcgtgcccaacccccaccattcttacagagagttggggttctgaacaactccgcagggcctctgatggtcctctcgggcggctgcaccataggctgtgtagtgggggaaggtcagaagccccattataaagcagccactcctcagggcccctttgcctctttgcaatgcactgttctggggcttctggacttccccagcttttgcgctcatgaccctgcctgccctgctcattgctaaaagaaggactttttaacctggtgcccatgggtatgacaggtgggtcactaaaggagcatgaagagttgtatatgtgcaaacccacatcgcctgcattttctggagaatggaggagatttttcatcaagttcccaatcctccccccacccacctgaggagtttggaaggctcagcctgcatgtgcccctggtcatccctgcctccctcccttccccggcaaagcctgggctgcactcacacattcccagcagtgggctctggtttgcagttgttcctggaatttctccggggagatctgagtctccttgtcccagaacagtaaccggcgacgacggcggcggcgaggaggtggggggactgggggcctcctctgttgagtggggagggcaggtaggggcaaggctgcccattactccttttcctgtcattctggtggactgctaacaggaccccacacccgcccctagaggaacctggagagggcttgtgcggggtctccatgcacttgagcagctcataccttgcataagggtacccatctgggaagcgtaggccagatacgatggggcgtagaaaggggcatcttttatcatctgcattaaggacccctgtaagctagcagtggccctgggcttggggaggcagtccttgtgggggagggcaaagaggaggaggaggaggattagaagggaggctactcacctctgggctgggtggggctggcagacgcagctcctccgggggggtcacctctgcaacaacacccaaggggctctgtcccataagccccttaccccttgcagatgccagggcaagaaactgcagggtcctccctttagcaagttgggatataaagcccttgtctgcagcagtatccaggtactcccagaaaagcccctggggcatggtgggcactcacccatgagtagggccccaggttcccagcctgtcagcctcagctcctcaggacccagtgcctctcctattccttccaccctgaggggaaatgggcaagagaaatgaggagacccttcccagcactgacaccctacctggtctaggagttcttgcccttactctgcaggagctggaggtgggagccgcgggactgtggagagagaatcagagttcagaggacagaaaaagagaaatgggagcattgcccagtcccagaatgcccacgccaggggtctgactatccagctccaggcgggccctacgctgccggagacacctactttctaacaagatagcttcttcctctgcgatcagcaggtccagttctcggcggctgacctctgggagctcccgttcaccctgtccagagaggaagagcaaggggaggggattcaataatatttctgaaaaaggcaagtggatccaggagagtggatcccagaggcatgccacagggccaggttcaaggaagccactgggtgctcaagtgccagggacagagaatagggaaatggagacagaaaaggcaggactctggggacagagagaagtacatgcaagggggctggacctcaggccctgtgtgcaggggaactcacctcaatctccagcatccgtatgggctctgcctccaggatcgtgatggcctcaggtggcagcacagtgaccggaatcctctctggagggacaagagagtcactagcctctctgcttctttccaaattcccacagccatgcagttaaggaaaagcatggactctgaagtcaaggtaacctggattctaatcagacccaggctaatctctggcatcctgaccctgggtacactgcttaaccactgtgagcctcactttcctcatcggtaaagtggggaggctgggcgaagtggctcacacctgtaatcccaacactttggatcgcttgagcccaggagtttgaggccagcctgggcaacatagcgagaccctgtctctacaaaaaatttaaaaactagccaggtgtggtggcttatccttgtggtcccagctactctggaggctgaggtgggaggattgcttgagccctggaggtcaaggctgcagtgacctatgatcatcataccactgcactccagcctgggaaaaaaagaaaaaaaaaaaaaaaaagccgagtatggtggctcacgcctgtaatcccagcactttgggaggctgaggtgggtggatcaactgaggtcagaagtttgagaccagcctggccaacatggcaaaaacccatctctactaaaaatacgaaaattagctgggcgtggtggtgcatgcctgtaatcccagctactaggaaggagaattgcttgaatccgggaggcggaggttgcagtgagcctaaagtgcaccactgtactccagcctgggctagagagtgataccccatctctcaaaaaaaaaaaaggataagaaatctgacctcagaggactcttgtgaggtactgatgaggttatacacataaaatgcccctcaccaggcacggtggctcacacctgtaatcctagcactttgggaggccgaggcgggtggatcacctgaggtcaggagtttgagaccagcctggccaacatggtgaaaccccatctctactaaaaatacaaaaattcgccgggcatggtagtgcacatctgtaatcccagctactagggaggctgaggcgggacaattgcttgcagtgagccgagatcgtgccactgcactgtagcctgggcaacagagtgagactctgcctcgaaaaaaaaaaaaagcgcccctcacaaggcctggctcttaagctcaaaaatggtcatttctacagctcttgggcctgcctatgcctctcaccagaaagaaggttctctctgctgacctggctccctgggctctgtaggaacttcaggagggatctcttcaactctctctgggattgcagcctctaagaggtgtcgaatctttggagagggattggaaacaaaagatagggttcagcttcagccccctgctttcccacttttcacagccttcttcaacaatgcacggtaatctccttttatgcctaattcttgttgcattgacatcagcttgcagtaaactcacccgccctctggtcttctttcctcagttcctgttctcacctccctccccaacccgcaccccagttatctagccctcatcaatttgtgcaagaaggccgggctcggtggctcatgtctgtaatcccagcactttgggaggctgaggtgggtggatcacttgatgtcaggagttccagaccagcctggccaacatcgtgaaacctgatttctactaaaaatacaaaaattagccgggcttggtagcagtgcctgtaattccagctacttgagaggcggagacaggagaattgcttgaacctgggaagcagagattgcagtgagctgagattgagccactgcactccagcctgggtgacagagcaagactctgtctcaaaaaaaaaaaaaaaaaatttgtgcaagcagcagtgcatcgttatccttggcaagtgttgtggttgacagaggtgaacagaaaagattcttgatcttaaggaagtctagtggggagacaaggttgtatgtaaccccacaagagtcaaggcaaagggtaaaacaaggccctagcaaagtactgagttcccaaactgcatttggttccggctaagactgggataaatatttcatagagaagggcagcatttgagccaggtctgtaagaatatgtagaacccgacttgtagaggatgaggggtgaccattatgggctagggaaacagtacaagcaaagatgtgaatgtggcatcattgaggcataagggccaaactagtgtttaggagccacagatgcccagaggactgagagagaagtctggggatgactagttctaaactggggtatgtgccaggcacggtggttcacacctgtaatcccagcactttgggaggccgaggcgggtggagtgcctgagatcaggagttcaagaccagtctgaccaacatgatgaaactccatctctactaaagatacaaaaattagccgggcatggtggcaggcatctgtaatcccagctattcgggaggccgaggcaggagaatcgcttgaccagaggaagcggaggttgaagtgagccaagatcatgccactgcactccagcctgggtgacagagactccatttcaaaaaataataataataggccagcgcgatggctcacgtctgtaatcctagcactttggaaagccagggtgggtggatcacctgaggtctggagttcgagaccagcctggccgataaggcgaaaccctaaaaaaattgggccgggctctgtggctcatgtctgtaatcccagcacttcaggaggaggagacaggcagatcatgaggtcaggggttcgaaaccagcctggccagcatggtgaaaccctgtctcaactaaaaatacaaaatcagttgggcatggtggcaaatgcctgtagtcccagctactcgggaggctgaggcaggagaattgcttgaaccggggaggcagaggttgcagtaagctgagatcgtgccactgcactccagcctgggccacagagcaagatcctgtctcaaaaataataataataatagtaataaaataaaaaaagaaataaatggggcatggagagccccaaatgctagtaatctgtttgcagcaggagccactgttcaaatggggaaccaaggaagggggtgacattaagctgtaggagtattgggaatagatggaggaggacaggggtaagaaagcccagtgcagagagatgagagcctggattagggccttggcagtgaaaacagtgtggagacaagtggggacaagagctgcctccagtggggaaaccgtctgatcagattggccctgagtaggtaagtacagggggcttcgcctggatgggtccaccttggcagtccccctgcaccatctcctgtgggagagagctgtggtaagcttccttccccaaccccaatgtcagagtgacacagggacagcactccccttctgcattgccaattcacgagtcttggggaatgagccctacctgagggatatcgaaaggactaggaagtctgggatccacagacatcatcccaaaaaagggatctggagcatcttctagggtctccatcatggccaggtggttaggaagcagcaggctgggtctgggagagaatgtaggccgtgaaggactgaggctgagccaggctgaggccaagctagcaggtgttccatcaaaggcccagggcacactcacagctcagtctccatatctattcggatctgcagctgggcacggtggaggcgctccaagatgtgctggatgtcctctgtgggcagggaggacgaggtagacagccagcttagcagacagctgctcagcccgccccacctttgagggttcccagccttacccacgaggtactggcattgttgagaatagacgcggatcacaccgatctgaagttgggctgagagatagagggagaagcggggccgcggcaggccgggctgcgggggttgcactcgtaccagcacgtaattgaggatttcctcgctggggaacaatgcgccctgattaccgctgcgtccaggagtgggcccacagtcttggccaccccatcccctaactcaccccccgcaccaggccctccttcccttttctgggccttaccaggttttcaccacattcaccctcaggtattcgcgcttcaccaaccggctgccgcgagtcgccgccagcctgaagtgggtggggaaggtgggagaatggggatggagggggagctgtcaggctgggatcccgggcagcgtccgccatcgcgcgccaacgggccccgcccttaccagatggtggcaaagcagccggtgtggcgctgaagcacgttgggatagtagaacattgtccctctggtctttcaccctcgattccaccagatccccgttcggatctgagtcggaattctttagggcacagaattcccaacaccttggagagaagtcaggatttggacttctctggtggcaaggtgggtgcacctagaaagccaagttaatgaggcaacgaacaatgggcagatacacaattaccaggataactgagacgcaggagatgggcgcccctctctgtggaccctcagtggatccgcacgccacgtgatgcgtcaaacttgagacttctgggttgggttccaggttggagatgcagagctccaaggggacgtccgggccggaatccagagcaggtcccgagggagcacggtgtcctccacagcaggcctcggtcctcgagcgctgggagcgatgtcaggcccctgggccttgcactggcttgggcggccgcggtgtggccccgggccgcctactgcaggactagatcgcaccgcgggaagcgagcgcttcggggcaccgcacctcgctcctcattagatggcggcttttgccctgacagccaatggggaacgggggtcgggtcgggaacgccaagtatcctggcaacagggtctcccgaggcagccagcaaaccaatcataaggattttgcgcgccgctggggtccattgtgaggtgttccgaccaatgggctccggttctcgcctctagtaacaggcgccccttccttgaccaatgagcgcatccccgtcgctcccccgccgctcccccgccgcaagcctggcaacaagggcgcctcaattggtaggggaggtcgggtcacctcgggggcaactgtactgggcctcttccgggtgccaagatgtaccttgcacggcgcctgacctgaggttagaccccgcccttcccccaatccacaaactc

SEQ ID NO: 8208 - DNA, 290 bp, Homo sapiens
ttcagccggaaagtgcttcgaacccagacgccgcctgcgctccatctccccggccctcgctagtcccgtcccgcggggacagctctcgggcctcggccagcgcgagcctcctggccaagagctctcaaaccccaaatctttccaggagcaagcgagcggcctagcagccactcctctcccgaaggggtgtcagggtcctcgctgccaggcctcagccccctccccgggaagccgtcgcgaaggagtccccaggggccgcagcagcgaaggccctctgcgttccaggcaag

SEQ ID NO: 8209 - DNA, 102 bp, Homo sapiens
gtagagacaggggtttcaccatgttggccaggctggtctcgaactcctgacctcaggtgatccgcccgccttggcctcccaaagtgctgggattacaggcgt

SEQ ID NO: 8210 - DNA, 339 bp, Homo sapiens
tttctgaaaagaaaatctaaggggagtttacccagtctgtatgggagccatgcagatgattcagtttggctctttaaaagaactatttttaaaaatagaagtaggactgctgagaaaaaaatagtactttaaagtatacatgggttggccaggcgcggtggctaacgcctgtaatccctgcactttgggaggccgagatgggcagatcgcttgagcctaggagttcaagaccagtctgggcaacatggcgaaacccgtctctacaaaaaatacaaaaattagctgggcatggtcatacgcacctgtagtcccagctactagggaggctgaggtggaagg

SEQ ID NO: 8211 - DNA, 2038 bp, Homo sapiens
ctccaggcagggggagcagcctggcacaagcacggatatgtggtaatttgtgtggcactttaggaaccacaggagttctagcccagagtgtgaagggactgactgcaggatgtgcctgagaggtaggcaggcactagggcgcagatgcttgaattttgtattctgttggtgatggatgccttgcattaagtggaggaaacataccattagacctgcatctgctttggaggatggagtgggttggggagaggttggagtccccataggaggctgttgcagtaatcccagcaagggctgagaggggcttggatcagggcagaggcaatagggttgagaagaagagcagagatgagctgtttggggggaaatcaactggactctgggagtgtttggaagtgatgccagagggaggaggaatggtgacaggtaaccttgaggtccttggtttgggtgacagagtgaatgatagtgcagagatagggatggctcaaggagaagataatggccagtgaaatctgccagcttcgttcagtaaaccctgggcacaccctctcgggagaggatcagttggaaggtcttgtagacccctgtctggacttgggccaggcttccctttgctttcgcctgaatcagcacctgggagaagggcagctttccttccttcacctttcctctgcccagatttaaccagggaggtgaacctcttcatgtttcacatctataaagcgataaatcttcagccttccaatagccctaagagcaacccttccctctggcaatatccaccccgattcagcatactacagcccactgatggggtcctgaacagcagagaccctcaggggagagaggctttctcagtgccccctggagatcttatctagagagaggtctggaaattggatttgctgcctgaagctggctcagcagattcagtccttcttctcaggaaggactgatatctgccagaggccacccaggacttgctcagaaccttcagggaagggagagaaagctgcccagtgtccttgacccttgaagttctaagggagccagaagctgtccctcagctggattggactatagtgaggggtgtgctggtgggcgggccttcaaacaggccctttggaatttgggagatttttttacatgatttgtccttgggtttgtggtgtaaagaaagtaaacgagaaaatgatctgaaacaagagcacttctttctcctccacctgctcaggtgagactctgacctcgaaggtagtcgagggcccacagcagcccccgcatatcctcccaggctctgtaatcaagatcctagaggggaaaggatgcaattgcttgctgtgatttacttactatcttagagatagttccactttggcacatgcaggtctgggtcatttgtggctatgatgtgtcccactgtgagtgtaatttattcaacaagctctctgctaacaaacacttgggttattttctgcattctactctctaaacacttctgctgaagtgactttcttcatacatatgattttgcccaccttaggtatcatctgcaggataaatttctagaagtgaattgctgcctcaaagactatcctttattattattattgttaaagaatttctaggtctccttttaataaattggggcagccttatttttcccccagcaagtgaatctgttcttttgggttgaggtcgtacgtcctgaggggaacacaggtgttcccactccctaaagaggctacaacccaggccgggcgcggtggctcacacctgtaatcccagcactttaggaggccgaggcaggcagatcacgaggtcaggagatcaagaccatcctggctaacacggtaaaaccctgtatctactaaaaatacaaaaaattagccggacgtggtggtgggcacctgtagtcccagctactcgggaggctgaggcagggaatggcgtgaacccaggaggcggagcttgcagtgactgccctccagcctgggtgagagagcgagactccgtttcaaaaaaaaaaaaaaaa

SEQ ID NO: 8212 - DNA, 368 bp, Homo sapiens
ttaagggaaattgacctgtaaacaaatggttgaaatgtggtctaaagaagctagtagtggctgggcgccgtggctcatgcctgtaatcccaacactttgggaagccgaggcgggcggatcacctgaggtcaggagttcgagaccagcctggctaacatggtgaaaccccatctctactgaaaatagaaaaattagctgggcatggtggcacaggcctgtaatcccagctactcgggaggctgaggcaggagaattgcttgaacctatgaggcagaggttgcagtgagccgagatcaagccagtgcactccagcctgagtaacagagtgagactctgtctcaaaaaaaaaaaaaaaagaagaagaagaa

SEQ ID NO: 8213 - DNA, 392 bp, Homo sapiens
ctggtcctttagctcaggttgactcaatggcatcatggtgaccttagagcatccaagagtgcctaattttccactagagcataatgaaacataaagcatgaacttcataaatcttgattataagagtgggatcctcattcttgaaaatcaaaatggaaaaacgtgggatggtgtggttcaggtaaaagacgatgcagtgactttatggaggtcacttatttggtagatgtgacaggttacaagtggcagaaacggtctgatccaaggcttgatcacagaacaccctgagaaaatgtgtaaagaaagtagtgcatggctgagttaaagaagtggagaataagcctggaaagataagaaagggaaggcgtggagagccttgaatgccagggtga

SEQ ID NO: 8214 - DNA, 392 bp, Homo sapiens; identical to SEQ ID NO: 8213

SEQ ID NO: 8215 - DNA, 115 bp, Homo sapiens
gagttcgagaccagcctggccaacatggtgaaaccctgtctctactaaaaatacaaaaattagccaggcgtggtggcaggtgcctgtaatcccagctactcgggaggctgaggca

SEQ ID NO: 8216 - DNA, 353 bp, Homo sapiens
accaaagcaaaaatgaacaaatgggataacatcaattttaagtttctgcacagcaagggaaacaatcaacaaagtgaacagacagcccacaagaatagaagaaaatatttgcaaacaacccctctgacaaaggattgataaccagaatctatctgggtgcggtgactcacatctgtaatcccagcactttgggaggccgaggcgggtggattgcctgaggtctggagttcgagaccagcctgggcaacgttgtgaaaacctgtctctactgaaaatacaaaaattagccaggcgtggtggcacgtgcctgtagtcccagctactcaggaggctgaggcaggagaatctcttga

SEQ ID NO: 8217 - DNA, 340 bp, Homo sapiens
tgatcagcttagtgggcctcagacacagtttatgtttcatggtactggggataaaaaatatcttgatgaagcccttacaaagagccctgagtggaggtgctgaataaacctaaactaatagggaggaagggaaaaggagttacaggtgctaacacttttaatttttttattttttatttataaatagagacaggatctcactatgttgcccaggctgttttcgaactcctggcctcaagcaatcctcctgcctcagcccctcaaagtactgggattataggcatgagtcactgtaccgggccaggtgctaacactttttaaacactttgcatgtatcatt

SEQ ID NO: 8218 - DNA, 916 bp, Homo sapiens
ctgggcgccatggctcacgcctgtaatcccagcactttgggaggctgaggcgggtggatcacgaggtcaggagatcgagaccatcctggctaacatggtgaaaccccgtctctactaaaaatacaaaaaattagtccggcgtggtggtgggtgcctgtagtcccagctactcgggaggctgaggcaggagaatggcgtgaacccgggaggcggagcttgcagtgagccgagatcgtgccactgcactccagcctgggggacagagcgagactccatctcaaaaaaaaaaaaaaagaaaagaaaaagcagtgtgagtagaggcaatttgaagcaatggaaaaatagttgagctacacaattgtaggtttgaattagagctttgctgcttcctagtttgtgggaccattaacaagttacttatcgttttggaaacttggttttttaaatctgtaaaattagtatagaactgcctccaaggttgttttaaataataagtgaggagatgtatgcaaagtgtcccaattgtcagtacacttcctccttcccctttccttttttttaaattaagcttttaaaaaattatttgcttttgaagccttttaaatttatttttaatttttaaaattaacaaataaaaggcccggcgcggtggctcgcgcctataatcccagcactttgggagcccgaggtgggcggatcacttgaggtcaggagtttgagaccaccctggccaacatggtgaaaccccatctctactaaaaatacaaagaattagccaggtgtggtgatgtgcacctgtggtcccagctacttgggaggctgaggcaggagaatcacttgaacccaggaggcacaggttgccgtgagccgggatcatgtcactgcactccagcctgggtgacagagtgagactccg

SEQ ID NO: 8219 - DNA, 279 bp, Homo sapiens
aaaattcttcctgatatctgttgaagtatgcattaagaaaataggggcattgcctggaatttaaactggctgcctagatctttgtgtagataccactctgtactgtctgcttagacatttggctttttactataccccaagtgattaagctctaggtattcaatggacatatcagaacatcatcaatttatagtagggaagaatgtctttcatactgaccaattcctatactaatggtcagttatgtgtgaaatctagttataatcaaaggctatttgg

SEQ ID NO: 8220 - DNA, 32192 bp, Homo sapiens; identical to SEQ ID NO: 7945

SEQ ID NO: 8221 - DNA, 544 bp, Homo sapiens; identical to SEQ ID NO: 7946

SEQ ID NO: 8222 - DNA, 293 bp, Homo sapiens; identical to SEQ ID NO: 7947

SEQ ID NO: 8223 - DNA, 20020 bp, Homo sapiens
gcgcccggagccggcgccgcgggccgaggtgagcgcgcttgcggggcggtcccggcctccggccgctcggggtcaggccttgcgctatctgcgtccgcacctgactcagctgggcaccccggagctacggaggggccagcgggctcccttgcccatgcgtctgggagcgcgcgggggacgtggcgagtgcggggccggggcagccatggctgggagtggaccgtgggtgcggggggatgtgtgaaccccgtcccggctctgcattcctgcgcctctgcgccccgcgggaccggccgggtctctgcactgggaccgaaaacgggctcctccccgctgtcttcccctaagggctgaaaatgagtctctggaagaggaaacccgatgggatgatgcctggagtctctccctctctcatcagagtgcagtcggcatttggggggcgcatggtggagaatacatatccaatgagcagcgctgccctggcctcgagcactaaatgccagttcccctagctgcttgtgacaaccagaaaacgccccaacaaatcaccagacgttggcagttctccccaaagcaaaggctttagagcttcctgggttaatctggctgccacttgtgagcctcggaggttcctgatctgtacaccagggtaattgtgggaattggaaatacatgaaccgagcttaataatgagccgatacgtagtaggtgcttaacaaatggttacttatatatgtaaccatgtatgtaaccacttgtgtatattacacctagaatgcacttttaaaaattcattctatttgttaaaggtttaataacaggtataacagacaaccttatttttttttcataactaatgggggcagttcctcatgaggttatcggaatataaactctattaaatttttaatactatataaagtaatttaattttgaataatcgagacatttttcttacacactacctgggagtataatattactaacaaaagatttaagtattttataaaatctgtagtttttccaaaatgtcatttctcttaaatattatctaaactgctatcttaatttaggaaacagataaattgcagtaagtttacaggtcggtatcttgctatctaaaatcttgccgcttgttatttgaaactcttgagccaaataggttggatttacaaagcaaggtatttttaaaaatatatttattcgttttttaagatgttatttgaaactgtaggtttacctctgagctaaagctgcttttcaggtggtttgataatgctgtcattgtcactcagtatgaaaacatattttaatttcctttgtgatttttttctttgactatgggttaagagcattatttagtaatttccataaattgggattttctagttattgttattgatttctactttaattgcactatgatcagagaatatatttgaacccaggaagctctaaagttttccatttgacctttctggttttgtttctcttgtgttccttttctatcagatattgggtttttgagtgttttttggtattgctttaatggctttttagcaataccactttgcgtaatatttttagagctaattttaagatatcagtcatttgaaaattatgcatatggtctgttttgatgaatactctttgcacttgtaatgaatgtatactctgcagttcttgggtctagtgttctgaaaatgtcaattagagcaagtcggttgatagtgttcagattttttgacttcactgactctttttttttttttttttgagatggagtctccctctgtcgcccaggctggagtgcagtggtacgatcttgactcactgcaacttccgcctcccaggttcaggctgttctcctacctcagcctcctgagttgctgggattacaggtgcgcaccaccatgcccagctaatttttgtatttttagtagagatggggttttactgcgttggccaggctggtctcaaactcttgaccacaggtggtcctcccgcctagggcttccaaagtgctgggattgcaggcgtgacccaccgcgcctggcctgggtttctttttttttttcttgcagtggtgtgatctcggctcactgcaacctctgcccccttgggttcaagcaattctcctgcctcactcagcctccctggtagctgggattacaggcattcaccaccacgcccggttaatttttgtatttttagtagagatggggttttgccatgttggacaggctggtcttgaactcctgacctcaaatgatccccctgccttggacgcccagaatgctaggattacaggcgtgagccactgcgctcagacctgggtttctttttaagcaaaaaataaatttaatgaggaccacataaaaaacatttggtattggattacggttgcaagggtccatttatacaaggattttcatctgcctctgtgactcctgcgactgcaagaccaacccttccttctccttctcctgttccttgtcctcttcaggctactcagtgtgaagatgatgaaggtgaccacctttatggtgattcacttccacttagtgaatagtaaatgtagtttctcttccttataattttctttttcttttttttttgagacggagtctcgctctgtcgcccaggttggagtgcagtggcacgatctcagctcactgcaagctctgcctcccaggttcatgccattctcctgcctcagcctcccgagtagctgggatcacaggcgcccgccaccacgcctggctaattttttgtatttttagtagagaaggggtttcaccgtgttagccaggatggtctcgatctcctgaccttgtgatccagccacctcagcctcccaaagtgctgggattacaggcgtgagccacctggcctggcctcttccttataattttcttaataatattttgtctaacttactttatcacaaaaatacagtaacatgcaaaatgtatgttaatcaactatttaaggcatcagtcaatagactgctaagcttttggggaatcagaagttatatatggattttctactgtgtggggggttggcgcccctatctcctgcattattcaatggtcaactgtaattcttttgacttcgctttttcctttctcaggcccttgaaaaaaaattgtttttcttttttagtttttaaatgattttccaatgtcggataaattattttggtgaaacggtaaggatgaagacattgtttcctacaccttaagaaataagcagctacaaaaagctagagtattgtactgatctctgattaagccagatcctcaagtgatggggtatctttttttaaaaattgctgtgattagtcttagggagaaatgatgaccaccaaattcttcataacatttaaggatttacccagtaatcctatattgtgattacttgcaagaaagttaactagaagtagtggatgatcctttttagaataatattatttgcgatttaatatttctctttctactgtcttagttgtgatcttctaaaatttgataccattcacataaaatagtgattatttatatcaacaccataggagtattttcaaggtagttagtcttctcaaccctcttttttttttttttttttttttttgtgagacggagtctctctctgtcccccaggctggagtgcagtggcgcgatcttggctcactgcaagctccacctcctgggttcaccccattcttctgcctcagcctcctgagtagctgggactacaggtgcccgccaccatgcccggctaattttttgtatttttttttagtagagacggggtttcaccgtgttaaccaggatggtttcgatctcctgaccacgtgatccacctgcctcggcctcccaaagtgctgggattacaggcgtgagccaccatgcccagccttctcaccctctttaaccccaaggttgaaagtgtcaggtatgatacttgtttttttcataaattctcaaatagacctattttaatatggcactcaaaagacctctcttggaagtttcattacacctttttggtatacttttggaagtacttttggtaccttttggaagacttaacttgttctctttaacctcctatttattacagaagcatgtaggcattagcttttattcctagggcattaatatctttttccagctttattttttagtatgcagatatatagatgaagatgtagaagtgttttgtagaagagccgtttacctggaaacctatagtgaaaaagtttcgtatggtgcattttattcttcattttgtctggacatttgaagaccaagaaagaacattataaaatgggcagggaaatggtggctgtttagatacagtatcagtagtttgctttgtggcttcaagtttataatctttcaaaatagaatcgtgtatccattgagcaatttcaaaagctccatagttgaccccatggcttctcgggtagggcatgtgaatttgttctttctgaaaatgtgtccccttcctctgtgtagcactcaatctcattccctttttagtgtcctggtgaagacctagttcttgccggagacaattccactgcagaagcactttacttaaaaggacttgccaggctggacaatgcccgttgacttggggcaggccctaggcctgctgccatcgctggcgaaggccgaggactcccagttctcagaatcagatgctgcccttcaagaggaactctccagccctgagaccgcacgccagcttttcaggcagttccgttaccaggtgatgtctgggcctcatgagaccttgaagcaacttcggaagctctgtttccagtggctacagccagaggttcacaccaaagagcagatcctagagatcctcatgttggagcagtttctgaccatcctgcctggggagatccagatgtgggtgcggaaacagtgtccaggaagtggagaagaggcagtgacccttgtggaaagcttgaagggggacccccagagactgtggcaatgggtaagcagagggtattatgatctgcgagtgaaacacagggctcctctctggtcccatcaggtgtgttgtcttttttctgataccacttatgacacaaaatgggtggggcttttcacaccaatggccaattctgtgattctctaacaccagtacagtgtccagcaattcagttctgaagctaactctggaggttcagggctcaatccaagactgctcctgttctcagatgccagtcacaagtcccaggggccacctgtacttctgacaaattggctataaattcggaggttcccacagtcttctcttcaagtttgataattagttagaatgacttacagaactcagggaaggattttacttcctgttactgacttactctaaaggatacaactcattaacagccagagagaagagctgcatagagcaaggtgtgggggaaagagcgtggagcttccatgcttctcctggcgtgctacgttaccagtacctccatgaggtcaccaacctggaagcttcctgaacctcatggtttagggatttttatggaggcttcactgctttggcacacttgatacagtcatttgccgttggtgattgagtatctccagctgccctcccctcctcagaagctgggtggagatactgaaagttccaaccttttaatctcaaggttggttcctctggcaaccagcccccatcctgaagctatctaggagcctagcataaactcaggtgtggttgagaagggctccttatgaataacaaagactcttctttcacctgtccctcaagaaattaccagggttttaggagctctgcgggaatgggaactggggacaaagactaaatgtgtatttcttattataccacagctgggttcccccatacctcacgtaattctaacactctctgactctcaacactctttagctattgaggattgagggtaaagtctcccagcgcattccacctttagactagaatgtttgagaagttatttaaaagatgcctgagttttcattggtggcgcatatccagtagaagcacgttagtggcatgtcttgaaggtctcccacgcctgattcgggcctcagcttttggtgtcttttgggacgtttctttccctggttcctgctggactagaaataaaagctggttttctctttctccacatccttagaaattgtcttatgatctgttgtagagagtaagctttgtgtcttttagagatccttactctggattcttcagtaattactaattaatatatggtctctagatcagtatccaggttctaggacaggacatcttatcagagaagatggaatctccaagctgccaagtgggggaagtggagccccatcttgaagtggtgcctcaggagttgggacttgagaattcatcctcagggcctggggagcttctgagccacatcgtgaaagaggaatctgacacagaagcagaactaggtgaggatggtgctgtgtggtgttctcttggagagattttgggattgtgattagtaggcctaagtgagttgaaatggtatgctgctcagattggcgtatccctgagaggtttgcaaacaggttagacctaaataaaccgctcttgtttggagagtcaaagtctgtgttttaaactgctttatgactgggccagaccatttggattttggctctgaggaaggaggtgggagaacatatgggtgagactggaatgttggagggggttggagtgtgtcagggagataaacacaagtcttgaaatatagatggcagtacaggtattgttcaggtattgttctgatttgtgaagattgttatctgcgccctctggggagtggttaaggaagacatccagattctgaaaacttcctctcctcacttcagccctggctgcctcccagcctgcccgactggaggaaaggctgatcagagaccaggacctcggagcctcactgctcccagcagcacctcaggtgagctgacgtacaaaagcgatgaaaaggaaactttttaccttttataatctcatcctcctgcttctcttcaccccattctccatcctgaggaaacctctgatctgctgtctgtcaccatatgttagtttactttttctagagttttgtaaaaatagaatcatgccaaatgtactcttatctttgttcttatgcatataatgtgtatatatatacatatatatatatttgcttatttcagtgtattctcattttttaaaacaatttgattttgatgtgccttggagtcattttcacatttcatgtaattgggatttattgagtttcctagctctgtgggtgtatggttttcactaaacttggaaaatttttggccattatttctaaagcatttttttttctgtctcgcttatttctcctctcctttaaggacttgggaaataatacctgtggaatgtgtataatgataatgtatatacatgtatcagagctcttcaagttgtcccacagcttactgattgtttttctgtttttgaagtcttggtgttttattttggacaatttctgtatgtcttaaagttcattaatcttttcttttatagtatctgatctgctgttaatctcatccagtatatttttcattctgttattgaagtcttggtcttttattttggacaatttctgtttgtcttcaagttcattaatcttttcttttatagtatctgatctgctgttaatctcatccagtatatttttcattctgtttttgaagtcttggtgtttcatttaggacagtttctattttgatgtctttaagttcattagtcttttcatctcacagcatctaatctgctgttaatctcttccagtatatttttcattttagatgaatttttcacctctagaagtttgatttggggctttattgtatctttcatgtctatacttaatgtgttcaattttttctctagcttcttgaacatatggaatatagttgtatttgtattaatatccttatctactgattactacctgcattggttctgggtcagttttgatcaatgattattctcattatgagatgtattttcccacttctttgtatgcctggtaatctttgtctttttcgtttgttttgagacagggtttcactttgtctcccaggctagagtgcagttgtgcagtcatagctcactgcagccttgacctcccgggctcaaaccatactcctgcctcagcctcctgagtagctagaactacaggcatgtgccacaatgcttggctaatttttttttttttttttgagacagggtcttgctgtgttgcctaggctggagtgcagtggcgcgatctcagctcactacaacctccgacttcttggttcaagcaattctcctgcctcagtctcctgagtagctgggattacaggcgtgtgccaccatgcctgactaatttttgtatttttagtagagatggggtttcaccatgttgaccaggctggtctcgaactcctgacctcaagtgatccacccagctgggtctcccagagtgctgggattacaggcgggagccaccatgcccggcctgcttggctaatttttaaatttttgtgtgtcttactatgttgcccgtgcctggtaatctttgattgggtatcacattggtggggtgctatatatttttgtattactataaatgttcttgaactttgctatggggtgcagttatttggacacagtttattacatggcaccagagaaacatttagtcgaggattattctttccatgctaaggcacttcccttctgagtattctgagtaatctgatgccccttcatataccaggttttccactttgcctggtggaaatacgaactgtttccagcactgtgtgaactcaggggattgttccctctgattcttttgggtggttattttccagactttgcggggacgctctgtagatctctggagctttctctttgtgcagtttccttctctccagtttttctaccctgtcgattctaaggatcttggcatttccagactctgagctccttctgctcaactcagggaggctgcctggctcagcctgggtttcccttcctgtgctgctgcctggatcctctgtctaggcagtaagtttggataactagagctcactgaatttgctttcccactttcagggatcttgttctgctctgcttgtgtaatgtgaaatgtctgaaaactattgtttcatacattttgtcccatttttagttgtttcaggcagaaggtaaattcaacaattcctaatacttcatttttgcttgtacataaaagtctctgggacagatttatgttgatatttagttaacaattttgaaaagttgtattttgtaaaaaatttttttttcacgaacctatacatcttaattaaaacatcatttaaaacgttgaaggaactcctcttgggacttgccttgcaatctgctgtagcgtgaatatgaaaatagagaaggcagtaggtaatgctgtgtttcagaccagggtctgagcttcagctctccaggctcagatatataaaaactagaataccaatttcatagtttactctgggggaaggtggatggggaggtggcaggggagagaaatatctttttagtgaatcaaaggtacccttctgcctgctttcaaggtgcccagaaaccaaattgttaagcaagatgttgcttggtgaaaaagatttgggtgttctgtggaatatgtcaaccaggcttggaggattattgttgtttctgtagtaggtacagagtatcctcacctgttctggataacttaaagtcaaaagatttaaaatgctcatcagcaccaatttgttttttacaaccgtatttacatatatatgtgtgtctgtatttccctaccttcagatgataactagttagcaaccatttaagtcaaatgaacaaaagttgtccctacccaatctgaatatcccctccaaactaacagcaattatttgcatcagaaagactttgatatttaatggaatcctttggaagtaaaaggaatttttaaattaatcactccctctaatctcttaaataagtgaggaacttcataaataatgccagaataatgatacggtattactatcagtacacagtagttatttcattagtggaaaccatgactcggttggaacctcacatagactccagcagtgcatttactcaccttcccctgttttcagacttaaaggaaaggaacagcgtgtaactaagtgtaagtcagttgtaatatcttataaacccacaagatggtgccagttccacacaaaaatagaattttcccatcaaatcccatgtgtctgtctttcaggatagaaagttaggtttttccgtctcttctaaatatgagaaagaggcaagctggctgccattggcgtcttgcctcttcagtaggaggttttattcgaagtacccagcttcttggcagtttcttgagtaaatttgtgtttttaagctggaggtaccctgttagtgctcctgaagcaacttttctggtttttgagtgagctgattttgacccttgggggttttggtggctgtatccttttctgccttgtactcttcttggtagttactgttctggtgttcatggaatagatcctgtgtcagcaagccaggcagccaggcagatattactgtgcttggcaagtgcatccttttctctgctagcactgaagccaaggtccatgtgttctgaccacaaagactgagaactcctgtgttcagcaatgtttgctcaagtgattattttcaggaggttgttaaaatagctgcattcacagaagattaacagaataagctgctagctgtttatactttaaaaattaaaaaatttaaattaaagttcacattaaaaatgtggttatagttaatagttgactgtgtaattcagtatattgaggtcgcttttcagcttcctatccttcccacccaaaaaagtccaaaccctctttcgtttgtgtgtttggcttagcacctgctaattgaacagtttttggtatctcttttctccttgagccatttccacttccctttgatgtgctagggggcagacttgacttaggactgagagtgtattagtccgttttcacaccgctgataaagacatacctgagaatgggcagtttacaaaagaaagaggtttaattggacttacaattccatatggctggggaggcccccaatcatggtggaaggcaaggaggagcaagtcacatctttcaaggatggcggcaggcaaagagagagcttgtgcaggcaaactcccatttttaaagccatcggatgttatcttattcactatgatgagaacagcacaggaaagaactgcccacttggttcagttatctcccaccaggtccctctcacaatacatgggaattatgggagctacaagatgagatttgggtggggacacagagccaaatcatatcagagagtgccttccccaaacagtatattgtgtacagtaggaggatgactttgtagttcctttcctcatttctattccctgaagcctggctattcatgtctatccactttgcggtttctgaaagtgtgcagaatcccttaattctctctgcaaacccttggggtgagactgggagactgcatgtgatggtaataatatatattatctactgaggacctgtttgctaagggctttatttcaccctggtaacatatatcaagtgcctcttctgtcctggacagggtcttgggaactgggaaggtattatacaatggagaggatgacagagtccttttctcatggagcttacattgctagtagaggcaacagttaatcaaatacttacatgtgtgcacatacatttgtacatacacataaatagttaataaatggataaatactataaataaaaaaagtacagtgtgctatgaaaacaggtgacacttgcattatttatctcaaacctcacaacacttttttgagttcagtgccatcattaggtgaggcctgaaactctggaaggttaaataacttgctcaaggttgcacagctagaaagtggcaacgttgggacttaaaactcagtacgtctgactccaaaaaatgggctgctaatccctttgctatacaatctgagtttctaatagtcagcttcttggtagaagactgaaatttgaattcatgaaagcagaccctagctgtatggtattcccagttttgagtctccagtctgtcgtttcataggaaaagcagggcttcttttggagattgggacaccttgctccagagaacctaccagttttccactatctggaaagaaaactaatttaatgttagactctaaatgcagaactttaagatatttcaagtatggctataacatctctctcttctctgaatataccaatctttgtttcagggtgaagcttacaatgcagttgactcttaactacatcttactgattcgcacttgcttttccaacagattcctttttaacttctttctttgctttttgaatttcctgattttaattaaatagtgggactatcagactcttcctcctcaaagacgtctagtacaagcacttgagttaaaaaacaaaaacaaaaacaaaaaacaaatagtaccggccaggcaaggtggctcacacctgtaatcccagcactttaggaggccaaggcgggcagatcacaaggtcaggagatcgagaccatcctgatggtgaaaccccatctctactaaaaatacaaaaattagccaggcacggtggcatgtgcctatagtccaagcttcctcgggaagctgaggcaggagaatcgcttgaacctgggaggtggaggttgcagtgagcagagattgctccactgcactccagcctgggcgacagagtgagattccatctaaaaaaaaaaaaaaacccaaataaaaacaaatagtatggaaaaggctcctgccctctatacgttctccacttttaaataattcacctgaagaggtgcagaatgtaaagcctagatgttttcttaccaaggaaagaaacactgatatagggactgttgttttccctttggcctctttgtcccttgaaccactctgctgggatttctcaggtcttgcgatggccaggatcctatggcacgtttctgtcttctcagctttcctttaggcagggaaggcaggttcaaacaccttcattggagtcatggtattgtattgcttttttttttttttttccaggaacagtggagacaactggattccactcaaaaggagcaatactgggatctcatgctggagacctatgggaaaatggtctcaggaggtgagggtgtgggttagtctgatggaaggaggtagaaggactggaaaactgtgaggcattttccatgcacttatagagacatctgctgaactgaaaatcgccaggtgaaagaaatcgttagggacacagttgggaactggggcaagttggagctagcagaattaacagtaagaacttccttgtattgaaagtattccgtgtgccaggaactgtttgtgggtacattgcacggagtaacttctttaatctatgaaattgatgatggtattctcattttaagcctgatgaaagtgagtgtcagatcaaatacttacccactgccacatagctcataagtgggctgagttatgatggaactcagctgtggctggttctgagtccatgctcttttctactaaaccacacttgtcaaccaaccattggtgggatccccatcatgattctcacaccagcctgccaggtagtctacagacctttctgtccacctgcctagactcttcttttcatggcctttaccatctgtcaaggtcatcctgtgagtactggtgtcttacaagctccacacactgttctaaggtgagtttctgcaagtgtccagagccttcatattttccctcatgcgtagggtgctcctttgaaagacacagcttgagctcccagtcttccctattcatccaggcccaccatacatctttctctctatagcaggcatttcccatcccaaatctgacctgactaattcaatagaatttggggaagagctggcaggaatataccttcatgtcaatgagaagatcccaagacccacctgcataggtgagtaatctttcattggtctggaatcatttctgactgcctgtcattaaattggaggtgattggggaggtggtgaaggaggtcaggggaggcagaatattctattacgttggttataactagccatgatctgattggtttgatttaactattgagattgagtctacttatctctggctatagggctgttgacacatatttaactatggaaggaagaccacacatcagacctgctgcctttaatcttgtctgttattttagctttctttctctgaaagaattaagattcacacaaattaagaccaatacaaatagagtagaatttcattgcaaaggattatgtagcagccattattacccttcctagcaagaagttagagtatctagacataaaacaaacagaaaaaaatgttttatctaatccctatgcacctaacacttcttaaaacagcagcatcaacaaatacttcgtataaataatttatttaagactagggaagaagaaatcttaacttgttatcttgtaaaatagtcattctttgctttctacactttttctgaaacattgaagttacgtaaaaactaattgcgaaacctacacacacacacacacacacacacacacacacacacacacacttttatatatacagtaaatcccagaaccttagaggaagaagaggaccaaggatgggaattgtagggcaagccattctttctccccagtggcatctaattaattattttcttttgctaatataccacagagagagcaatcattagctgagatatttgattttaattttacacaacgtatttatcaggccatttcacaaggatttcttctggaacagaatttttcaaactgcattgcataaccaattagtgagtcgtgaaatcatttgatagagttacaaccagcgttaaaaaaaaacacaataagattgaagaggaaatatcagatgtaggggtgggtagtgtttcaggaaatatttgtttaaaatatgtgtgcatgtactgtgtttcaatattaatatatcgattactgccttagcttgggctgctgtaacaaaataccatagactaagttgcttaaacaacaaacatttatttctcacatttctggaggttgggaagtccaagatcagggtgccagtatggtttgctgacctcgcttttcttgctgtgtcttcacatagcagagaggggggttggggagaggagaggcggagaggaagggagagactgggagagggggaggtgagagagggagaggaggagacaggaaactaatcccatcatgaggactccacccttaggacctcatctagacctaatccctccctaaggccccaggccccatctccaaataccatcatactgggggctagggtttcaacgtatgaatttgggggatcacagtttagtccatagaacttatagtgggttgtagtcagaaaaggttgaaaatattgctttggaggttgttgcagtaggatttttttttggacaggatttatttttaagacgagttttgggttcatagtagaattgaatggaagctgcagagatttcccatatagctcctagtagtctgaccttatttgctatatatagctcactatattcctactcgttttttgtttgtttgtttttccttcatcccacctctgctgacatggtcccattagatactgcctttaaccagatgtgaggagtctacaagggtcatcctgccttgataggcaaaaaaaaaaaaaaaaaaagctattataggttcctgtctctacaaaaaatgcaaaaaaaaacaaaaaaccgggcatggtgtgagcacctgtaatcccagctacttgggaggctgaggcaggagaatcgcttgaacctgggaggcggaggttgcagtgagccgagaccgcgccattgcactccagcctgggcaacaagaatgaaactctgtctcaaaaaaaaaaaaaaaaaagaggatatgtggaaagaggtttaggaagatgaatccggcagcaacgtgtaggacagataggaagggaacacttggaggagagaagtctgcaggaagtcagtgcaggagtcgggctgtccggggaggagacctagaataattgtggaagtcacagtaaccaaatgggaaaggcctggtttgaaaaatacaacagtttgccagtttaccaaatctggactcagatcaggggcaaaagtcaatatagagagtgaatatgctgttatagttgaccatatggaagaacagctcctagttaaaacaggtcagcagggggcagtctcaaaaagccatatacttaccctgctaataaaaatccaaaggattaaagtttttaaagtagttatctggaagaatataacatgcaagaatagttttaaaaaaatgttttgaaagaagaatgtttcatgaatgttagatctgaaaatattgtctgttgtattataaaggtaaaaaatcattaaaatagtgtgattctgatataaaaatagatgcacagatcaatagaacagaaaagggagcctagaaaagagatgctggtctgtataagaatttagcatgatcaggctggtgcggtggctcacgtctgtaatcccagcactgtgggaggctgaggcggggggatcatttgaggtcaggagttcgagaccagcctggctaacatggtgaaaccccatctaactacactacaaaaattagctgggcatagtggcgggcacctgtaatcccagctacttgggaggctgaggcaggagaatcgcttgaacctgggaggcagaggttgcagtgagccaagatcacgccattgcactccagcctgggtgacagagcaaaactccatctcaaaaaaaaagttttcatgaccatgacagataaatgattatttttgttgatatagaaagagttaaagaaagttgataagaaaaatgtgctttcccagtaaaatatgggcagcagtcttcgagtatgaaaaatagctcataaatgtgataaagattcatcctttcataacttaagaattaaaatttaaaacaatgaaaaaccacttttcatccatctaaatggcataagtttaaaaatattcaatatttaagtattgaatacccacttccccctctgcccaatttcacatatgagaggatggcagagttgttctggaagttgggttgccagtaggtgtcaagagccttaatatttatgcccgttgacacagtaattctactttgagaaattcctttgagatattgatgagaaatgtgggcaaaaacttatgaagaaaactgctgatcacagcattatttgtagtcgcaaaaacacaataagcaaattagatttccatggtaggggaacaaattatatgtttattatgacatcttcttgatgggccattactcagctctttaaaatgatatttataaaggcttttttaaaaacacgagaaagtacctttgccatttgagaggaatatattctaaggcttttattttattttattttatttttagattcagggacattctaaggctttttgacttaacaagttcagatctagctctctagaagatgtctagatccctggcagacaattgaaaagacactaatatgtgaaagagaaaggtaaatggcatctttagatctatatagttaaaataatttataaaagttgaaaatcctaccaccaaaataaaaattttctatttgcatcattaagtactataaccaaaaacccaagttacgatgagaaaaacaaacttccagttgctagtgtgatttaataaagggcatgtaaatactagattcaagcacagatcaagggattcacttttatagtaaagccccgctgcattgcagctgtggtaaaatgacacgtgcatttcacagattttgggcgtcttatgaatgggagagggagactctatattacattgattaatgccaccattcacaattaaatgctccatagctagatatagaactatatgtacaatatgacacaaattatgtcagaaaatagcatatacctgcatacatataggttaaattaaaaagactgaaaggaaatgtatgctcatagttgttatctctgggtagtaagattgaggcggatttggttttcttctgtatatatttctctctcttcagtttttttttttagttaccatatttatcttttatatataatcagataaaaatcactttaaaagcagtagttgcctataatatacttgtttttttcctggtccttaagaaatacatgtggctttatttacggagtgatcactttatgagtactcctgtgttgtttaaaaatcctcagctccagagctgaaccatttagccttgaacccaggacaggggaagtgagtttgaacatttgggccatatggtagttttctttctcacttactaatgccctaaaaaaaaaaaaaaaaaaaaaaaaaagaaaatgaatgttttatgatgaccctctctttgacatatgagttagaaaacagggcatagcacttgaaccatttcaaatcttctttcttcttttaggagatagacaagagaatgacaaggagaacctaaatttggagaatcacagggaccaggagctcctgcatgcttcctgtcaagcttcaggagaggttccttctcaggcttccttgaggggcttcttcactgaggatgagccaggatgctttggagaaggagagaatctccctgaggctctgcaaaacattcaggatgagggaacaggggaacagctgtctcctcaagaaaggatttctgagaaacaactaggtcagcatttgcctaatcctcattcaggagaaatgtccaccatgtggcttgaggagaagagagagacctcccagaaggggcagccaagagcccccatggcccagaagctccccacctgcagggagtgtgggaagaccttttataggaattctcagcttatttttcaccaaagaactcacaccggagagacatactttcagtgcaccatctgcaaaaaagcctttctgcggagttcagactttgtgaagcatcagagaactcacacgggagagaagccctgtaaatgtgattactgtgggaaaggctttagtgacttctcaggattgcgccaccacgagaaaatccacacaggagagaaaccctataaatgtcctatctgtgagaaaagtttcattcagagatcaaactttaatagacatcagagggttcacactggagagaaaccttataaatgttcgcactgtgggaaaagtttcagctggagctcgagccttgacaaacatcaaagatcccacttaggaaagaagccctttcaatagccagtaaccaaactctctttccccatttctatctcccagcccagtcacaaaaatactcagctccatcaagaggaattgtgtctaagaggatacccctgttaatctccttttttcttggattggagaggagagaatctggacatggctttggacttggaggatatcttggattggattgcacaatggcttaaattcttgattctgcctcaggagaaagaatagtcttcatgtttccactcatccttcctttggacccatcggggaaaaagtctaaattggagatccagttttagaagtgctttctgggaagcatttaatgggattagctgtagtcactgcttatgggaagaacctcagatcagccccttaaaatgagttctagagcaggtcttctgttccagaaggggagaagcatagagggcctgtgagctcacgtgtgttctttgtcataggggtgaaaaactaacttcaagtgtcccttgtttgaaataaacttagcagagtcactttctatctta

SEQ ID NO: 8224 - DNA, 5250 bp, Homo sapiens
gcgcgtccgtgtgaagagaacaccaaacaggctttgtgtgagcaacatggttgtttatttcacctgggtgcaggtgggctgagtccgaaaagagagtcagcgaagggagataggggtggggccgttttataggatttgggaaggtaatggaaaattacagtcaaagggggttgttctctggtgggcaggggcgggggtcacaaggtgctcagtgggggagcttctgagccaggagaaggaaattcccagggttaatcactcagttaagttggggcaggaacaaatcacaatggtggaatgtcgtcagttaaggcggggcagggccttttcacttcttttgtgattcttcagttacttcaggccatctgggcgtataggtgcaaatcacaggggatgcgatggcttggcttgggctcagaggcctgacattcctgccttcttctattaataagaaaaataaaacaaaatagtgttgaagtgttggggcggcgaaaatttttggggggtggtatggagagagaatgggtgatgtttctcagggctgcttcaagcaggattaggggcggtgtgggaacctagagtgggagagattaagctgaagggagatctgtggtaaggggtgatattgtggggttgttagaagaaacatttgtcgtatagaatgattggtgatggcctggatacggttttgtatgaattgaaaaactaagtggaataagagaaggagaaaaacaggtataaaaggactaagaattgggaggacctaggacatctaattagagagtgcctatggaggttcagcatagtcctgccagcaaagattatttattcaagagttaagagtggcagtttggggataggacgaggagatatcagctgtgatggcttggagaaacagtgtaaaccggcagtgtaaacaagagcagggcatgtatgagtagttgagaatggtgaataggagtatgactagacggaagatagtagggatgacaagttatttgggggcatagtcgaagttggtctggtgtctggaatgagactggggcctaataaaaaggagcgtctatacaggagcttaaatgggctgtaccttgtagcattctgaggacaggtctgacttctgagaagggaaagtggtaaaagtattgtccagtcctttttaagttggtggctgagcttggtgaggtgtgtttttaatagaccattagtctgtcactgaatactaagagcctgaaaaaatgcttggctgatttgactaataaaggctggtctgttatcagactgtatagaggtgggaaggctaaactgaggaattatgtctgacagaagggaagaaatgactacggtggccttctcagaccttgtaggaaaggcctctaaaagtattaaagcagcggcagccgctgcacgcagacatgagggctaggctaaaacagtaaggtcaagttgtttggacagaaaggctacagggtgcggtcctggctcttgtgtaagaattctgactgcattaaccatgcctaggaaggaaaggagtttgttgttttgtaagggattgaggtttgggagattaatcagacacgatcagcagggagagctcgtgtgtttttacgagaattatgccgagataggtaacagatgaggatgaaatttgggcttgactgaagtaatgggggctgtctgtgaagccttgcggcagtacagcccaggtaatttgctgaacctgatgagtgtcagggtcagtccaagtgaaagcgaagagaggctgggatgacaggtacaaaggagtagtaaagaaagcacgtttgagatccagaacagaataatggattgtggagggaggtattgaggataggagagtatatgggtttggcatcatagggtggataggcaaaacaatttggttgataaggcatagatcctgaactaacttgtaaggcttgtctggttttaggacaggtaaaatgggggaattgtaaggagagtttataggctttaaaaggccatgctgtagcaggcgagtgataacaggctttaatcctttcaaagcatgctgtgggatgggatattggcattgagcggggtaagggtgattaggttttaatgagatggtaaggggtgcatgatcggtcaccaaggagggagtagaggtatcttatacttgtgggttaaggtgggggatacaagaggaggacgcaaaggaggctttggattgggaagaagggcagcaatgagatgtggctgtagtccaggaatagtcagggaagcagatcatttggttaaaatatctcggcctaataagggaactgggcaggtggagataactaaaaaagagtgcataaaagagtgttgtctaagttggcaccagagttggggagttttaagaagtttagaaacctggctgtcaatacccacaacagttatggaggcaagggaaacaggcccttgaaaagaaggtaatgtggagtgggtagcctccatattgattaagaaggggacggacttaccttccactgtgagagttacctaaagctcggcgtccgtgatggtctacggggcttccgaggcgatcaggcagcgtcagttttcagccggtaagccaagaaggagtcagtcagagagccctgggtcagagttccaggggctctgggagtgtctgccaggtgagttgaacagtccgatttccagtggggtcccgtacagatgggacacggcttaggaggaatcctgggctgcaggcattccttggcctggtggccagatttctggcacttgtagtaagctcctgggggaggaggttctggaggaacgcctggctgctgcagttcaggcgtttggaagttcttgtgtgctggagatgtggctggggtttgtctcacagtggaggcaaggaattgcaacttttttctgttattgtacaccttgaaggtgaggttaattaagtcctgctgtggggtttgagggccagattccaatttttggagttaatgtcgggagcagattgggtaatagaatgtatattgagaataagacggccttttgaccttttagggtctggggctgtgaagcgcctcagggttgctgccaaacgagccatgaactgggtttttatatttggtgaaaaagagcctaaacgctatctgatctgggataaagaaaaaggagcattaaccttgactatgtctttagctccagccacctttttaagagtaaattgctgggcaggtgggggagggctagtcacggaatgaaactgtaagccggagcaggtgtgaggaggggaggcgataaaaggattatagggtggaggagtggaggctgaggaagaattgggacctagcttggccaggcgaggaggggagaggtcagatgggtctgtagaaaaggaagattagaaagactcagcgacgcttggggttgggactgaggggacaggcgggagatttgggacgagttgcattgggcacagagactaggaatggactgatgtgtaaaagaatgcctggacgtcaggcatctcagaccatttgcccattttacgacaagaattagttagatcttgtaggatggaaaaattgaaagtgccgttttccggctatttggaactactgtggagtttgtattggggtcaagcggcattgcagaagaaaataagacgcctagattttaggtcaggtgagagttgaagaggttttaagttcttaagaatacaggctaagggagaagaaggaggaatggaaggtggaagcttgcccatagtgaaggaggcaagcccatagtgaaggaggcaagcccagagaaaagagagcgtagagacacggagggaaggggttcgggggttcttaccttccagaaaagcgggaggggggggtcggggcgcggaaataaggcattggggcgcagagataagggattggggcgcagagataagaggttggggcgtggaaataagggattgggacgcagagataagaggttggggcgtggaaataagggactggggcgcagagataagaggttggggtgtggaaataagggattggggcgcagagataagggattggggcgcagagacaagaggttggggcgtggaaataagggactggggcgcagagataagaggttggggtgtggaaataagggattggggggttcttgccccctaggaaagcgggacttgccgctaagggtgaaggagaaggggttgaggggtacttgcccctgccccagaaaagcagagaaggggtagagacaagagaaggggttggggtacttgacccttccccagaaaagcgggacttgccactaagggtgaaggaccaaggcaggcgtccctgtgtggtctgacacccttgaaatgtgagtgtataatcagagaggtgtccctgcaatgattaaacaccaagggaaggctgccttcccagtccgtgaccggcgccggagttttgggtccacggataaaacgtgtctcctttgtctctaccagaaaatgaaaggaattgaaattaagagaagggagagattgaagtgtggcgccaagattgaaaggagaaagaggttgagggatagtgagggaggttggagaagagagtaaaaagaggccacttaccggatttgagattggtgagatgtttcttgggctgatcagtctgaggacctgaggtcgtaggtggatctttctcatggagcaaagagcaggaggacggaggattgatctcccaagggaggtcccccgatccgagtcacggcaccaaatttcatgtgcgtccgtgtgaagagaccaccaaacaggctttgtgtgagcaacatggttgtttatttcacctgggtgcaggtgggctgagtccgaaaagagagtcagcaaagggagataggggtggggccgttttataggatttgggaaggtaatggaaaattacagtcaaagggggttgttctctggtgggcaggggcgggggtcacaaggtgctcagtgggggagcttctgagccaggagaaggaaattcccagggttaatcattcagttaagttggggcaggaacaaatcacaatggtggaatgtcatcagttaaggcggggcagggccttttcacttcttttgtgattcttcagttacttcaggccatctgggcgtataggtgcaagtcacaggagatgcgatggcttggcttgggctcagaggcctgacagtgagacttccccctcccaccatcttccacctcccaccatcttccacctccttctttaggcctg

SEQ ID NO: 8225 - DNA, 399 bp, Homo sapiens
gagtgagagaacaggaaacctgccgagaaaaagatcgataagcagacaattacaccaagccaacttcagtgcaatcgttaaagcttacacatgggtgcacgcttgggagccgtgagctaccatgttaaaaggccaacttcctaaggaaaaatgatggaaagagatcccgagatcctatgaaatggaagagggaggacaacccagctatcccaacatcccagctgaggccagccacacacgtgactgtctgcaaagcccgtcgggcctgggtccagctcaggttgcagaattgttggcaagtaaaacgtttgttgtcgttctgactcaaaaacatggagacaaagcagacttgtagggtattacagtcaacaactagaccctacagctaaaggactgtct

SEQ ID NO: 8226 - DNA, 245 bp, Homo sapiens
cttcgctcctgcccaggatcctgcagcacaggttctgcagcagaacgttcggcgacttctggtccggggtcgccatcctcgcccggagccgtgcacggtggtccgggcagagccgccactgccgccgcacgcgcagggaccgcggcccgcgcccttcctgcgccccgcaagctccctgctcctgacaggctaaggcgcgggcgccgccggccaccagggcgccattttaacggaacccgccgaaa

SEQ ID NO: 8227 - DNA, 115 bp, Homo sapiens
ttttttgtatttttagtagagacggggttacactctgttagccagaatggtctcgatctcctgacctcgtgatgtgcccgcctcggcctcccaaagtgctgggattacaggcgtg

SEQ ID NO: 8228 - DNA, 12744 bp, Homo sapiens
agtggaggagtgtcaacagtcagaaaatgcacctgcagccggatctggccatctcacagtgggacagcagcagcaggtccttcggagcagcagcacctccgacatccccgagccgctgtgctcagattcttctcagggtacatgatgtcttcagtgtttaatacagaactatagattctggcagaggaataaaagctgcatatagtattgctttgtacatatattctgaatatatttatttcaagggaattacctttttaatttgattagaaggatgtgatttatggcaatgaaatatttgcactatttaaacctgtttatctaaattatttttatatatctatatgtagatatatacccacttttttaaaggttggcatgtttgaggacgagacaggagtccaagtggctggagtagaaggaagacggaggctgttacaacatgaagtcaagtagggcatcaagttaggtattatggaaggcagggaggcaggatgggggcagggacatagggaaagggctgtgagaagagccgttaaagttgaaaatgagaatggaaagctgaccagacttgtgaaaaagtttattaacagcttgccgactctgctgagatggaaaataataacttttaatagcattaatctacacggtttcaccaacaacttgcagcagcaacagggtgtggaaagcagggagacagatggtttgacctgtaaacagtgaagaatagatttctcaatgaaagagtgtgcttaaagtgtgtctagtatcattggaaatagttattctgttttggtgtcatgaattagttaagaaatcaactctatttatcaacaagttatctcatatcttttaatgtcaaagtcatgctagtctcatcagatgagtagggaattattctgtcttagaaatcctctggaaataagaaaatacagtaaaagcttcagaaaatgtattatctgaaagatttttgaaaggttttgtataaggctttttttttatacatatttggtagaaactaccagttgcctgcatttttcttgtaggaatgttttaaaatatcatttatattttaacataatttcacttatggaggaggaataagttcaagaaatgtgttgtacagtatggtgactgtaatttgtaacagtgtattgtattcttgaaaattgctaagagagtagattttaagtgttctcaccacaaaaaagtatgtgatacatgttaattagcttaatttagccgttgcacagtgtatacacatatttcaaaacaatatattatacatattatattaatataatttttatatgtcaagttaaaaaattaaaaaagttaaaataaaatagttataggactatttagattttccatttcttgttctgactttgataaattatgtttttgtagaaaaaaattttttttttttttcaaatttattgcccccagattattcataaaatcctcttatgatcagctttagtgttttcaggctttgtggtgatattcccttttttattactgaaactggttatttgtgctttcgtcaatctttattctcaagcaatactgaggcaccttactgctctcttcttcctgttggttcatctggccaacacaggcactttttctctgagataccttccccaagaccccaggaagggttttgttgccctcccctgtgcgaacataaatgcgctaagtgaacctgttggccacagtgaacagtaatcaatccactctcttcagagctctctgtgggccagagaccaggtctaaagtgtggacttgacccataggctgctgttttgccaggcccataactcctgtttttacataccttagaatatttaaatttaatagttacctatatataaaatcattttccggttttactatctgaaacattccttctatttccgctacccccctgccccaccatttctaggtcaaaaggcagaaaacacacagaattcgagttcttcagagcctcagcctattcaagagaataaaggacatgtgaagagagaacatgaaggaataacagtaagatattttcaagccatttcagtttgtcattaaaaataaacattaattagtgctcagtaagtaaatttattggtggcagtgataattaaaatatttttttccatttagacagtttataggcccaaatgatgttgagatcttttaagattttgcttgctttctatgtaaaattacagtcacattacaaaaataggaaaaaaattaacatgaaaatggagttcaccacctggtctgtgtatggcactgtgtatttttaagcagttacctttgcctgttaaacctacgtttcagattccccattcctgacatccatttaggtagcctctacctgacatgaattactagaatcagtgagtattcacaaagatgttaggtttcttaaaaaaaacaaaaaacaaaaaacataaaatggcatttatttaaatatatataaagtataaagaagaaaattaaaacataagcccataactcattcatgcagataacccctattcatttttttaaaatgtagcatatattcttagaaaactcaaacatcacagaaagatacaaaataaaaaagggaaggcctctccttgctcccctcccactggacaataacccatgttatgtttcttttttctttatttttaaaaagggcatgtaccagtttacatttgtatattctgttttcagcaatgaaataaatacccagaaacccaccatcagcttcagatcattttggcttctacactccttccttgttccctctctctgctatctcccctcagagaggggccttatcttggctttgtgttcatcatccccttgctttgctctgtagttttgctatgtaactatgtatctctaaacaggatgttctttagttgtccttacttttgaattttttaataaagtattgttgctttgtttactcagttacatatttttaagatttattcacattgtgctatgtagcaatagttcatcaagttttctgtgatgtggtattccactataagtagaccacaatttattttttcattctcttgttggttgacatttagattgtttccagctttttgtttttgtgaaaactgtagccatgtacattcttgtatgtgtttcagcatctgcatgtttaatgttttctctatgatggctatctaggaatggaattaatgacttatagaataaaataatttctttacaagataacccctgttctctaaagtggttgcatcactcatatttttgccagcattgtgtagagctcccattcatcttcattcttgccaacactttctattatcagattttttcatttttattggtcaactgagtgaaaataagatgtcttattttgtatttcttagactactaataaggttaaaaatcttcccatatgtttattggccatttttgtttcatctgtgaaatgcctactgatgtcctttgttgtttttctattttttgtctttttctctttatttatatttactagctctttgtatggtatgaatactgatcctattttggttatgtttgtagcaaatatcttcttccaatatatggtttatatttttaccttctctagggtatcttttgatgaacagaagttcttcattttgatattctctattatcatttttattgttgaggctttatggaattttttaaaagtctcaactacacaggaataaaaatattatatttataaatgtttcaggtttgctctacaaatttaagtcttttatatatttggaattgattcctgtttatggagtgaggtagggatccaatttcattttttttcctgaatagataactacttgtgtcaggtcccatttattgaattaatttttctttattgatctgaaatgccacctctctttcatatgtgctatttctgagatatgtaaggcctccttttggtgtttcttatcttgattcttggttactttatctttcggacagtacaacatctcagttactatagttttcccacctctttctcccttttccttctaatggaagttatttttccataatcttttgtctttctttgttgctgagaagtcttctgtccatccggtcctgtctggttattgttccttgctgtttttgtttgtccttttccttccatttcactatagtatatttaggtgcaggaatcttttggttcgtatgtttgttctttttggtatatgctatgtgccatgcatctgtaagtgcttgtcttctgtcatttctggaaaattcttggtaacatttctgcatatattgtctcattttttcctcattggtacagtggtatctccacctgttacatgggacactggggttttaaaaaaaagaacacaaatattgcctcttttatattctctctttgctttcctcctggaattctgggtggaaatatattagactttcccattctgtcttccttgtctcttaaatgttttttatattttctattctcattggcttggtgtttcctggataattttatcagctctgtctttcatcagttcagtaactttatctttactgttaatatttccattgaattttttagtttagcaattatgccttttatttctgacagttcacgtttatacttttcaagcatatcttgtaatttctaataatcttttgttgcttgcttgtttttgtgattccaacttttattcctttaaaatgtttacaaattgcaattctgaattttttatctgattatctgaaatccttgggggatctaaatctgatatttgttgtttctgagattcttacacatggtgatttattttctttagtgtttggtgatgttttattatgggttcctagctggctgatcttaatctgcagaaaacgtggatttctaaattgatgacatttcaacagtatgtttgcatttgtttcttgcaccacatggagagtgctactttaatcctggagtcttggtcctcttgccactggcagtggtactattggatttacccttgcaatagccacgtttcactgccctggtttctgctcacttttaagggttgaaggtagatttcttggaagtttcttttacttcctgtgagccccaaattgcaactaaagttttatgtaggatctggttctatggctgggaggtattgtgtctctcatatagttagaagcagaagagtctacattctgttttttaactaaggaaatattctgtgcatatttcctcttagcacattagatatgtatcattcttctttaaggctgtgtaatagttttttcatatagtgttaatcctctaaatcttctaaatattttattcatggcttgctttttattagcttaataattattctttcttttaattttttttccagttttgccatggtcaacatttgtggggcattcttttttttcttttaactctacatcttgttccccacttgaacctaaggttcaaggcccactggcagctgtgtctttttagaaggtctgcatttcttatttttgtccttcttcacctgggtgccctgcatggcctggtataaccagcatctcttcctgtacatagaacttgctgattaccacccagtacttcctgccttgaatcccctcctgtcttccctctaccacttcatgtccattgctgtcttgaacagctctcctataaagctgagccaattaaggcaacagtttattctgcatccccttcagaggcagtttatttgcatattttgcttatatacattataattattttgtgtaatttgtgtatgttttgtctctccaagcaaattataacttattagaggatgcagatttcctcctgatttttttttaatcctgtgaatttaatacaaggttaagcaatgctcaggagagtctgtggcatgcttaactaggaagacactgaatggacctttagatctctgggtggagtttgcgccttccctaccagcacacttatcatttgtgtgcataacttatgcctcctagagcattgtgttcacaatatatgtgtgcctgaccagaagaacaaatagaactttaaaacaaattccttccatataatttagcattccttcttagatcaatttaattggatggatgtaagttgacaaagtagaggatataaattaaagtttcagatcttgagtaacataaaattaaatatagtgatttgtgaaaacatatccttcaaatggaaaacatcaatttatttagctattattattatttgtttctttttctttagaaatttgggctagaaacttaagtcttataacaatgaaaactttcctgtagtaaatgcaatatttctttttgtctgaagatcttagttcgaagaagcagcagccctgctgaattggatttgaaagatgatttgcagcagacacaaggaaaatgtagggaaagacagaagagtaagttccgggaaatgtctgttcctccaactacagagttgatatgttctattttctttttacattttattattattattattagagactcagtctcactctttcgcccaggctggagtgctctggcacaatcatggctcactgcagcctcaacctccctgggctcaggtgatcctcccacccaatccttctgagtagctgggactacaggcacatgtcaatgcgcttggctgatttttctattttttatagagatgaggttttgccatgttgcccaggctggttttgaatgactgggctcaagccatcttcccactttttaccttctaacttgagtaatagcttatcaatttgagagaaatggttgtgaaatgggaccttcttattcctggaatcctaggattgacaaaaggttcatccatacatataataaaacagttctactcacccgtaccttgagaggcctgtctttctacccctggacctttctccaggtgagtggtacatcagagactgatggcatgagtgagcagatagaccggagagaaaaattatcttccccagaaagttcccagaggctagaagcaaaaagcatcagaagtacattgaagtcaatgggttaaatacttagaaatggaatgagattggaatcctgagacgtattatcatatattgtaaaatacagccttagtactctgctttcctgaagtcaggtgccagagtagcaaagtaaacacctcctcaagttcaggacagttcttgatgggtgcagaggagttctaccttcaccctgctagcttagagctctttaggagatgaagtttgggacctaccattggtcacctggttactgagacaacttttagttctttgtgagtaaatagaggacagcagattagaaacagcaagagtaagggactgttaggagtagatacagagagcagccagaagggtgagcagacagagatgtagatgcataaagttgttatgaagtagacaggagactctgagaagcagaagtgtctaggttcattttatgtcagactaaatagttctataagtctttgtggcctagccttattatattatgataaattagaacttattactgtttaaaggggagaatttctgttctagaaaatctgttgtattgggacactatatccccagatgaccctgaatgagtcaccctaggtctacgtctacctgtcaggcttggggcatacagcatctttagactcttctacccggtagagtaaacttgcatttgtggtggatcagttattatcttcttcctccacccatcctcattttgtaagtcccagcacactttaggacttggtgtagtttgggtgtagggggtactgagtgaagacacgttgaagagtgccacttgaatgatacatagtggtgctcataatggctattaatatccttatttggaagattcattttcttgaccaagagccccacgtggacactttttgagctcctctcaagttctgcaggttctgccaaagaacatgaatgattcctactgtgtctgctgtttgtttagttactttcgtatcagtaattgtgaacattctgattttcagctattttttatcttaaactttggttcttccattgtaccaggtgaaagtaccaacagtgacacaactctgggctgtaccaatgaggcagagctgtccatgggcccatggcagacctgtgaggaagacccagaactgaatactcccacagatgttgtggctgatgctgatgcccgtcattggttacaactgagtcccaccgatgcttcaaatttaacaggtaaattgcattttgaaaaagaggcactaatgcaaacagctgggagatcagttgtgaatcattggagtcttgtatacagagggttctgaaacagttgtaggaggaagtgtgccatgctcctgaccactgtccaccataggaggaagtgatggtattcatgtcaagcctttactatccctgactgaattgttctatgctagaaagaagagtgatttttccaactcatacatgttataaatccaggataagtcaaagagtttagatagcttattgattaatttttaaataaagtattttgatacataaaatgtaagttgtaacatatacagtatgtaagttacggggaacagtaatgaagtgaacacgagtgagtctactacccaacttaagaactagcagggcacccaagccagtgaggtctcctagaggtccttctcaagtccctccccttctcccattatcttgggaccctagtccaaatttgtttttatactaatttccttgatttctttatagttttaccgtgtgtgtcaagcaatatatcatttagttttgtttctaaacttaaaaaaaatgacttcatactctgtattttttgcaacttttttaacctcagattgtttgacttcagagccaaactttctgggtcggcttccaggcacctccgaggaattgctgggtggccttgagctagttatttaatctctgtccttttgtttctttgcctttaaatttgggataatagcccgtactttatgaaggctgttggaagaataaatgagtgaacatctaagtcaggtgcccaaaatattgtgtgtggtgtagtctgcagttttagctacacacacacagacacacacacacacacacacacacacacacacacactgtgtgacactgggtaagtcaacctcaaaggtcagtttccctcacctgtttgaccaggctgatgagaacggggaggccatggaggagctgggtttggttttgctttgttttgtggagtgtcaggagagactcgtggtctgaggaatcagtgcgggaaaggctgaccagagccaagacttttatggatgcacattcatgttcacacacaggtatcttgtatgaaaacaaccaccacaaagtaacatgttaagagtgttattaaaatgccaaaaaatattttaaaatgattaacataaaggctaaaatttgaccttaaatggatttttttttttaaaccaagcaaactggttttcactgtgatttaaaatttaactaacgtctctgatatttgggaaattcttgatagaatgtcattaaaacttcataaaattaacatatgaaggtggtattcagtaaaattctttatagactaaataatgattttgactaataatactatacattgatatgagattcaacatttacaaagaattttgaggcattctctttgattctgtatgggaagcaggccaagtcttatcatgtctgttttagagatggggagattgagacccagagaaattgttatcaagctggagtgtgagttccagagatgaaactggcttccaaaatgttttgactcaacgtgcagtgctatgtctactcctttacactgtgttcctgttaaaattaaaattactgtaaagccctttgacctacttgagaatccttacagattatccaaaagaaagtcatcattgtggtactgtaggaggcaaaactgaagcttcagtaggttgaatttacttaaacatggactagttttaattatttttattgaaagggaagaaaattaggtgattacttcttttgtctgttctttggaaagattagttttgatcccatttcagggtatgtattggacagctcaatttaataaacctctgtgaggtaattttatatgatgcactccatgttgtgattaactcctccaaatactccgttcttctttgaaatactaatatagagaatcagtacacgcagttcaatagttcaccttgtcatctgtgaaaaggacaaactgtaatgtgataaggcttaaggattatcacagttctgaatttaactttctgttcttaagagagcaatttcttcataaatgttcaaaataaaactcatatgagcctgatttttaggacatgcaaagagaaacaatttgattatatctttgtttcttattgaataatcctaccagttatcaaatgcttagaataataaactgcctccaaaatcttaaattccttcatcactggcaaactgtttacttttatatttgctttctcattaaatcatgtttgctgaaaataacagctaaatttactgtgcattgtcttaaagtttacctgggatttgttttaatcagatgtggtaagacatacagacatggaaatgattgtcatggaggaagaagtttatactcacggatccctggaaacaggggtcatgcagggaagtaccaggaggcagaaggaacaaaatggggcaaccgcttttagtgtcatttctatggaaatagcaaggcaaggcagggtatgcagttttaggattactaatatgaatgacttcagtgggctctggagcatacgggctgtttctagtttcctggtacccagtcctaggatgacagggcaggggatattgacttagtatgtgagaactagagaaaggaggtagttggagggtctgaattttgaattggtaggtttgcatgtgaaagacatgctgcctggtgaatagacttctatctctaggaattagctaaccctggaagtggcagtccttccctgatcagtgaggccctaatgccagagcattgagaagacagaaaataagaaaatatacttaagacatgcatacatttagttctgttgaaatagtcaggggagggggacatttatgagtctacagctaagaatcagtattgtcatttacctcatcccttatttaacaaataagcttatagtctagaaatactgatttagatgctctgagaaataaaaagatgaataagtcataagccactatagtttttaagagcttataaaaaggacagaagacacaacatttatcctaatagtcacaaataatgtgataaattctatgacatttacttaaagttgtaatcatagagatagacaaatagacggatggaacagaagataaaatatagcactgagtgcacacagacatggaatcatgatatatgatatatgtggcttgtcaggtctgacaaggaaacaatgtattgttcaacacatttctgtgggacaagtacttagccatatggaaaaaaatgaaatagaattcctacctcacgccatgtccaaagtcagtttcagagggataaagtacataaatgtgaaaaggaaaatttaaaaacttttggaagaaaacgtcttttttaaaaggttctatgattttttttaaaaaatagctaaccataaaaaaagtgtcagtaattcaacctcagcaaaatgaaaactgcattaccagagaaacttttaagaattctgtggtttagcagaaccacaaagggaaaaagccagctttgttgctcttttctttccatgttcttgttagctcagtgataacttttaaagtaaggtttggtgagaaatgttatctagcatcttggtttagttgggagattccaaggtctttctctactggaatgcagactccaggagggggacgcctgttgtctgctatgtgcacagctgattcttgcttccgagaatattgcaggacaggagagaagcatttaataaatacttgaatcagcgaacaaatacactttaagctgcaagctgttgttttatatagctgaaaagagcaattaaattttaattttttagaaataatacataagacaatttcaaaatctcttttatttagtgtggttatcacagtcttgcatccaaatgttacagaaatttttttgccacttctgcttttaattatggctgtgaatatgaattacagctcctgttacctgccactaaaattgtttttccaagaatgctttgtcagcattctctgtcatcgcctatatttttggcatttccaccagactttgatgtgtttcgaagtcatgaaatattagaaagaaaaataataatgatagctactggggcattggtagctcaccttctgaaatctttgcagtgagcagtggacatccttgaaaaggagtggaagaaggagaggagagccaggctgcactggtgggagcaggatgccatcttactgtttctccacttgatcattgacatccaggccaggcctgaattttctggctctagaattaagttgtttcactcaggcctttgagtttgttttttatgtttagttttcaaatcaaaaggaaaatttttttcagagaccgaggctacatttctttaacactgtgcctagcttatataaaattgcagccatattaaatcaccatttggccttaaatgcttattttgccaactaccaagacttattttgt

SEQ ID NO: 8229 - DNA, 312 bp, Homo sapiens
tacaggctgagttttgattatcctcttcttagtagtagtaatgagcaaattaaaatttgtggaaaatattctagttatgtggatgtaaagtttcatgactacgtcagtgagtgtggaatctagtgagaaacagagcaatggggcttgcatgcagggccagggagcaggtcctgtaggggatattcccagggcagcatggtaaggagggatgagggagcaggtgtgagtttagcataggggagtgaacagcaggaagaacagagtagcaggtgccaactgggttagtactactggagactaaagtgagctaga

SEQ ID NO: 8230 - DNA, 340 bp, Homo sapiens
agatgctccagtcaacagaattaactgagccttccttgaatcatcccagcccaggtgccagaagtgtgagtgaggaaaccttcaggtgatcacaacccccagctgttcccatcccccacagcttttgtgtcttcccagctgaggccgcaaacgtcatgaaacaaagacgagtcatccccactgtgtcctgccgaaattcatgacccacagaatccatgaacttcataaaatggttattgctttatgccactaagtttggagtagctagttatgcagcaaaaggtaactagaatatttttataaaacactataaagatgaaattcaaaaaagacacacaga

SEQ ID NO: 8231 - DNA, 8040 bp, Homo sapiens
gggtatgtgaatgcccagctggagaaggaagtgcccatcttcacaaagcagcgcattgacttcaccccttccgagcgcattaccagtcttgtcgtctccagcaatcagctgtgcatgagcctgggcaaggatacactgctccggtaatcaagggctcacagagcttaggagtagggactagagaggtgtttggggactgttaactcactgggcctttcttctattccaggcaagtaaagcagtgaatttggagttttcaggaaatatcctatccctttccaaagagaaccaatacagggtagtggttaagtatctggcctggcagggcatggtggctcacacctatcatctcagcacttcgggaggccaagacaagaggatcacatgaaatcagcagtttgagaccagcctgggcaatatagtgagacccccgtctctaccaaaacaaatttttaaaaattagctaggtgtgatggtgcagtcccaactactggggaggccgaggcaagaggatcacttgagcccaggagttcaaggctgcagtgagctgtgtttgcaccactgtactcctgtctctttaaaaaaaaaaaaaaagtcaggtgcagtggctcacacctgttatcccagcactttgggaggctgaggagggtggatcacctgaggtcaggagttcgacaccagcctggccaacatggtgaaacgctgtttctactaaaaatacaaaagttagccgggcgtggtggcaggcgcctgtaatctcagctactggggaggctgaggcaggagaattgctggaacctgggagccggaagttgcagtgagctgagattgcaccattgaactccagcccaggcgacaacagtgagactccgtctcaaaaaaaaaaaaggaaaaggaaaaaaaaaaaaactgtttaggagtgtagacttaagagtattagagtattgattagagcattcttgtggtgggaaaaactggatccatgctgaatgctcatcaataggaaaatggtgattaaactgcaattcagccacaaaatagaatataatgcagttgtttaaaaaaatgaattatcctggctgggcgaggtggctcacgcctgtaatcccagcactttgggaggctgaggcaggcagatcacctgaggtcgggagttcaagaccagcctggccaacatggagaaaccccttctctactaaaaatataaaattagcagggtgtggtggcaggtgcctgtaatcccagctatttgggaggctgaggcaggagaatggcttgaacccgggaggcagaggttgcagtgagccgagatcatgctcactgcactccagcctggatgacaagagcaagactttgtctgaaaaaaaaaaaaagagttatcctggaaagctgggtttgggggtaaaaacaaaaaaagttagagctatatcgattgactagtggaatgttcatgaaatatcattaatttagaaaatttacaaattaagacacatacacatatgtgcaatatgaaggcatttttataatgacagcaacaaaaccaccctatttatgttatgagtatgaaaaaagatgttaacatgaattttctcagttgggaataacaggagtttgagaagaaaattaagtcattctttatacatctttgcatcgattctttagttagaacaagcatataatttggaaagaatttcataaggaaaatataaacaggagtacttctcaaggtttttgtcaagattaattgagataatactagattgatgaagctcttggcatggtgcttggtatataaaagtgcccagtaactatgagctactctttgttgttcccttcttacctcagcaatctgggatatctctgcctatcttcccagatgcactggagatctttttgttttcttccttcaagtctgattcttttttgagcagaggggaaaaacttctccttagtgatttctcaaaataaggtgagggagcttgcagagctgagagggtttttgttgttgttgtttgccttttttcttttctttttctttttatttttttgagacagagtcttgctctgtcacccaggctggagtgcagtgcctcgatctcggcttactgcaagctccgcctcccgggttcacgccattctcctgcctcagcctccccagtagctgggactacaggcgcctgccaccgcgcccggctaattttttgtatttttagtagagatgtgatttcaccgtggtctcaatctcctgaccttgtgatctgcccgccttggcctcccaaagtgctgggattacaggcgtgagccaccgcgcccggcctttttttttttttccccccctttttgtggagaacacggtcttgctatattgcccaggcaggcctcaaactcctgggctcaagctatcctctcgcctctgtgcccctaaaagctgagatgacaggtgtgagccactgcacctggcaagagagttcttaagtagggccctgtatatttttcagggctactccataggcagagctgctgtattcagcaatttcttttttttttttttttgagatgaggtctcactctgttgcccaggttggaatgcagtggtgtagtctcagctcactgcaacctctgcctcccgggctcaggtgatctcccacctcagcctcccaaatagctgggaccacaggtgtgtaccaccacaccttgctaattttcttgtattttttgtagagatgggatttcgccatgttgcccagtctggtctcaaactcctgagctcaagcaatctacccacctcggactcccaaagtgctgggattacaggctgagccagtgcacctggcctgtattcagcattttatgcgtagatgtatatttcagggaagtaagtctatggcttttatcagattattaaagaagatcatgatccaaaaaaggatcttcccttctctaaagtgatggtgacgcttgtccccacagcattgacttgggcaaggcaaatgagcccaaccacgtggagctgggacgtaaggatgacgcaaaagttcacaagatgttccttgaccatactggtaagtaacagtggagatctgaggagggggtctctggtcagtcactgcctgggtgggtgggctctgagggtggtgtgggggccaggaggaggctgaggatgggaacggcagcatccactggggcgccatgctctccccactccaggctctcacctgctgattgccctgagcagcacggaggtcctctacgtgaaccgaaatggacagaaggtacggccactagcacgctggaaggggcagctggtggagagtgtgggttggaacaaggcactgggcacggagagcagcacaggccccatcctggtcgggactgcccaaggccacatctttgaagcagagctctcagccagcgaaggtgggcttttcggccctgctccggatctctacttccgcccattgtacgtgctaaatgaagaagggggtccagcacctgtgtgctcccttgaggctgagcggggccctgatgggcgtagctttgttattgccaccactcggcagcgcctcttccagttcataggccgagcagcagagggggctgaggcccagggtttctcagggctctttgcagcttacacggaccacccacccccattccgtgagtttcccagcaacctgggctacagtgagttggccttctacacccccaagctgcgctccgcaccccgggccttcgcctggatgatgggggatggtgtgttgtatggggcattggactgtgggcgccctgactctctgctgagcgaggagcgagtctgggagtacccagagggggtagggcctggggccagcccacccctagccatcgtcttgacccagttccacttcctgctgctactggcagaccgggtggaggcagtgtgcacactgaccgggcaggtggtgctgcgggatcacttcctggagaaatttgggccgctgaagcacatggtgaaggactcctccacaggccagctgtgggcctacactgagcgggctgtcttccgctaccacgtgcaacgggaggcccgagatgtctggcgcacctatctggacatgaaccgcttcgatctggccaaagagtattgtcgagagcggcccgactgcctggacacggtcctggcccgggaggccgatttctgctttcgccagcgtcgctacctggagagcgcacgctgctatgccctgacccagagctactttgaggagattgccctcaagttcctggaggcccgacaggaggaggctctggctgagttcctgcagcgaaaactggccagtttgaagccagccgaacgtacccaggccacactgctgaccacctggctgacagagctctacctgagccggcttggggctctgcagggcgacccagaggccctgaccctctaccgagaaaccaaggaatgctttcgaaccttcctcagcagcccccgccacaaagagtggctctttgccagccgggcctctatccatgagctgctcgccagtcatggggacacagaacacatggtgtactttgcagtgatcatgcaggactatgagcgggtggtggcttaccactgtcagcacgaggcctacgaggaggccctggccgtgctcgcccgccaccgtgacccccagctcttctacaagttctcacccatcctcatccgtcacatcccccgccagcttgtagatgcctggattgagatgggcagccggctggatgctcgtcagctcattcctgccctggtgaactacagccagggtggtgaggtccagcaggtgagccaggccatccgctacatggagttctgcgtgaacgtgctgggggagactgagcaggccatccacaactacctgctgtcactgtatgcccgtggccggccggactcactactggcctatctggagcaggctggggccagcccccaccgggtgcattacgacctcaagtatgcgctgcggctctgcgccgagcatggccaccaccgcgcttgtgtccatgtctacaaggtcctagagctgtatgaggaggccgtggacctggccctgcaggtaagccagtacgtcttgaccccagctgggagagggacccaaagagcagtagctttagatgtggaagggcttggggggccatggctagagggtgctggcttcccttgcagagagggaaggttaagagcatggactgttaagtcagatttgaattctggctatgccacttactaagctgtgtgaccttgggttagtttctgaacctctctgtgctcagattatttggccacaaaagggggtcagtgttatagtacatttacctcatagggttgataaagttctgtgtatgaaaagtacgcagggctgggtgtggtggcttgcgccagcactttgggaggccgaggtgggcggatcacaaggtcaggagttcgagaccagcctgaccaacatggtgaaaccccatctctactaaaaatgtaaaaattagccggacattgtggtgcatgcctgtaatcccagctactcaggaggctgaggcaggagaatcgcttgaacctgggaggtagaggttgcattgagctgagatcacgccattgtactccagcctgggtgacagagcaagactccgtctcaaaaaaaaaaaaagaaaaagaaaagaaaaatactcggggccgggcgcggtggctcatgcctataatcccagcactttgggaggccaaggtgggtggatcacctgaggtcaggagttcgagaccagcctggccaacatgtcgaaaccctgtctctactgaaaatacaaaagttagctgggcgtggtggcacgcacctgtaattccagctactcaggaggctgaggtaggagaatcacttgaacctgggaggaggaggtttcagtgaaccaaaatcgcaccactgcactccagcccgggcaacagagtgagattttgtttcaaaaagaaaaaaagaaaagtacttagaacactgcctggtacatgcacgttagcagaagaggagggtgctgcatcgcatgaagtgctatttaacatgcagttcctaggcctgaactcaggacttactgaatcagaatgtctgggggcagggctcaaaaatttgtattttgaatatgtttcccaggtgatttctttctttctttctttctttctttttttttttttttgagacggagtcttgctctgtttcccaggcaggagtgcagtggcccaatctcggctcactgcaagctcagcctcccaggttcacgccattctcctggctcagcctcccgggtagctgggactacaggcgcccgccaccacacccggctaatttttttgtatttttagtagagacggggtttcactgtgttagccaggatggtctcgatctcctgacctcgtgatctgcctgccttggcctcccaaaatgctgggattataggcctgagccactgcgcccagcctccccggtgatttctaacttcactaaaattggagccctactactctaagtagcttttacatagctgtggcagcggcaggcccccttgcttccaggagtgctgggaatcctgcctcggggcctctcctcggccatctctctctcccatagtctccatgttgggcagggaggggcttggccctaaagcccatgctctccccacaggtggatgtggacctggccaagcagtgtgcagacctgcctgaggaggatgaggaattgcgcaagaagctgtggctgaagatcgcacggcacgtggtgcaggaagaggaagatgtacagacagccatggcttgcctggctagctgccccttgctcaagattgaggatgtgctgcccttctttcctgatttcgtcaccatcgaccacttcaaggaggcgatctgcagctcacttaaggcctacaaccaccacatccaggagctgcagcgggagatggaagaggctacagccagtgcccagcgcatccggcgagacctgcaggagctgcggggccgctacggcactgtggagccccaggacaaatgtgccacctgcgacttccccctgctcaaccgccctttttacctcttcctctgtggccatatgttccatgctgactgcctgctgcaggctgtgcgacttggcctgccagcctacaagcaggcccggctggacgagctgcagaggaagctgggggctgctccacccccagccaagggctctgcccgggccaaggaggccgagggtggggctgccacggcagggcccagccgggaacagctcaaggctgacctggatgagttggtggccgctgagtgtgtgtactgtggggagctgatgatccgctctatcgaccggccgttcatcgacccccagcgctacgaggaggagcagctcagttggctgtaggagggtgtcacctttgatggggggtgggcaatggggagcagtggcttgaacccacttgagaaggctgcctcctaggctctgctcagtcatcttgcaattgccacactgtgaccacgttgacgggagtagagtagcgctgttggccaggaggtgtcaggtgtgagtgtattctgccagcttttcatgctgttcttcagagctgcagttatgccagaccatcagcctgcctcccagtagaggcccttcacctggagaagtcagaaatctgacccaattccaccccctgcctctagcacctcttctgtccctgtcattccccacacacgtcctgttcacctcgagagagagagagagagagcacctttcttccgtctgttcactctgcggcctctggaatcccagctcttctctctcagaagaagccttctcttcctcctgcctgtaggtgtcccagaagtgagaaggcagccttcgaagtcctgggcattgggtgagaaagtgatgctagttggggcatgcttttgtgcacactctctggggctccagtgtgaagggtgccctggggctgagggccttgtggaggatggtcggtggtggtgatggaggtggagagcattaaactgtctgcactgca

SEQ ID NO: 8232 - DNA, 191 bp, Homo sapiens
ctgggaatcctgcctcggggcctctcctcggccatctctctctcccatagtctccatgttgggcagggaggggcttggccctaaagcccatgctctccccacaggtggatgtggacctggccaagcagtgtgcagacctgcctgaggaggatgaggaattgcgcaagaagctgtggctgaagatcgcacgg

SEQ ID NO: 8233 - DNA, 1464 bp, Homo sapiens
ctgggaatcctgcctcggggcctctcctcggccatctctctctcccatagtctccatgttgggcagggaggggcttggccctaaagcccatgctctccccacaggtggatgtggacctggccaagcagtgtgcagacctgcctgaggaggatgaggaattgcgcaagaagctgtggctgaagatcgcacggcacgtggtgcaggaagaggaagatgtacagacagccatggcttgcctggctagctgccccttgctcaagattgaggatgtgctgcccttctttcctgatttcgtcaccatcgaccacttcaaggaggcgatctgcagctcacttaaggcctacaaccaccacatccaggagctgcagcgggagatggaagaggctacagccagtgcccagcgcatccggcgagacctgcaggagctgcggggccgctacggcactgtggagccccaggacaaatgtgccacctgcgacttccccctgctcaaccgccctttttacctcttcctctgtggccatatgttccatgctgactgcctgctgcaggctgtgcgacctggcctgccagcctacaagcaggcccggctggaggagctgcagaggaagctgggggctgctccacccccagccaagggctctgcccgggccaaggaggccgagggtggggctgccacggcagggcccagccgggaacagctcaaggctgacctggatgagttggtggccgctgagtgtgtgtactgtggggagctgatgatccgctctatcgaccggccgttcatcgacccccagcgctacgaggaggagcagctcagttggctgtaggagggtgtcacctttgatggggggtgggcaatggggagcagtggcttgaacccacttgagaaggctgcctcctaggctctgctcagtcatcttgcaattgccacactgtgaccacgttgacgggagtagagtagcgctgttggccaggaggtgtcaggtgtgagtgtattctgccagcttttcatgctgttcttcagagctgcagttatgccagaccatcagcctgcctcccagtagaggcccttcacctggagaagtcagaaatctgacccaattccaccccctgcctctagcacctcttctgtccctgtcattccccacacacgtcctgttcacctcgagagagagagagagagagcacctttcttccgtctgttcactctgcggcctctggaatcccagctcttctctctcagaagaagccttctcttcctcctgcctgtaggtgtcccagaagtgagaaggcagccttcgaagtcctgggcattgggtgagaaagtgatgctagttggggcatgcttttgtgcacactctctggggctccagtgtgaagggtgccctggggctgagggccttgtggaggatggtcggtggtggtgatggaggtggagagcattaaactgtctgcactgca

SEQ ID NO: 8234 - DNA, 310 bp, Homo sapiens
ctttctttctttctttctttttttttttttttgagacggagtcttgctctgtttcccaggcaggagtgcagtggcccaatctcggctcactgcaagctcagcctcccaggttcacgccattctcctggctcagcctcccgggtagctgggactacaggcgcccgccaccacacccggctaatttttttgtatttttagtagagacggggtttcactgtgttagccaggatggtctcgatctcctgacctcgtgatctgcctgccttggcctcccaaaatgctgggattataggcctgagccactgcgccc

SEQ ID NO: 8235 - DNA, 291 bp, Homo sapiens
tttttttttttttgagacggagtcttgctctgtttcccaggcaggagtgcagtggcccaatctcggctcactgcaagctcagcctcccaggttcacgccattctcctggctcagcctcccgggtagctgggactacaggcgcccgccaccacacccggctaatttttttgtatttttagtagagacggggtttcactgtgttagccaggatggtctcgatctcctgacctcgtgatctgcctgccttggcctcccaaaatgctgggattataggcctgagccactgcgccc

SEQ ID NO: 8236 - DNA, 270 bp, Homo sapiens
gtagctcacgcctataatcccagcactttgggaggctgaggtgggcagatcacaaggtcaggagatcgagacaatcctggctaacacgatgaaaccccgtctctcctaaaaatacaaaaaattagccgggcgtggtggcaggtgcctgtagtcccagctactcgggaggctgaggcaggagaatggcgtgaacccgggaggcagagtttgtggtgagctgagattgcgccattgcactccagcctggacgacagagcaagactccatctc

SEQ ID NO: 8237 - DNA, 270 bp, Homo sapiens; identical to SEQ ID NO: 8236

SEQ ID NO: 8238 - DNA, 500 bp, Homo sapiens
gttgggttttagctctgctccccacgagctgctccaagctcctgcatctcttagccccctttgcttcctcagcctccagagaactttccatcagctgtccctcggccagccttgcagacgcggtgacttcacgcgtgacagcgtgcagcctttgttccaagtgccgtgttgggcactccaccagcaacaatatgcgggttacctgatttacttcttttaatacacttcagtgtaattataactgcataaaagagaggacaaattggcaagtaattacaatgttaatttggcaacgttttatcatattgtggaagcgcaatttcctctctaattgtattgggggggacacatttatctgtggttcagcttactgagggattcttgagaatggaaatgaaacacacaagagacagagaaatcagctctcctccccgtaaatattcctttatttatgtgtgttttgcagcctccttaaaaaagctaactaactcgtttattca

SEQ ID NO: 8239 - DNA, 195 bp, Homo sapiens
tgcagacaaatttttattacaacgttaactataatagcagaaaaacctgaattggaatagtgagttaaattatggcactgcagctccatggaataatgaaaattcttaagaatgtgaaagtgtttatgaaatgaactattgaatttaaaactatttagagaagatgattataatatgcatttggacaaaacccat

SEQ ID NO: 8240 - DNA, 15856 bp, Homo sapiens
cagaggctcttgagtggaattttaataacctatttacaatatcaaaacatggcaatgtatttcagaaacacaaaataagtttcaagttccttgtaaacatcccgctctgtcctttggaaggtgcttctgggaacgagcctgcgcaagtttctctcctctacttgggagacatagagatctcagaagatgccacgctggcggagctgaagtctcaggtcagacttcttcctgcaccataacttagtggtaatgtggcttcttccagtgagatattaatatattcttctatctccttttccctcaattacagtctgttctgatatggcatttgtcatatgccatgttcagtggtaagtacccgcaggcaatacacgcccatggtgcagacggctcctcgtggcctcactggtccctcctctgacaggcatgctgtgcttttgtttcaatctatcctcagtgacttgcggcttttgttcatttttatttttttagggaaacatggtttcttggaacatttgtaaagcattcactttatccctttatttacattgtttgtgtaccattgtgacccatatgttaaatgttgttatgaaaagctgtgttaccagttttccaggaggttagaactccagcttttatgttaggatgctaaactagatattctaggtattgtgttgtttcttatgcattaacgttcacagagaaggagggttttatccaaatggaagggctggattaagcacaatgcagtgttgaagcagcatccgcctactgttggactgaaatgagcattcctttcttctcttagaggagaaaatgtggggcctatatatgactagtggttgttgatgtttggcttttgtgcgccctcagtatatgaaatacccttcctcaagaaaaagcatatgttggctgggtgtggtggctcatgcctataatcccagcactttaggagtctgaggcaggcggatcacttgaggtcaggagtttgggaccaacctggccaacatggtaaaaccctgtctctgctaaaagtacaaaaaaaaaaaaaattcacctggcacggtggcaggcacctgtaatcccagctactcggaggctgaggcaggagaatcacttgaacccaggacagggaggttgcaatgagctgagattgcgccactgcacttcaggctgggtgacagagtgagactccgtctcaaaaaaaaaaaaaaaaaaaaaggagaaaagaaaaagcagacagccttattctcatgagaacaaatgggaaaatactttttttttctcatattaagttgaaagatataaaattgctgtttttaggtcaaaaaatggatgaatattggtaattttagaggctccaacctaagtatatcagtaggggcttaaagtgatcccttcagaattagaacaagcagtttgggcctactgattgcagccaaagattttgaaatacttcagaatcaaaagctgattcatcggcagagcagacactggtggaggattgcgcgggcacggaagaaggctgctgttgtgtcccttgttgtactgttagagcgggctctgccctggtgaattctactcccatggaagttaattccaaagtttcattttttaaacatgatgattaaaaagaagcttttgactcagatttagagagagggaactcacttctttctcaaggtgatttcagtgcagaggaatatgaagaccgctcagggttagtgttatttaagagagagagagattcctgtgacttttaaaatgatgttatcattacttgagatactctttccttgagatgccactgtgtagtgcttcattttttttttctaaaacagtatgttttgaagagtgctttttaaaaccgttggagaaatgtctgtttctttttctaggccatgaccttgcctcctttcctggagttcggtgtcccgtccccagcccacctcagagcctggacggtggagaggaagcgcccaggcaggcttttacgaactgaccggcagccactcaggtaggttccttgctggacgcaacactgtccctctctgctgctgacgcactggctggtgtgagggatggaggaggaatcagtcttctgagctgagtgacaacaaagcccattcctggtcatgccacgcttgtgacttgggtgacacttttcatcataaactccagcaggccttcagttttccatgttaagtataaatgtagtgttgtatattttttctgtgctccagtgactgtgacattatataacttaaaagcatttggagtgagatggaaagtaggagtggctgtttctcactcagaaatgttggattcagctgatcctcctcctgaaactttgaacttaaagagcaggtttgggtcatttcctttgcaaaaagcagccttgaggctttttgtttctttctttctcgtttctttcttttctttctttcctttctttccttttctttcttttcttaatagacagggtctggctctgtcgcccaggctggagtgcagtggcgtgatcatggctcaactacagcctcaacctcctgggctcaagtgatcctcccacctcagcctcctgtgtagctgggacctcaggcatgtgccacgacaccaggctaattttttgttttgacgaggtctccctatgttgcccagtctggtcgcgaactcctagcctcaagcaatccttccaccttggcctcccaaagtgctgggttactggcgtgagccactgtgcctggccaaggctgcttttaatcggttctgattaccaccccaaagtgactggcatgagaatcttaaccccggctgaacagagggaaatttctttggcagtttggccatcttcccagagccagacctacatgtttagtaagaaatgactcaagtatctaaataatcaccgcagcaaggattctcattttttccccttttccaaaagtttgggtgttcttataagtactcagaaaacaattctttgcttaagaaaaaagcttaaaattgggggaaaaaaaattcaagaaaattaaatgttatgtcactcaatattatcttgtttcacttattatcagggaatataaactaggacggagaattgagatctgcttagagccccttcagaaaggcgaaaacttggggtaagaaattctcctgtgcatctgaagtgacacacacgtatctcagcctcgtttgcctcttgaagctttaacaacttcatagtgtagcatgttttcactgctctagtagcctagcaacttgaaaccagagtgtgtgctagaatatgttgtatgtctggcatctaaaacttggacttattctcccataaaaacagtaagggagaattaatttttcagtaatcaccaggtgcatattgaccccatgatggccctgaagtgtcagcaagaggcccacccgcagctgttgtcagtgtgttcggacagtctgccatccaacggattcatcattgctcccgtcgctctgcccccttattctactttcttcatcctagtatcacctgacatatctgtacttactgatttatttgttagtatctgtctcccactactagaatataagtacttggtttattcattgctatatccttaatacctagaatagtaattgtgcccatgtcatagtcaataattatttattaaataaagatacacccaaaattgtctacaatcaaaccatcttgttcttttttcgctgtaggaaaatattttacaagtccttttgtaaatatcatgaactattaagatttgctctacctattatgatatgagtatccttcttgtggtctgcttgttatatgagaaagttatctttcaaccatgtctaacatgtatttaattttagtgtttttataaaaacacattcttaatacaagttgtacaaccagaaatagtttcctggaggggaattccaggatcaaatggtgtggacattttaaacctcttaaaatagttaaatatttcttcaggcaagttgttccagaatatgagtatttattttacctcacccacaaaccagcattgactatttcatcgtctaggtatttcctaaattgataaatgaaagatgattatcttgttctcatattctccagtgctttgatgactaataagttcaggcatttttgcaaactgtattttgtgagtgcatgattgagttatttcgtgtattttgactgcttctgtaatgaagtctaaaggaaaagctctcttggaatttgtgtgagctctttatgattttgaccctttgtcacaatggttgtaagctgtgtcaggttttgataggcacagtgccttttgcccttttgaagagcagctgtgtgcctcctcaggccccttccatgggcttttctgtccttgaccaacttccagggcactcctgctctcaaggaggcctctagtccctcctgtttctctccagcagcctctgtcccctccttggcaacttcagcatctgtgccgatgccctttctgtcctctggccgcactgtgctgggctccaggccttggcctcactccctggccagcagccccctcccccatggggacatggggctgtgcagcctctgctcttgcactctgcactcccctgattccatgggcccacatcttcccgtgaactctctttcttccagtcatttcatttctcattgcgtgacctcttttgatggtaaaaacacttaatagaagtacatctaaaaatcattcattgtctcagcatcctaagaaccagtcttcatttccccttgctgccttccagttcttatctatagcttttcctccatggcctgtgctgacctctgcacgtccctgttcctcctgccttgctgagtgttgttctttctgctcctcctgctaaggtttcccatctcccacagctgcagccttgtgtctcacccgccctgtgtctctcttcccaattccaaccctcaggttcttctccctggctacctcatggcagctcacatttacagcccccagagtcaagggcataactgcctacctcgagcccgctctcctcctgccagctgccgggctatcaagccaggcctctctcaccctgtccctctctgccacatcgtacctgctcaggccgccacctctttccttttctcccgcactgaggaagttccctaccacgtctgggggggctctgctgtgtaccgagaatgggatcttcacttccgctcttcattccaagattaaaggaaattgaaatgcggaataagagtttgccactagcatccagcatttagggaaaaatctctccttataaaaaccagaaaagctggaggagaagctttgcccattatgcctcaagttaccacgtggttttgtttgtttgtttggatctggcgcttgacggttttctggtacagcccccaggacgtgctgctgaggacacaggtgcgcatccctggtgagaggacctatgcccctgccctggacctggtgtggaacgcggcccagggtgggactgccggctccctgaggcagagagttgccgatttctatcgtcttcccgtggagaagattgaaattgccaaatactttcccgaaaagttcgagtggcttccgatatctagctgggtaaagttgtggggctgtctcagagaaattggggcttaccggcatagcaatgaggttatgcaatttttcacagtgatagagaagttagtgagaacttgaggttgagttttgcttatttaagatgtttgattttcccatagaaccaacaaataaccaagaggaaaaagaaaaaaaaacaagattatttgcaaggggcaccgtattacttgaaagacggagatactattggtgttaaggtaagttgtttaacagcaaatttaccactttgagaagacacgagggtcacatgattttatagagacgttttattgaatcttcaagacacagattatcccattttatacaaattgtttcagagaatggataaaaaagagggaaaactggacaactgactttacaaggccactgaaacctcagtatccaaactgccaaggacactaaaataaaatacagaccagtttcacttctgaccatacatggaaaattctaagtaaaatactagcaagttcagcccagcaagtatgtttttaaaaacactactgtgtgacatgacgtcacagtaggttatccaaggaatgtgaggagggcagcgtgaagaatagattatgtaagaaataatcctgccagactcaagagatgcagaaaaagcataaaataaaacttattattaaaaacccagtgttcatgactttaaaaaagaacttagagcaaactaggaatagaaggaaacgccttaacctgatgcacatatacccaaaacctctagcagcaacactgtgccagcttcaaaagcttccattttcattaaagtgggacccaaagtaaggattcccctaaccgccccttctgtttaacactgtactaaacaacacgggcaatgaattccctccctcactgccaaaagaaaagtaaataaaaattgaaagagcagtaaaagaaatttgaaaaggaaaatataaaaccgttcttacaaaggagattcaaggctgggcacggtggctcatgcctgtaatgccaacactttgggaggctgagatgggtggatcacttgagcccaggagttcgagaccagcctggacaacatagtgaaacctggtctctacaaaaaaatacaaaaattagccgggtgtggtagcacacacctgtagtcccagctactcaggaggctgaggtaggaggatcgctagggatgagctagggaggtggatgttgcagtgagccaagatcgtgccactgcactgcagcccaggcaacagagatcctgtctccaaaaaaaaagaaaaaaaaaaaaaggagattcaaaagactacacagataaatgattagatctgatagaggagttcgaaagggtccaagatcagtataaaaccttctggagaatatacaaaaacatacttagcagtgttaaagaaagcttctgttagagccacgtcatgttcttggaaggcaaacctcacaatagtaaaggtatcagttcttcccaagtctgtaaattcagtgaaattccaatgaaaatccatatagattagattaaataaaattaatagcataaattcgtacactagagcaaagggccaaagagctaagattttcttttgttgttgttgttgagacagtatctcgctctgttgcccaggctggagtgcagtggtacgatcttggctcactgcgagaagaaaaaggacagggtccttgcctcaccaagtgttgactgatcacagctgtggcgacagtgcagcatggaggcacgggtagacaaacaggctcatggacagggtggaaagcccagaaacagaatcacacacgtgaggaaatgtgacagatacttgaggcaacattaaaaaatgggttattcaatgaatggtgctggaaaattagttatctatgtaggaaaatcatattcattaattttcataaccctaaaattaattttatacaagttgagtatctatgattcaagatgcttgggaccagaactgtctcagatttcaggttttttcgggttttggaatatttgcattatacttaacggtcgagcctccctaatccaaaaatttgaaatctgaaatgctccattgagtttcggatttctggattaggtatgcttgacttgagtcagcgtcaggccccataaaacctgtacttacctctgctcacaccatagtcaacaggcaatccagttgaagacttaaatgtgaaaaccactcattttcaatctttagaagacataagaaaatctttgacttcaagttaaggatttcttttttttattttttgagatggggtctcactccgtcacccaggttggagtgcagcagcatgatttccactcactgtaacctctgcctcacgggctcaagcgatcctcccacgttagcctcccaagtagctgggaccacaggcacgtgccattatgcccggctaattttttgtatttttggtagagacggggttatgccgtgttgcccaggctggtcttgaacaggagagttcaggcagttcacctgcctcagcctcccaaagagctgggattacaggcgtgagccaccatgcctggcaagaaggatttcttaaacagaaagtgcaaaccatgaaagaatcagtaaatttcattacattagaagtgagaacttttgttcgtcaaaggaaatcataaaaaacagtgaaaagggaagtcacaaacaggggagcgacatacgcagtaacacagcagagggttattctccagcatagacagcagatcttctgcaaatctgttatcaaaaaataacccaatagagaagtgggccaaggttatcactggcagttcacagaggagaagagaatggccaggaaacacatgaaaagagaatcagcttgccaattgcagggagctgcagaatccagcaggaagctgcccttgctagtgagaccgtgggaactcccacacacatggccaggcgcagtcgtcacgcctgtaatcccaacgctctgggaggccaaggcaggcagatcacttgcactcgggagtttgagaccagccagggcaacatggcaaaacccagcttcttgggtggctaaggcaggaggatcacttgaccccaggaggtggaggttgtagtgagctgagatcatgccactgcactccagccagggtggcagagtcagaccgtgtgtcaaaaaaaaaaaaacaaaaaaaaaaaactccagtgggaacacaagttggtacagctactctggagagcagtttggtgttagtttagtacacagatgcccgtcgatacaaccaaggagtcccactcctagctgtattccctagaataactcgcccataggtgtgtggagacacatggatatgctcactgaagcattacaggtaatagaatgaagtggaaagaaattgacagatttttttttttttttgagacagagtctcactctgtcacccaggctggagtacagtggcgcaatcttgactcactggaacctccacctcccgagttcaagtgactcttctgcctcagtctcccattccccagcctcagcctccccacaatttttaaaacttgtgtcatgtgcaatttactggaacagaaattataatattggcttatcatatgagtgtattagaatagagattataatacttgacacgacatgttcctagcagaggcggggcactgagaagtagccagaccctcctgcagagcctggttaatctctcagtcattgaagagtttaactgtgatgtctagccagagccagctccccacctccacacctgagaatgcagccagcgacctgggcaacccccagcacgaaccccgcagaccctgcgctgtgtctttcctgacacgcacttcccttcctgggtgcgcccctgaggcgtcctccctgtggacagcatttacggaaataacatgcgtgtggaaaacaacctgcgagtcctgggaaagggaggaggcttgcccagtcacgggaatgcagggagcagcctgtgtttgtgaaaccctgcagttaaggcttgcaggagatgccaaggaagtaaagccaagttcatgcctctcagaagctggggctggctatagaaatacagaggcgagaacagactgacggtgtctataaagtaaacagctgtgcttctggcgcggcgatgagagatccgtgtgctgatgtggatgatctctgtcttcatgttgcctggtagccctttaaagtccccctgtttggccactcgcagtggaagcttctggagctgaagggaaaggtcagatggctggaaattaatttcccttgtggagctcttcttgccacccccgagtttgttttcatcgagcaagaggattttttttaatcagttattcacctagtttatgtaaatttgaatctgttcttttgtcaatataggtagttttttagacatgcctcttttaaatgtaggctaaaaagatgtcagaaaacactgctcattacttcttttgaaatgtagaatctcctgattgacgacgatgatgatttcagtacaatcagagatgacactggaaaagaaaagcagaaacaacgggccctggggagaaggaaaaggtaattgctggggtctgcacagatgtgcagctgacagagccctctctgactctctcttattcctgcttggaaactgagagggaccggaaactcttgttgattcagagtgcacacaaagcacaccagtgtggcgggtccttctccgccccctgcgttctttcctctccttgagtgcctcctcctggagctttctgtggaacaggtgaagtccacgtgaactgcagaggcacgatgaggagcccgcagatccatggccccccggtccccctccttcctcctcacccgcagcctcaccctctgcctggctcttggctttcccttcaggttcccacaccctcaggtctccagaaccaccccgtcttgctgccacctcagccctgctgcgggctccctgtccttctcccgctctctccaaggttcccgagagcctggccactccaggggacgctgctgtggcttcagggctgctaccccacttcctccaggacactgcctgacccctggccgccaggactccgctgccacaggccatcttctacctctgctcaggactccttgcctctctccctcctcccagctctggcgccgcctgccgttgtctggctctgcacttactgccactggaggaagcaggtgctgcttgcagtcaggccaagccacaggctctgtgcccagccggctgtcttcaggcctccaggccacacacccggaactggggcgtgaggctcagttcgcactgctcagctcaccaccaccacaagtcccaggacctgcccgtggcatcagctccatgcaggcctcaccagaggcccccaggcgtcctcatcctcccccactccccgactcacggactctgggtctctcctaaatctgccttttgtcctattctgactgcttctgccctggtggatttcatctttccctgcccaaatgactgtaggagcctgatctggccccgctcaccctaatccccttcttctgcccctcagtatcttggctgcccgtgtgccagggactgcatgccctctgccactgggggcgtctggggaagagaggtcccaggtggaggtggcagggcaggtgagcgtgacctcgtgaccatggcagaagtgggggttcgagcgtggttagaggctgctggagggtgtgaagggggacgcgttgacatgatcactggctgctttgtggtgagtggattctaggaggtagaagtagaatcagggagccgagcgaggagactccctgagtgaagatggaggtgggtagggactgtgtgagctccgcaagcagcacggcccctgggccagggccccttcctctctgctctccggggtctgggctgctttccggacagcactgtcccgtggcctttgctgactccctaagggccccgggagccccaggatagcaaaggacctgtgcctggcctcacccccattcgcagctctgcagccctcaggtcctggtgccctcagagacctgggatatgggagaggggctgcagcgctggctgcttcgggggttttcctgtttaaaggtcagacacacacacacacacacacacacacacacacgtaaaattctatacgtgtctaatacatagacactaaaatactgttttccaaatttttttttttttttgcgacggagtcccaccttgtcgccaggctggagtgcagtggcacgatctcaacccacttcaacctccgcctcccgggttcaagcgattctcctgcctcagtctcccaagtagctggtactacaggcgtgcaccactatgcccagctaatttttgtatttttagtagagacgaggtttcaccatgttggccaggatggtctcaatctcttgaccttgtgatcagcccgccttggcctcccaaagtactgggattacaggcgtgagccaccgcgcctggctctgtttccacatttaaatgtgatgccactgacttcatcagacttctccaagcatcctctctgtcaaagccttagttgtcaccagggctgttatttggagacatccaatagttccccaggccctgggagctccattgtcatctgtgctgtttgagatagcacattttaaaaattcatggtgctgtcactgaaaacctcatcttaagcctcacacgtgctgtttgcacaacagtagaccactggtgtcttctgaacaccgtgatgtaaccacttactatattgtttttcatttttttttggagttaatagtgtcacgtgctttcaaaagccaccaaagaggttcactgagaaatctctgcacctccctccccaggtacacagcctctcctagatgggccagcgtgaccgtcacctgcatgtcctttcagagacctgtgtataggggcagagaagctttcctttctcttttgaccagaactttcttggtaaccttgctgttttcatgtaccagtgtgtactcagctgccccgtctcatggtgggagcgtggtgtcctgatgcatgggtagaccacagcttaggtgacttatgcccacctcacacacttccaggctgtcgccaatctgtcaccatcacagtgaataaccttgtatattcaccattttgcagtacagatgtggatatatctgtaggacagatttctgcaatggaattgctaggtcagagggtatggctgtaaacattatctgcaaataagaaaaagacaaccaatccaataaaaatgtaggtaaagggtatgaacagttcatagaaaaggaactgcaaatcgcttgccagcatataaaaatatgctcagccattcactcatgataaaagaggtgtaaattcaagctactccgagacagtgccacatgcctattggcaacactaaagtgggaaagactcgtgtgttgaggacgcagagtcactggggctctcatcccctgtgtgtgggtgtggaattggcacagacactttggaactcaggacagtacctcctgctgcatctgctgggcacttcccggtacccagccttctactcctcaaaaacatggacgcgtgcctaccaggatatccccaaaattacaaggcagcttcattcaccatggccagattctggccgtattgaaggaaaggctgctcagcagtgggatggcgggtgggccgcggaggctttctgtcggggactgtgcagcgtgggtgggccacacacatcaggctgggccaaagcacccggccgcagagcacctgccgcacggtgccatgggccgggggggtcacagcgaaagccagtctcttgagtgggatgccaagtggcctgtctctccgggcaagactgaaggggcagaggcagcctctgcatcatgtcacacaggtgtgcgtgattgtgacgagtcgtgcagcggtgtgtgtgcactccggatgttattcttccgtttaaaaagtacggaaaggaaggtttctcagctgtgaggcattttcactgagcagattgagaaagccccagagcctgaaccatgccgtgctgccagtgcaaagcaggggaaggcagctggcctggcacagggctggtggcagggcaaaatggggccctctggcaggtggctgagatctgtctgtgcaattgcaaatgcacgtccttgtggcctataaaattggagtgtattttggggtcttcgtgaacccctcaccctgacacccactgcatccatgagtcaatgacagtgtctgtgtctctgcagccaagaagccctccatgagcagagcagctacatcctctccagtgcagagacgcctgcccggccccgagccccggaaacttctctctccatccacgtggggagcttcagataaccgcgccgctgcacggctctactcccgatgaactctccggctgatgccacaaacgtgggtttcctgggcatggggactggctgcctggcgcctccaatcccaaatcctctgcttcctttgagcacagggacggctcctctgaggcctggccagtgcatgtagtcacttagctctgcaacacgtggcagccacgggggctggtgcagctctggatgtcgcccacccagctgccagtaggtgctgggctctctcacacagcacccggccccagctgcctttttttttcttttaaccagaaaatgcacaacgtgtgcgtgaaccgcaggtatggaggcagcggcatgccgttgctccgctgtgggaggtgtgtggggtcaggccagccactttcctccgtgttcagatgactctcgttcgccctgaccggcttctcacagtgtctcaggccactgcgccaccgcgctggtgctgagcagaagcgggcagaagtggggtctgctttcaggacttcatttcccccactcgttccggccccgcatgctccacgtctgccctttggtctgagttaaaactgcgatgctgaaaagtgcgagctctttccacgaggaggagccacacagggtggcctccgagggtgagtcgctctgctaagcaagggcagccgctgcacgtcagcccgcaggccaagggtccagcttatcctgggtgctctgtgatcagaaggtccttggatcccgaggactgcagctgctgccgtccacagcgcctcagcctctcttcctgtgtggaagcggggcaggcagggctgtggcagacaggcctggcatagcccaggttccaggtgtcctgggcagcctgaccggtttcctgagtagcctcaatgaaaacacctgagaaaaagaaaatgtaaactaaggaagggttttcccacttaatccaacccagatttctattcaacttaaaggatttaattggcatttgtgagaaataatagtacctgtgtcactgagttgattgatttgggacatagacggttgactttcccagacagcagcttagcggaaagcagcatcccgaagacggtgtcgcatgtcctgagcctgcttgtcacctgggcctcacggtttctcgtcagccccgtcactgatgggaagcagcactgaagtgtgagggcagaaaggacaccgctggagtcaggcgctcccctgcctgtgacccttttccaacaagctgatgctgagccagcggcctgctttgtccctcatactcctcccaacagtccaaacccctaccagacagaagccacgtcgcttctgcacacgtgtctgagagcgtctgccatagacgtctgtgcgtttccgtgaagcactgcgccctaaggacccaactctgactagcagctgcctcccactcccaaacactaaccccgctcaggagactcgcactgggtgtagactgcgtctttgcagagggagatgatagaggcttctgatgacgccagagctgtaagtgtcgtgacgagctgggcgcccagcccttcttaagctgttctgtttctgtggctttaactgacatatttctgtagcatctgccttcatctcatctcagcgtaatgaaatattaatgaaatcgctgaaaagctttgccttcgagaggccagaagcctcgcggaatgtctgcaagtccaaagacgcgtgtgggttgtgccctgaagtgccgtccagcaggcgcgtgcggccgggccggcctgtgcgtgtggcctttgccttcttccctttcttcctgttttctgtttttttaatttggggattgagaaagctgtacgattttgttaaagaaaaaaataaaccattttttaaagttgtagccctta

SEQ ID NO: 8241 - DNA, 1043 bp, Homo sapiens
  SITE (35): n equals a,t,g, or c
cagaggctcttgagtccattttaataaacctattnacaatatcaaagcatggcaatgtattcagaaacacaaaataagtttcaagttccttgtaacatcccgctctgtcctttgaaggtgcttctgggaacgagcctgcgcaagtttctctcctctacttggtagacatagagatctcagagatgccacgctggcggagctgaagtctcaggtcagactcattcctgcaccataacttagtggtaatgtggcttcttccagtgagatattaatatattcttctatctccttttccctcaattacagtctgttctgatatggcatttgtcatatgccatgttcagtggtaagtacccgcaggcaatacacgcccatggtgcagacggctcctcgtggcctcactggtccctcctctgacaggcatgctgtgcttttgtttcaatctatcctcagtgacttgcggcttttgttcatttttatttttttagggaaacatggtttcttggaacatttgtaaagcattcactttatccctttatttacattgtttgtgtaccattgtgacccatatgttaaatgttgttatgaaaagctgtgttaccagttttccaggaggttagaactccagcttttatgttaggatgctaaactagatattctaggtattgtgttgtttcttatgcattaacgttcacagagaaggagggttttatccaaatggaagggctggattaagcacaatgcagtgttgaagcagcatccgcctactgttggactgaaatgagcattcctttcttctcttagaggagaaaatgtggggcctatatatgactagtggttgttgatgtttggcttttgtgcgccctcagtatatgaaatacccttcctcaagaaaaagcatacgttggctgggtgtggtggctcatgcctataatcccagcactttaggagtctgaggcaggcggatcacttgaggtcaggagtttgggaccaacctggccaacatggtaaaaccctgtctctgctaaaagtacaaaaaaaaa

SEQ ID NO: 8242 - DNA, 309 bp, Homo sapiens
gatatcatctcactgacttctgagaaggaacatagacaagtacaagcatgttgtcttactcagcactcagccgcacacatcacgatgggcagaagtcactatcagtgagttctgttgcccttgtacaaagaggagttccacttcattataaagaaatggagcgagtatatttttaataggcccaactctttagctatgtttttctttttatcaggctttacttatttagtttttctagtgccttgaagtatattacttatatttctttttaatcttttcagcctcagtaataaaattaatataaatgag

SEQ ID NO: 8243 - DNA, 801 bp, Homo sapiens
aaaaaaggagaaaagaaaaagcagacagccttattctcatgagaacaaatgggaaaatactttttttttctcatattaagttgaaagatataaaattgctgtttttaggtcaaaaaatggatgaatattggtaattttagaggctccaacctaagtatatcagtaggggcttaaagtgatcccttcagaattagaacaagcagtttgggcctactgattgcagccaaaaattttgaaatacttcagaatcaaaagctgattcatcggcagagcagacactggtggaggattgcgcgggcacggaagaaggctgttgtgtcccttgttgtactgttagagcgggctctgccctggtgaattctactcccatggaagttaattccaaagtttcactttttaaacatgatgattaaaaagaagcttttgactcagatttagagagagggaactcacttctttctcaaggtgatttcagtgcagaggaatatgaagaccgctcagggttagtgttatttaagagagagagagattcctgtgacttttaaaatgatgttatcattacttgagatactctttccttgagatgccactgtgtagtgcttcatttttttttttctaaaacagtatgttttgaagagtgctttttaaaaccgttggagaaatgtctgtttctttttctaggccatgaccttgcctcctttcctggagttcggtgtcccgtccccagcccacctcagagcctggacggtggagaggaagcgcccaggcaggcttttacgaactgaccggcagccactcagg

SEQ ID NO: 8244 - DNA, 1744 bp, Homo sapiens
tctttagtatccaatgtactcacgggattatgtttatgttcggcggtatagtgtggatcaggaaaacaacatgatggtgttggtgtcgcggtatgtatggctgcctgtggctgttgccgagttcctttagctgtggccttcattcctacgtacctgagtttgtatattcttagtgtcctatgagtctcccacaggcttccctgcagccagtgccccttccatccagctagaagatgagggactctgactgtctagaaagaatggagagatacaagcttttagttaaactgtttttttgggttctttaatgttggtaatcaaaagaagtgctgttgtttttgacccacagcctagtgagccgtaaattaccaaaggaactcacttcatttttaattaattcatttgtttgttgtagacgcagggtttcacagtgtggtccaggctggtcttggactcctggcctcaagtgatcttccttccttggcttcccagtgttgggattacaggcatgagccaccacgtctggccttcgcttcatttttagaacttagtttgtatttattcatcttagtgactcctttgttttgtgtatttaaaaatatcagagccagctttttaggccttccccttaacttagctctcctgttgttttatatatagacattactaagagtttgcttctcctttcctccttaccagtgctgtggagcatccgagtgtgccagagtctccagaattcgtcagggtcagatcatatgaatcccaaatggttatccgtccccacaagtcatttgatgaggtgagttttacctcatccaagagataacatgtcatggctgtggaattttctcaagggatgtcttacctgaactagggaggagggggtgtggcgcaggaacagttctcgctcgggggagtctgatgctactggtctgggaaccattttttgggaactcctgacgtaggtgatgtacctggaagttccccaaggacaaagtagtggcaatccattggttccctcttatctgagagatagttaaaagaatcatagccactgacgcattagcctgtatcagtagcattcttcaggaactagagcgagtacctcctgtcaacattttactacagtgggcagagcactggatggaaacttttctggatttctgcttccttgccagagtaatgggaagattggactcatgctgtctgccttctttaaaattctgtgacctttctttgaaaagaatatttatttcagcctaatgaggtgttttgtgtttattttttatctttttaagctaaatctccactgagagtatagatattgatgctagtggctgctggttttagttccacttcaccttataatggctttgtttctccctattgcttgtgttcgatttagggctatatggacagtgttctttagtgtagttttcttattctcatcaagttgttttatttataccacctcaaggacttgagttggtccttgtaaaaaaaaacaaaaaaaaaagtacactggatagagaggaaagcaggcagggcactagggttagaagacatgattcaagcaaagacaaagataggaatgagccaggtatgcactgagagactcacatgcttagagaggaaagtagaggttagggagaagtgatacattgcattgactgtgcacagagggtactcgaaaaccatgtagctgagtttggatttgccaaatgggaattagatctttgagcca

SEQ ID NO: 8245 - DNA, 735 bp, Homo sapiens
ggaaaatttgaaatagatacaaaagatacagaagtagaagagtataatgaaccccctgtatccatccccagctccagttatcaacttatggccaaaattgttttatctataccctttcccatttcctttctcactcccctgattattttgaagcaaattctagctttactgtaggagaacccagttcttctattatatatttcagtatttatctcaaataaggattttgggtttttttggaaacagggtctcccactgttacccaggctagtgtgcagtggtacaatcacaactcactgcagccttgacttcctgggctcaggtgatcctcctgcctcagcctcctgaggagctgggattataggcgtgtgccaacatgtcaggctaattttttgtattttttgtagagatggggtctcaccatgctgcgcaggctggtctcaaactcctggactcaagcaatcctcccacctcagcctcccaaaatgctgggattagaggcgtgagccactgtgcccagcccaagtaagaaatttgtaaaacagctctgggccaggcagcatggagagacccggtctctacaaaaaataaaaattagccaggcatggtgatatgtgcctgtagtcccagctgcttgggaagctgaggttgggagaatcacttgagtccaggaggtcaaggctgcattaagccgtgtttgtgccactgcatgccagcctgggcaacagtttgaga

SEQ ID NO: 8246 - DNA, 1344 bp, Homo sapiens
aagaagtacttgagaatctatttcagttgcaaaatagttaacaaaacttgatttgagtagttctgaccttgctgtgctttggactcccatttgacagccctgaaggttcgtcattctaatttactcctgcccaaatggtgattttgacagtttaatccaaagtcttttaaagcaatgtctattcataccactttacaatctttatctaatctttagtgttctgaagatttaatttgctgacatttctaatttatggtctaaattatttgagagttttttgagattgagattaagcagatctcatagcagaatgggtactacaggagaagtcatagtatttcagtttcagtgtcttttggtttctgttggcttcctttcgaatcaaggctttactaagagagattggctcttaggagctcattgcctttttaaagcccaataattatatgtgctactagaggatttacaattttagagatcatctggagggctctgttcaaagctttcatttctggttctgagaactgtttaaatatggaaacttcaaacgctgaagtgcatattagggacatggaaccactgcctaatctgtcaaattttccctataaagggttccactgttcacatactcttaacgaacaatgtcctaatgtctcctgagaataaatcagtatggctttatactcaggatgaacagcagtttggtaccatttgaggcctcctcagctatcatgtaatacccctgatctattgggtggactgagaaagaatatgggaagagagttcttgtttgaatcctagccttggaagtgaactaaagacgctgtccagtttaaaatggaattagcactggaaggaaagtcaattgacatttcctgtggttcattactctttctgctatgtttttaactctatcagatactgtctaatatcataaataggcctttctgttttgtcagggtctctgagaattcccagataattcattggtcaatagagtttgaaatgctatttaaactttgggtcaccaagcacagtggctcatgcctgtgtaatcccagcactttgggaggtcaaggtgggaggatcgcttggggtccaggagtttgagactagcctgggcaacatagtaagactagtatgtctagtctattccagtatgtagactagtgtctacaaaaataacagagttagccaagcatggtggcacatgcgtgtagtttcagctactcacgaggctgagatgggaggatcacttgagcccaggaggtcaaggctgcagtgagctgtgattatgcctccacactccagcctgggtgacagagcaagaccctgtatcaaaaa

SEQ ID NO: 8247 - DNA, 1344 bp, Homo sapiens
aagaagtacttgagaatctatttcagttgcaaaatagttaacaaaatttgatttgagtagttctgaccttgctgtgctttggactcccatttgacagccctgaaggttcgtcattctaatttactcctgcccaaatggtgattttgacagtttaatccaaagtcttttaaagcaatgtctattcataccactttacaatctttatctaatctttagtgttctgaagatttaatttgctgacatttctaatttatggtctaaattatttgagagttttttgagattgagattaagcagatctcatagcagaatgggtactacaggagaagtcatagtatttcagtttcagtgtcttttggtttctgttggcttcctttcgaatcaaggctttactaagagagattggctcttaggagctcattgcctttttaaagcccaataattatatgtgctactagaggatttacaattttagagatcatctggagggctctgttcaaagctttcatttctggttctgagaactgtttaaatatggaaacttcaaacgctgaagtgcatattagggacatggaaccactgcctaatctgtcaaattttccctataaagggttccactgttcacatactcttaacgaacaatgtcctaatgtctcctgagaataaatcagtatggctttatactcaggatgaacagcagtttggtaccatttgaggcctcctcagctatcatgtaatacccctgatctattgggtggactgagaaagaatatgggaagagagttcttgtttgaatcctagccttggaagtgaactaaagacgctgtccagtttaaaatggaattagcactggaaggaaagtcaattgacatttcctgtggttcattactctttctgctatgtttttaactctatcagatactgtctaatatcataaatagacctttctgttttgtcagggtctctgagaattcccagataattcattggtcaatagagtttgaaatgctatttaaactttgggtcaccaagcacagtggctcatgcctgtgtaatcccagcactttgggaggtcaaggtgggaggatcgcttggggtccaggagtttgagactagcctgggcaacatagtaagactagtatgtctagtctattccagtatgtagactagtgtctacaaaaataacagagttagccaagcatggtggcacatgcgtgtagtttcagctactcacgaggctgagatgggaggatcacttgagcccaggaggtcaaggctgcagtgagctgtgattatgcctccacactccagcctgggtgacagagcaagaccctgtatcaaaaa

SEQ ID NO: 8248 - DNA, 443 bp, Homo sapiens
gtcactccgagccattcccctaggatctgttgactaggttgtgtggtacttaaaacacatctgaatcatcattcctcagagaactggagatggttgacgtcactgcctggtcctagcttggaccagcctgcatataatcattccaaaagctaaaaggagaagagaaataaaagaaaaaaataattcttcagaaatgtggaaaggtcacaagtgacgttatggaagagcagatgatataatctcaaaggcgagccctgtactatttcacttggttttccttgtggcagtgcctcctttggttacctgtggtgagaggtggggtaagaggcctcatttgccagagttcagactgagttcatgttatacctttttatagtacttttgagtatactggtacaaggttagaatattaatttagcctgttcatctccagctgtcccacc

SEQ ID NO: 8249 - DNA, 443 bp, Homo sapiens
gtcactccgagccattcccctaggatctgttgactaggttgtgtggtacttaaaacacatctgaatcatcattcctcagagaactggagatggttgacgtcactgcctggtcctagcttggaccagcctgcatataatcattccaaaagctaaaaggagaagagaaataaaagaaaaaaataattcttcagaaatgtggaaaggtcacaagtgacgttatggaagagcagatgatataatctcaaaggcgagccctgtactatttcacttggttttccttgtggcagtgcctcctttggttacctgtggtgagaggtcgggtaagaggcctcatttgccagagttcagactgagttcatgttatacctttttatagtacttttgagtatactggtacaaggttagaatattaatttagcctgttcatctccagctgtcccacc

SEQ ID NO: 8250 - DNA, 4071 bp, Homo sapiens
ccggaacaaagatgagtcgacttcgccgaatgatagagaaaaacttccatactgagcgaacaccgaggggagtccggaggccctgttgtcctcttccgtggctggctgtgtccgtcgcagcctgaaaggtcagcggtacccagcgctgtgacagggtcacaggcgcgcgatgtctcacagctcggagcagtactcacctggcattaggccgcgtgccgcaggccagctctcaccgctgggctcttgaagcaggaggcgcgagccgcgccaaagtctgcaacggcctcaagtctcgacgccagcctaggcaaaaggcaatgtatctaaacgaaaagaaaataggctttctccgctctaccgcctcgggcagccacacctccacacttccggcggtgtaccggccaaatgccgcctgccagcaacttccgtcctcctagctaaaagcggaaaacagaggctcggaaccgctgcgtggttcttgctcttcactcggccgttttaaagggtgactctttcctgtcccggcctgcgtggtgtgggcttgtgggtctttgagacccgaaaattgagagcgttttcgcactccagcggctgctcctggcgctctgcggccgtcaccatggtaaggaggatgcctcggacgctcgcgacacacagcgtctgagttagtgggacctgaggactctggggcgctggggtagggggtgagcggtggtaggcggaaatgagaactgccaagagaaaaggatggtagaccgtggggtgggctctgaggagtggaaacaacttcacattcgagacacagacggtatttgccagaacacaagctttggagcaagattttactctgtcctgttttcttttttctttttgatccaccgctaagagtcctaaaaattcctgatttcaccacaagcgtggttatcagccccagagcctaatgggaatatggttgtcccttgtacagtcttagatgtcagtcccgcccccttcattttactgctgaggaaactgaaggcgtccttgccaaagaccagacagctaatgaattgcgaagccgggcttaacggcccagatctaactgccaggtcctttctctttgtgttacgtctctataatctgcgtttctttgcaaaatggcattccatacacccttcatgtgattgctgcaaagtttatgtgatagcagttggtagcagcacaccttgttggttgttacttaacattgctctctgtgctggacttggctttgtatcatttttatttttgcagccttaaaatacgaatagactcacgcctggccgcgtgtttaaaacgtgtctaaaatgcaaaaagcatcccatacattgctggtgaaaagaaaaataatgcacttttggaaaacggtctggcagtaaacacacgtccacatgaagacttgcatgcagttgtttattgcagatttattcgtaatcacccaaaactgggaacaaccctgatacctatcatctggtcagcgggtaaacagtggtgtatccatacaatagcatactactcaacaataaaaaggattgaagttcctatacctgcagcaaattgggtaaatcccaaaagcaagaaaccagattcaaaaggctatgtactactgttgatccctgtttcattctgggaaaggcaaaactgtagggataggtatcaaactgagggttgggaaagaggattgacttaaaagttacatagggaattttatgggggaaatggaaattctttgtattttgattgtggtggttacagaactgtgtagttaggaaaaacttagaactgtatacctaaaaaggacaggttttactgtgtgtaaattatgcttcaataaaactgacttaaattttttaaatgtgaaatgaaggtgttattaaaaaagcaaattatgtcaaggaaaaaagatactgtaatcagttcatcccttttgtggtccagtagattttggaccattccctaatgagattattagagatgtaagccctgatgcctcatatcattcaagaccaaaatttaacttacatcatgtgaataaacttaatggtgcaagaatcatttaagtaagtgaacatttggatgaaacagggtctttgtgctgtgtaaaagaaagcattttagaataattgtcagtactttaaaaaattaaaataatatttcttccatcattatagccacagaatgaatatattgaattacaccgtaaacgctatggataccgtttggattaccatgagaaaaagagaaagaaggaaagtcgagaggctcatgaacgttcaaagaaggcaaagaaaatgattggtctgaaggctaagctttaccataaacagcgtcatgctgagaaaatacaaatgaaaaagacgtaagtggtctcatttatttgtcataacaagttaacatcttttgagtaatcattattaaaacagataatcttgaatcttttttccttcttggtagtatcaagatgcatgaaaagagaaacaccaaacaaaagaatgatgaaaagacaccacagggacagtacctgcctatctgctggacagagagggacaatctcgagctaaagtactttccaatatgattaaacagaaaagaaaagagaaggcggtaagcaataacaattgaagtctttgttttgtttaggagaattacttaaattcaaatttgaggttcttgtttctcggtttaatttcaaacatgaagtacagctattattcccattatttagatgttgaagtctttgtaaatttaataaaaaacttgctttctcatcataaggttttaaaatttaagttataaaaaaaatttattagaatgccatatgaaattaaaaagctggtaaggagtgaatttcaaattcaatatttgtcttcctgtttgaaaacccacagtgctatgcagtcataaagaaaaatacaaatgcttcttatttgtgctgccctgtagtgccaaacttggttaaaaagtagaatggtggaaaactccctgagttgtcacaaaaaatgtggctttttaaaacacctgtaaatagattagcagaaatccagataaaagaatatgcagtatttatatttaaagaattatttttactgccttacactatttcagttttttcatagaatttgcactcaagggaggcataaaacatctggtgaggattttgtcttgctagtgatctacagatccatctcgggaagaaatacagagacatattaagaggtggaaacactcttccagtattatgctattaaacattagtaaacacatatactgcttatagaagtcactatcggctgggcaccgtgactcacgcctgtaatcccagcactttgggaagccaaggcaggtggatcacctgaggtcaggagttcaagaccagcctgaccaatgtggtgaaaccccacctctactaaaaatacaaaaattagctgggtgtggtggtgtgtgtctgtagtcccagctactcgggaggctaagacaggagaattgcttgtacccaggaggcggaggctgcacagtgagccaagattgtaccactgcactccagcctgagcaacagagcgagactccatctaaaaaaaaaaaaaaaaaaaaccaccacattacaggtggtattttctcacccataacacagcattaagatttttagcttaagccaaccatttatttaacatacccatgatatataaacttgttctgtttaatttgcagcttatgagacaatacagacctctagaagacggttgagccaaaaatgtgttgatggtcaagcaaaaaaaatagatctattactttgtacaactgaaacatatttgacttattctcattgtcctttaataacaatataaacttttaactgtggcatatttttagggaaaatgggaagtccctctgcctaaagtacgtgcccagggagaaacagaagtattaaaagttattcgaacaggaaagagaaagaagaaggcatggaagagaatggttactaaagtgtgctttgttggagatggctttacaagaaaaccacctaaatatgaaagattcatcaggccaatggta

SEQ ID NO: 8251 - DNA, 11968 bp, Homo sapiens
taacctcccagtgatcttgtatatccggaatagtacaatattctttctgtggtggtagttttgcctgcatcaatatgagccataattccaatattacggattctgtttaaaaggaaaaaataaggtaaactttactaaaattgtaaaaccaaagtatatatgctatccaaatttcaaagctggtatttctataatttataaaactgtgtaaaaactagaaaaatggaaaacatttagagtatatccacattactctgataagatagctaagtaacaaaagggctaactacaacctacaattttgagactatcttatattcattctagaaaagtgtgctgttgttacattaaaaatttttagcattaattgagaaaaaatagctaagatacattatcaacatctacttaaaattggctagggcagaaagtcatagaaattacagcattcactcttgtccatcagaaaaaacctgtaaattttcgtgacagtctatggaaaagcatgatataatgatagtacttacttagctatgggaggattgatgatggaatgaagggatttgatatcatttcctattaagcctaatgaaaagaaagttaaaattgaactgttacatttatgaaattttcctttaatttataaatgaaagactttaaaataactttaagcaaatactgtaagtccaaataaagtaaaattcaagctaaataaatctaaaataaactaaaatttatttccttgcaatgtataaggaaagctatggatgacaataaaacaaggtaaaagttttaaacatcaagttctagatcatatcctcagaaaaatacagattcaccccaatctctgccacctacttcacttccatttacaaaattgtagaactagaataaatgctcataataataatcttaaggcaatgatcctgaatcaaagaaaaaattttaaatgcacagtcctataaacctgccttttccagggtttgaagagctaagagtgatcctcatgtcagctgataatgaattattatacaatttggaacttgccttcctcagcaatcccaggacacaatacctttaaagactgcctgggaggtttcactgaatagaagctataacaatttaatacttttgaaaggccaagcagtatttcttaaataaaaaagtccatatggcttattctatgcttaatatatagtttactaatattaagaagtaatttctaaagaaacaaggcagttacatttgtaaatttaattaaagccttcctgttatttaaaccatttctcccatgtttctataatacaaaaaggagaattttatattatttttgaaacttcatggtggtttgaagatcaaaagataatctatactactacagttaaattcatattagccaaattcagagacctagatacacaccaataacgtagcccattaaattaatctgcccttgtaagtcaacagccaatcagtatttttattctattattctcacatgacaaacacagtaatgagaacagcaacagaattaaactagtttcatagagtctaccatacacttgcttgtttcaaacacagaaaggacattcaaaagtaagtcaactcctccaccttccagcttctgatgccatgtatctaacctaaacaatcccaaatacttagccaaactacttataacaatcctcaaaataaattattctagtaaatctctcttgacagaaaacacttgcataaaaaacagaaataaactagaaaaagaaattcacaagagcactctacaattacactcacatgttaaacttgcaaactagctactaaagccaccaacctttcctttgctcagttcatcagcgtgttcctcagataaggagcacaactctactagtatttccttctggcacctatctgaacactcccgcccctaataatctcaaggaaatagccaagaagtaaaaaatggttacagagccctaataagggagattcttgcaaacaagagagagaaaagagataaagcaaacagcttagataaaattagaagactctaacatttgtacctggtagagaactgcaatttcttccaagcggcacatgtggctttaatctttttaaacttgctcttattttatagcagcatatattctagtaaagagaaaaagaaacttggcattaattttattttagcatcacttattacagtgttaatattgtaattacgctttgtcagaagataaaatattttgtatagctttaaagtagtcctaatttattaactccaattcttttaaaaagtgacaatccaaatatatcctaggggaaagaataaggataaaattaatactgatttgctattttgagctgaccttaaaacaatggttttcctcaacctgcagcattagcatgggctgagggcttgtttgaaaaacatgcttaggctccaatccagacaagagaatcagaaactcttggggatggagccaaacaatctgtttaaactagctctccagttgattctaatagctacagattgagaaccacaaccctaaagttctgaaagtcagaagctgagtcagaaaggttaaataaggtatctcacccaggatacaccttggttttcctctacatctgctgaaaggtctgtagggggcaatgaactctaaaaccattagttgttttcaggatttattacagttacacattagaatcatctggaaagcttcttgaagacacgggggtggggagagaaaatgagaactggaggaactgggcagtggcatttaaaaaaaattcccagggtgtctccaatgtagcattcaactgagaatcactgagttagagcaggtctgcttaaggccaagcctacctcctctaccttagctgcttacctaaccttctcatgttctcatgtaaaggctgaatattctccacctcagtttatgcccagaccactagatatacatttaatagctgccaatgtagttggaattgttagtgtatgtaatgatttagggccaccacaatctgctttttgtttcatgaactgcgtatctgtgcgatctatattatttctacattagttaccaagtttctggcaataataagctactatcctcagaaaataattccactgcataatgactaggataagacccagtgtctatcacagcgtgcatagtctgaaagcgtcagcaataaaagcactgaagaaaaactgggtaactccttgggccacttaatgagatcacaaatggaatacagaaatatatcttcttcaaaatgctgctcaggtgatttttaaagtagcaaaaaaaaattgtagatgaatggtaaggcttcttagcaacaacaacaaaaaaactgtagacgaatggtaaggcttcttaagggttacaggttctcccatacagcagtcacaccctatccacaggggttatattccaagacccccagtggattcctgaaacctcagatagtacagaacctaattactatcaatcagaacatggttctgttcatgtcttctgcccacaaactgaataccttttccatcttaactgagctcttatcatgttatgtgaccataatttttgtagtttgaagtgcaacagtaaaactagcaaaaatgtctttttctttcttcacaatttcatggatagaagattcattcctaccatagatcttagcaacctcagcatatgatttgtttttttccttattaagccaagaatgttcaccttttcacttaaagggagcactttatggcttctctttggcacatccaaattgccagcatcactactcttgcgctctgggaccgtgattaagtaaaataaaggttacttgaacacaagcactgcagtatcacaacagtgaatctgataacccagatggctactgactcatgggtggggagtgtatacaatgtggatatgctgggcaaaggaatgactcacctcccaggtgggattaagtgggatggcatgagatttcatcacagtactcagaatggcacacaatttaaaacttatgaattatttctggaatttcccatttaattttcagaccacagttgactctgagcaactgaaacagctaaacagcaaaaccatgaataaggggaaactattgtactccctgttaagtcactgaagataaaaagaaacaacccaaacaagctttaaagtaatctctcacttagctatagataaaaagggtattattatgtttgagatttaatatctttaagtatactgaagatgtgatagtttagaaaataatttatagtgttttgaagaggattcaggagtcagaccagagctaaagactaaaacaatgttcctgagacaaatatcagactgccgaagaagctggcttccaacagctctgcagaagacagccaaaagtagttgtatcaaccattgtataattatgttgtactttgatattaacagaaactttatttcataagagtctcaatccatggatacttaatattacaaagcacattatttgttagtagtttaaagatgtgcattaagtgatgacattcttagatataaaaccctacccctccttcaaaaacaactggcattttagtactccatgagaccagtatttagctacagctgttcttttacttttaaattaaggtaatttcctcttatatttcttaataaattaaggtaattactttcaaattagtttagcttgaagatttccaaaggttatgactcaactaaatttggaatcaacagctgatgagatatactgggcattttaggcagtaaaggagctgaggttgttaaaggacacttaattttataagaaatgcttacattaatatacacactgggtattgtctgatgactcattgcaaatatcctcaagttggtcaacatcttgatcctccaaactgttactgtctgaaaaaataaatatacaaaatcaaaaaactaaacttatgtattacatgtcagcaaggcatatgtaagttagacatatgtaatatgtatggtaaaatgtattacttttaaaaagttggaacaatatttttagctaccaaaaattcaatgcatcattcagaaaatggaaaattctgattaaatatgagaaatatggtttttaggtttaaaatgtcccttatttgtcaatgtaatgtttaaagaaagatatggcgatacagtagaaatcaacttattgaaattacaaaacattgtatcaaccaaaatgcattgttatgtaaatgtatagaattaagcataaaaagctaagcatccacatattaacttggtaatttctaattggcagtaaaatttattgattcatttgtatactctgattttcctaccataccatgtaaaaactaaatcatgtaaaaaatatataaaagcaagtcctcttcctctctgattatagaaactaagcatctttagtttaaaaacatttgctaaatattcactatgtttcaagtacaatatcaaagctattagaaatataaggacgcagctgagactggggatgctggggagacagacagaccatgttaaaccaagcttgtccaacccgtggcctgcagccacatgcggcccacgatatctttatatgcagcccaacataaattcgtaaactttcttaaaatattatgaggttttttttatttttttttagctcatcagctattgttagttatcattagtgattttatgtgtggccaaagacaattcttccagtgtggcccagggaaaccaaaagattagacacccctgtgttaaaccattgtgatccatgttattaagatatgtgaaacctcattactactcctaagtctgttctttctggatcttagctaagaaacattcactactcttatttagaaagtcatctaatacttacatttgatttcctaaatatatttgaatctgttccctttgttgtttttttttttttttttttttttttgagacagggtcttgccccgtcaccaagcctggagtgcagtggcttgatctcagctccctgcaacctctgcctcctgggttcaagcgattctcctgcctcagcctcccgagtagctggaactacaggcatgtgccaccacacttggctactttttgtatttttagtagagacggggtttcgccatgttagccagactggtcgtgaactcctgacctcaagtgatctacccacctcggcctcccaaagtgctgggattacaggcgtgagccaccatgcctggccttgaatccattcccttttcattggtaacgccaaagttcagggcctcatagtctctccacagttgtgactgtaatagacattttcctcttctttaactcagtggttgtcaataaaaagataatttgcacaacccagccctcccccgcccaagcctattcgttcccatttattcaacaagaatttactgtgtgtctgcctacccactgctttctagatatcagcgttaatgcagtgaacaaaagacaacaatctctgccctcatactgcctctaccgtagtcaggggatacagacaacaaacaaaagtaacgaatacaatacatagtctctcccatgatgatagggtgctgtagagaagaatgaagcaggaaggaggaattgggacagttagaactgtaagtaaagagatcaaggaaggcctcattcaaacagtgacatttaagcaaagacctgaagtagatgagggaggaaattcgggggattgagggacggcggggaggggcgcattaaaggcaaagagattatataacgtactgtacctaaaatatacaaatgctagttactatttctggttttaaagagaatgatgagatcaccttagaaaatggagccttaaaaaactgcttcaaaggcggggctcggtggctcacgcctgtaattccagcactttgggaggccgaggcaggtggatcacctgaagtcaggagttcgaaaccagcccgaccaacatggtgaaaccccatctctactaaaaatacaaaaatattagctgggtgtggtggcgagcgcctataattccagctacttgggaggctgaacctggagaatcgcttgaacccgggaggcagaggttgcagtgagacgagatggcgcatttgcactccagcctgtgcgacaagattgaaactccgtctcaaaacaaaacaaaaactgcctcaaagccgggcgctgtggctcaagcctgtaatcccaacactttgggaggccgaggcgggtggatcgctcgtacccgggagttcgagaccagcctgggcaacacggtgaaacctcatctctacaaaaactacaaaaatcagccaggcttcgtggcgcgagcctgtagctcgctacttttgaggctgaggtcggaggatcgcttgatcccgggaggtcgaggctgcggtgagccgagctcgtgcccctgcactccagcctgggcgactgggcgagatgccgtctcaaaatacccataaaaacaaaaacaaaaacaaaatactgcctcaaatacaagcactaagaattaatgaaagtattcttttggtacagttctttttgttcatcaactgaatcacgctgcaagctgtgaagtaattaagggaacttctgcaactgtgcagtaaaagggtaaacctgatagtgtatttaagtagacgtactttctggtagttaattacttcttgacactagtgggccactaaatacaagtccactcagcatgtgattcggtgcaccaaaatgcctcagaaatttctggaatcagtcctgtacctccaaaaaaccagaatgttatcttcttcttttctaacagctgcaaagccccagtagttccatttttctgtacactaagttttcattcctcagtatccttcacaatcatgcacacattacacagagtgaccggaacaaagatgagtcgacttcgccgaatgatagagaaaaacttccatactgagcgaacaccgaggggagtccggaggccctgttgtcctcttccgtggctggctgtgtccgtcgcagcctgaaaggtcagcggtacccagcgctgtgacagggtcacaggcgcgcgatgtctcacagctcggagcagtactcacctggcattaggccgcgtgccgcaggccagctctcaccgctgggctcttgaagcaggaggcgcgagccgcgccaaagtctgcaacggcctcaagtctcgacgccagcctaggcaaaaggcaatgtatctaaacgaaaagaaaataggctttctccgctctaccgcctcgggcagccacacctccacacttccggcggtgtaccggccaaatgccgcctgccagcaacttccgtcctcctagctaaaagcggaaaacagaggctcggaaccgctgcgtggttcttgctcttcactcggccgttttaaagggtgactctttcctgtcccggcctgcgtggtgtgggcttgtgggtctttgagacccgaaaattgagagcgttttcgcactccagcggctgctcctggcggctctgcggccgtcaccatggtaaggaggatgcctcggacgctcgcgacacacagcgtctgagttagtgggacctgaggactctggggcgctggggtagggggtgagcggtggtaggcggaaatgagaactgccaagagaaaaggatggtagacccgtggggtgggctctgaggagtggaaacaacttcacattcgagacacagacggtatttgccagaacacaagctttggagcaagattttactctgtcctgttttcttttttctttttgatccaccgctaagagtcctaaaaattcctgatttcaccacaagcgtggttatcagccccagagcctaatgggaatatggttgtcccttgtacagtcttagatgtcagtcccgcccccttcattttactgctgaggaaactgaaggcgtccttgccaaagaccagacagctaatgaattgcgaagccgggcttaacggcccagatctaactgccaggtcctttctctttgtgttacgtctctataatctgcgtttctttgcaaaatggcattccatacacccttcatgtgattgctgcaaagtttatgtgatagcagttggtagcagcacaccttgttggttgttacttaacattgctctctgtgctggacttggctttgtatcatttttatttttgcagccttaaaatacgaatagactcacgcctggccgcgtgtttaaaacgtgtctaaaatgcaaaaagcatcccatacattgctggtgaaaagaaaaataatgcacttttggaaaacggtctggcagtaaacacacgtccacatgaagacttgcatgcagttgtttattgcagatttattcgtaatcacccaaaactgggaacaaccctgatacctatcatctggtcagcgggtaaacagtggtgtatccatacaatagcatactactcaacaataaaaaggattgaagttcctatacctgcagcaaattgggtaaatcccaaaagcaagaaaccagattcaaaaggctatgtactactgttgatccctgtttcattctgggaaaggcaaaactgtagggataggtatcaaactgagggttgggaaagaggattgacttaaaagttacatagggaattttagggggaaatggaaattctttgtattttgattgtggtggttacagaactgtgtagttaggaaaaacttagaactgtatacctaaaaaggacaggttttactgtgtgtaaattatgcttcaataaaactgacttaaattttttaaatgtgaaatgaaggtgttattaaaaaagcaaattatgtcaaggaaaaaagatactgtaatcagttcatcccttttgtggtccagtagattttggaccattccctaatgagattattagagatgtaagccctgatgcctcatatcattcaagaccaaaatttaacttacatcatgtgaataaacttaatggtgcaagaatcatttaagtaagtgaacatttggatgaaacagggtctttgtgctgtgtaaaagaaagcattttagaataattgtcagtactttaaaaaattaaaataatatttcttccatcattatagccacagaatgaatatattgaattacaccgtaaacgctatggataccgtttggattaccatgagaaaaagagaaagaaggaaagtcgagaggctcatgaacgttcaaagaaggcaaagaaaatgattggtctgaaggctaagctttaccataaacagcgtcatgctgagaaaatacaaatgaaaaagacgtaagtggtctcatttatttgtcataacaagttaacatcttttgagtaatcattattaaaacagataatcttgaatcttttttccttcttggtagtatcaagatgcatgaaaagagaaacaccaaacaaaagaatgatgaaaagacaccacagggagcagtacctgcctatctgctggacagagagggacaatctcgagctaaagtactttccaatatgattaaacagaaaagaaaagagaaggcggtaagcaataacaattgaagtctttgttttgtttaggagaattacttaaattcaaatttgaggttcttgtttctcggtttaatttcaaacatgaagtacagctattattcccattatttagatgttgaagtctttgtaaatttaataaaaaacttgctttctcatcataaggttttaaaatttaagttataaaaaaaatttattagaatgccatatgaaattaaaaagctggtaaggagtgaatttcaaattcaatatttgtcttcctgtttgaaaacccacagtgctatgcagtcataaagaaaaatacaaatgcttcttatttgtgctgccctgtagtgccaaacttggttaaaaagtagaatggtggaaaactccctgagttgtcacaaaaaatgtggctttttaaaacacctgtaaatagattagcagaaatccagataaaagaatatgcagtatttatatttaaagaattatttttactgccttacactatttcagttttttcatagaatttgcactcaagggaggcataaaacatctggtgaggattttgtcttgctagtgatctacagatccatctcgggaagaaatacagagacatattaagaggtggaaacactcttccagtattatgctattaaacattagtaaacacatatactgcttatagaagtcactatcggctgggcaccgtgactcacgcctgtaatcccagcactttgggaagccaaggcaggtggatcacctgaggtcaggagttcaagaccagcctgaccaatgtggtgaaaccccacctctactaaaaatacaaaaattagctgggtgtggtggtgtgtgtctgtagtcccagctactcgggaggctaagacaggagaattgcttgtacccaggaggcggaggctgcacagtgagccaagattgtaccactgcactccagcctgagcaacagagcgagactccatctaaaaaaaaaaaaaaaaaaaaccaccacattacaggtggtattttctcacccataacacagcattaagatttttagcttaagccaaccatttatttaacatacccatgatatataaacttgttctgtttaatttgcagcttatgagacaatacagacctctagaagacggttgagccaaaaatgtgttgatggtcaagcaaaaaaaatagatctattactttgtacaactgaaacatatttgacttattctcattgtcctttaataacaatataaacttttaactgtggcatatttttagggaaaatgggaagtccctctgcctaaagtacgtgcccagggagaaacagaagtattaaaagttattcgaacaggaaagagaaagaagaaggcatggaagagaatggttactaaagtgtgctttgttggagatggctttacaagaaaaccacctaaatatgaaagattcatcaggccaatggta

SEQ ID NO: 8252 - DNA, 20530 bp, Homo sapiens
taacctcccagtgatcttgtatatccggaatagtacaatattctttctgtggtggtagttttgcctgcatcaatatgagccataattccaatattacggattctgtttaaaaggaaaaaataaggtaaactttactaaaattgtaaaaccaaagtatatatgctatccaaatttcaaagctggtatttctataatttataaaactgtgtaaaaactagaaaaatggaaaacatttagagtatatccacattactctgataagatagctaagtaacaaaagggctaactacaacctacaattttgagactatcttatattcattctagaaaagtgtgctgttgttacattaaaaatttttagcattaattgagaaaaaatagctaagatacattatcaacatctacttaaaattggctagggcagaaagtcatagaaattacagcattcactcttgtccatcagaaaaaacctgtaaattttcgtgacagtctatggaaaagcatgatataatgatagtacttacttagctatgggaggattgatgatggaatgaagggatttgatatcatttcctattaagcctaatgaaaagaaagttaaaattgaactgttacatttatgaaattttcctttaatttataaatgaaagactttaaaataactttaagcaaatactgtaagtccaaataaagtaaaattcaagctaaataaatctaaaataaactaaaatttatttccttgcaatgtataaggaaagctatggatgacaataaaacaaggtaaaagttttaaacatcaagttctagatcatatcctcagaaaaatacagattcaccccaatctctgccacctacttcacttccatttacaaaattgtagaactagaataaatgctcataataataatcttaaggcaatgatcctgaatcaaagaaaaaattttaaatgcacagtcctataaacctgccttttccagggtttgaagagctaagagtgatcctcatgtcagctgataatgaattattatacaatttggaacttgccttcctcagcaatcccaggacacaatacctttaaagactgcctgggaggtttcactgaatagaagctataacaatttaatacttttgaaaggccaagcagtatttcttaaataaaaaagtccatatggcttattctatgcttaatatatagtttactaatattaagaagtaatttctaaagaaacaaggcagttacatttgtaaatttaattaaagccttcctgttatttaaaccatttctcccatgtttctataatacaaaaaggagaattttatattatttttgaaacttcatggtggtttgaagatcaaaagataatctatactactacagttaaattcatattagccaaattcagagacctagatacacaccaataacgtagcccattaaattaatctgcccttgtaagtcaacagccaatcagtatttttattctattattctcacatgacaaacacagtaatgagaacagcaacagaattaaactagtttcatagagtctaccatacacttgcttgtttcaaacacagaaaggacattcaaaagtaagtcaactcctccaccttccagcttctgatgccatgtatctaacctaaacaatcccaaatacttagccaaactacttataacaatcctcaaaataaattattctagtaaatctctcttgacagaaaacacttgcataaaaaacagaaataaactagaaaaagaaattcacaagagcactctacaattacactcacatgttaaacttgcaaactagctactaaagccaccaacctttcctttgctcagttcatcagcgtgttcctcagataaggagcacaactctactagtatttccttctggcacctatctgaacactcccgcccctaataatctcaaggaaatagccaagaagtaaaaaatggttacagagccctaataagggagattcttgcaaacaagagagagaaaagagataaagcaaacagcttagataaaattagaagactctaacatttgtacctggtagagaactgcaatttcttccaagcggcacatgtggctttaatctttttaaacttgctcttattttatagcagcatatattctagtaaagagaaaaagaaacttggcattaattttattttagcatcacttattacagtgttaatattgtaattacgctttgtcagaagataaaatattttgtatagctttaaagtagtcctaatttattaactccaattcttttaaaaagtgacaatccaaatatatcctaggggaaagaataaggataaaattaatactgatttgctattttgagctgaccttaaaacaatggttttcctcaacctgcagcattagcatgggctgagggcttgtttgaaaaacatgcttaggctccaatccagacaagagaatcagaaactcttggggatggagccaaacaatctgtttaaactagctctccagttgattctaatagctacagattgagaaccacaaccctaaagttctgaaagtcagaagctgagtcagaaaggttaaataaggtatctcacccaggatacaccttggttttcctctacatctgctgaaaggtctgtagggggcaatgaactctaaaaccattagttgttttcaggatttattacagttacacattagaatcatctggaaagcttcttgaagacacgggggtggggagagaaaatgagaactggaggaactgggcagtggcatttaaaaaaaattcccagggtgtctccaatgtagcattcaactgagaatcactgagttagagcaggtctgcttaaggccaagcctacctcctctaccttagctgcttacctaaccttctcatgttctcatgtaaaggctgaatattctccacctcagtttatgcccagaccactagatatacatttaatagctgccaatgtagttggaattgttagtgtatgtaatgatttagggccaccacaatctgctttttgtttcatgaactgcgtatctgtgcgatctatattatttctacattagttaccaagtttctggcaataataagctactatcctcagaaaataattccactgcataatgactaggataagacccagtgtctatcacagcgtgcatagtctgaaagcgtcagcaataaaagcactgaagaaaaactgggtaactccttgggccacttaatgagatcacaaatggaatacagaaatatatcttcttcaaaatgctgctcaggtgatttttaaagtagcaaaaaaaaattgtagatgaatggtaaggcttcttagcaacaacaacaaaaaaactgtagacgaatggtaaggcttcttaagggttacaggttctcccatacagcagtcacaccctatccacaggggttatattccaagacccccagtggattcctgaaacctcagatagtacagaacctaattactatcaatcagaacatggttctgttcatgtcttctgcccacaaactgaataccttttccatcttaactgagctcttatcatgttatgtgaccataatttttgtagtttgaagtgcaacagtaaaactagcaaaaatgtctttttctttcttcacaatttcatggatagaagattcattcctaccatagatcttagcaacctcagcatatgatttgtttttttccttattaagccaagaatgttcaccttttcacttaaagggagcactttatggcttctctttggcacatccaaattgccagcatcactactcttgcgctctgggaccgtgattaagtaaaataaaggttacttgaacacaagcactgcagtatcacaacagtgaatctgataacccagatggctactgactcatgggtggggagtgtatacaatgtggatatgctgggcaaaggaatgactcacctcccaggtgggattaagtgggatggcatgagatttcatcacagtactcagaatggcacacaatttaaaacttatgaattatttctggaatttcccatttaattttcagaccacagttgactctgagcaactgaaacagctaaacagcaaaaccatgaataaggggaaactattgtactccctgttaagtcactgaagataaaaagaaacaacccaaacaagctttaaagtaatctctcacttagctatagataaaaagggtattattatgtttgagatttaatatctttaagtatactgaagatgtgatagtttagaaaataatttatagtgttttgaagaggattcaggagtcagaccagagctaaagactaaaacaatgttcctgagacaaatatcagactgccgaagaagctggcttccaacagctctgcagaagacagccaaaagtagttgtatcaaccattgtataattatgttgtactttgatattaacagaaactttatttcataagagtctcaatccatggatacttaatattacaaagcacattatttgttagtagtttaaagatgtgcattaagtgatgacattcttagatataaaaccctacccctccttcaaaaacaactggcattttagtactccatgagaccagtatttagctacagctgttcttttacttttaaattaaggtaatttcctcttatatttcttaataaattaaggtaattactttcaaattagtttagcttgaagatttccaaaggttatgactcaactaaatttggaatcaacagctgatgagatatactgggcattttaggcagtaaaggagctgaggttgttaaaggacacttaattttataagaaatgcttacattaatatacacactgggtattgtctgatgactcattgcaaatatcctcaagttggtcaacatcttgatcctccaaactgttactgtctgaaaaaataaatatacaaaatcaaaaaactaaacttatgtattacatgtcagcaaggcatatgtaagttagacatatgtaatatgtatggtaaaatgtattacttttaaaaagttggaacaatatttttagctaccaaaaattcaatgcatcattcagaaaatggaaaattctgattaaatatgagaaatatggtttttaggtttaaaatgtcccttatttgtcaatgtaatgtttaaagaaagatatggcgatacagtagaaatcaacttattgaaattacaaaacattgtatcaaccaaaatgcattgttatgtaaatgtatagaattaagcataaaaagctaagcatccacatattaacttggtaatttctaattggcagtaaaatttattgattcatttgtatactctgattttcctaccataccatgtaaaaactaaatcatgtaaaaaatatataaaagcaagtcctcttcctctctgattatagaaactaagcatctttagtttaaaaacatttgctaaatattcactatgtttcaagtacaatatcaaagctattagaaatataaggacgcagctgagactggggatgctggggagacagacagaccatgttaaaccaagcttgtccaacccgtggcctgcaggccacatgcggcccacgatatctttatatgcagcccaacataaattcgtaaactttcttaaaatattatgaggttttttttatttttttttagctcatcagctattgttagttatcattagtgattttatgtgtggccaaagacaattcttccagtgtggcccagggaaaccaaaagattagacacccctgtgttaaaccattgtgatccatgttattaagatatgtgaaacctcattactactcctaagtctgttctttctggatcttagctaagaaacattcactactcttatttagaaagtcatctaatacttacatttgatttcctaaatatatttgaatctgttccctttgttgtttttttttttttttttttttttttgagacagggtcttgccctgtcaccaagcctggagtgcagtggcttgatctcagctccctgcaacctctgcctcctgggttcaagcgattctcctgcctcagcctcccgagtagctggaactacaggcatgtgccaccacacttggctactttttgtatttttagtagagacggggtttcgccatgttagccagactggtcgtgaactcctgacctcaagtgatctacccacctcggcctcccaaagtgctgggattacaggcgtgagccaccatgcctggccttgaatccattcccttttcattggtaacgccaaagttcagggcctcatagtctctccacagttgtgactgtaatagacattttcctcttctttaactcagtggttgtcaataaaaagataatttgcacaacccagccctcccccgcccaagcctattcgttcccatttattcaacaagaatttactgtgtgtctgcctacccactgctttctagatatcagcgttaatgcagtgaacaaaagacaacaatctctgccctcatactgcctctaccgtagtcaggggatacagacaacaaacaaaagtaacgaatacaatacatagtctctcccatgatgatagggtgctgtagagaagaatgaagcaggaaggaggaattgggacagttagaactgtaagtaaagagatcaaggaaggcctcattcaaacagtgacatttaagcaaagacctgaagtagatgagggaggaaattcgggggattgagggacggcggggaggggcgcattaaaggcaaagagattatataacgtactgtacctaaaatatacaaatgctagttactatttctggttttaaagagaatgatgagatcaccttagaaaatggagccttaaaaaactgcttcaaaggcggggctcggtggctcacgcctgtaattccagcactttgggaggccgaggcaggtggatcacctgaagtcaggagttcgaaaccagcccgaccaacatggtgaaaccccatctctactaaaaatacaaaaatattagctgggtgtggtggcgagcgcctataattccagctacttgggaggctgaacctggagaatcgcttgaacccgggaggcagaggttgcagtgagacgagatggcgcatttgcactccagcctgtgcgacaagattgaaactccgtctcaaaacaaaacaaaaactgcctcaaagccgggcgctgtggctcaagcctgtaatcccaacactttgggaggccgaggcgggtggatcgctcgtacccgggagttcgagaccagcctgggcaacacggtgaaacctcatctctacaaaaactacaaaaatcagccaggcttcgtggcgcgagcctgtagctcgctacttttgaggctgaggtcggaggatcgcttgatcccgggaggtcgaggctgcggtgagccgagctcgtgcccctgcactccagcctgggcgactgggcgagatgccgtctcaaaatacccataaaaacaaaaacaaaaacaaaatactgcctcaaatacaagcactaagaattaatgaaagtattcttttggtacagttctttttgttcatcaactgaatcacgctgcaagctgtgaagtaattaagggaacttctgcaactgtgcagtaaaagggtaaacctgatagtgtatttaagtagacgtactttctggtagttaattacttcttgacactagggggccactaaatacaagtccactcagcatttgattcggtgcaccaaaatgcctcagaaatttctggaatcagtcctgtacctccaaaaaaccagaatgttatcttcttcttttctaacagctgcaaagccccagtagttccatttttctgtacactaagttttcattcctcagtatccttcacaatcatgcacacattacacagagtgaccggaacaaagatgagtcgacttcgccgaatgatagagaaaaacttccatactgagcgaacaccgaggggagtccggaggccctgttgtcctcttccgtggctggctgtgtccgtcgcagcctgaaaggtcagcggtacccagcgctgtgacagggtcacaggcgcgcgatgtctcacagctcggagcagtactcacctggcattaggccgcgtgccgcaggccagctctcaccgctgggctcttgaagcaggaggcgcgagccgcgccaaagtctgcaacggcctcaagtctcgacgccagcctaggcaaaaggcaatgtatctaaacgaaaagaaaataggctttctccgctctaccgcctcgggcagccacacctccacacttccggcggtgtaccggccaaatgccgcctgccagcaacttccgtcctcctagctaaaagcggaaaacagaggctcggaaccgctgcgtggttcttgctcttcactcggccgttttaaagggtgactctttcctgtcccggcctgcgtggtgtgggcttgtgggtctttgagacccgaaaattgagagcgttttcgcactccagcggctgctcctggcggctctgcggccgtcaccatggtaaggaggatgcctcggacgctcgcgacacacagcgtctgagttagtgggacctgaggactctggggcgctggggtagggggtgagcggtggtaggcggaaatgagaactgccaagagaaaaggatggtagacccgtggggtgggctctgaggagtggaaacaacttcacattcgagacacagacggtatttgccagaacacaagctttggagcaagattttactctgtcctgttttcttttttctttttgatccaccgctaagagtcctaaaaattcctgatttcaccacaagcgtggttatcagccccagagcctaatgggaatatggttgtcccttgtacagtcttagatgtcagtcccgcccccttcattttactgctgaggaaactgaaggcgtccttgccaaagaccagacagctaatgaattgcgaagccgggcttaacggcccagatctaactgccaggtcctttctctttgtgttacgtctctataatctgcgtttctttgcaaaatggcattccatacacccttcatgtgattgctgcaaagtttatgtgatagcagttggtagcagcacaccttgttggttgttacttaacattgctctctgtgctggacttggctttgtatcatttttatttttgcagccttaaaatacgaatagactcacgcctggccgcgtgtttaaaacgtgtctaaaatgcaaaaagcatcccatacattgctggtgaaaagaaaaataatgcacttttggaaaacggtctggcagtaaacacacgtccacatgaagacttgcatgcagttgtttattgcagatttattcgtaatcacccaaaactgggaacaaccctgatacctatcatctggtcagcgggtaaacagtggtgtatccatacaatagcatactactcaacaataaaaaggattgaagttcctatacctgcagcaaattgggtgaatcccaaaagcaagaaaccagattcaaaaggctatgtactactgttgatccctgtttcattctgggaaaggcaaaactgtagggataggtatcaaactgagggttgggaaagaggattgacttaaaagttacatagggaattttagggggaaatggaaattctttgtattttgattgtggtggttacagaactgtgtagttaggaaaaacttagaactgtatacctaaaaaggacaggttttactgtgtgtaaattatgcttcaataaaactgacttaaattttttaaatgtgaaatgaaggtgttattaaaaaagcaaattatgtcaaggaaaaaagatactgtaatcagttcatcccttttgtggtccagtagattttggaccattccctaatgagattattagagatgtaagccctgatgcctcatatcattcaagaccaaaatttaacttacatcatgtgaataaacttaatggtgcaagaatcatttaagtaagtgaacatttggatgaaacagggtctttgtgctgtgtaaaagaaagcattttagaataattgtcagtactttaaaaaattaaaataatatttcttccatcattatagccacagaatgaatatattgaattacaccgtaaacgctatggataccgtttggattaccatgagaaaaagagaaagaaggaaagtcgagaggctcatgaacgttcaaagaaggcaaagaaaatgattggtctgaaggctaagctttaccataaacagcgtcatgctgagaaaatacaaatgaaaaagacgtaagtggtctcatttatttgtcataacaagttaacatcttttgagtaatcattattaaaacagataatcttgaatcttttttccttcttggtagtatcaagatgcatgaaaagagaaacaccaaacaaaagaatgatgaaaagacaccacagggagcagtacctgcctatctgctggacagagagggacaatctcgagctaaagtactttccaatatgattaaacagaaaagaaaagagaaggcggtaagcaataacaattgaagtctttgttttgtttaggagaattacttaaattcaaatttgaggttcttgtttctcggtttaatttcaaacatgaagtacagctattattcccattatttagatgttgaagtctttgtaaatttaataaaaaacttgctttctcatcataaggttttaaaatttaagttataaaaaaaatttattagaatgccatatgaaattaaaaagctggtaaggagtgaatttcaaattcaatatttgtcttcctgtttgaaaacccacagtgctatgcagtcataaagaaaaatacaaatgcttcttatttgtgctgccctgtagtgccaaacttggttaaaaagtagaatggtggaaaactccctgagttgtcacaaaaaatgtggctttttaaaacacctgtaaatagattagcagaaatccagataaaagaatatgcagtatttatatttaaagaattatttttactgccttacactatttcagttttttcatagaatttgcactcaagggaggcataaaacatctggtgaggattttgtcttgctagtgatctacagatccatctcgggaagaaatacagagacatattaagaggtggaaacactcttccagtattatgctattaaacattagtaaacacatatactgcttatagaagtcactatcggctgggcaccgtgactcacgcctgtaatcccagcactttgggaagccaaggcaggtggatcacctgaggtcaggagttcaagaccagcctgaccaatgtggtgaaaccccacctctactaaaaatacaaaaattagctgggtgtggtggtgtgtgtctgtagtcccagctactcgggaggctaagacaggagaattgcttgtacccaggaggcggaggctgcacagtgagccaagattgtaccactgcactccagcctgagcaacagagcgagactccatctaaaaaaaaaaaaaaaaaaaaccaccacattacaggtggtattttctcacccataacacagcattaagatttttagcttaagccaaccatttatttaacatacccatgatatataaacttgttctgtttaatttgcagcttatgagacaatacagacctctagaagacggttgagccaaaaatgtgttgatggtcaagcaaaaaaaatagatctattactttgtacaactaaaacatatttgacttattctcattgtcctttaataacaatataaacttttaactgtggcatatttttagggaaaatgggaagtccctctgcctaaagtacgtgcccagggagaaacagaagtattaaaagttattcgaacaggaaagagaaagaagaaggcatggaagagaatggttactaaagtgtgctttgttggagatggctttacaagaaaaccacctaaatatgaaagattcatcaggccaatggtaagtccttggaagagtgtaatgaccgaaatgttagttgactttattaaatcggataaagaacattatcatttcctgaaattctttaaattgatgtggaacaggttgaaagatatttttatgcaatttttgttattttattgacagaagttatttagtactttttccactagtcaaaaatctttagcccagtgcggtggctcacacctgtaatcccagcactttgggaggttgaggtgggtggatcacctgaagttaggagttcaagaccagcctggccaatgtagtgaaaccctatctgtactaaaaaatacaaaaaataagctgggcgtggtggcgggcgcctgtaatcccagctactagggaggctgaggcaggagaatcgcttgaacctgggaggcggaggttgcagtgagctgagatcacgccattgcactccagcctgggcaagaagagcaaaaatccgtctcaaaaaaaaaaaaaatcttttcagcttcgtgagagatttgaaaaagtagtatcataagacattgtcagtgaattctgacttttaaacatgacatattagaatcttcattttccacagtcatattttcctcattaaactagtgatctacaatatgcctgatattgtctaggtctcaaaacacttcttgtctttgacagcagttcgaaaacttgagtaggactgttttataagagtcaattccagtttgataaggaaagtatctaaatgcttttgaaaatcattgaaaagccgggcgcggtggctcacgcctgtaatcccagcactttgggaggccgatgcaggcagatcacgaggtcaggtgatcaagaccatcctggctaacactgtgaaaccccatctctactaaaaaaaaaaaatacaagaaattagccgggcatggtggcgggcgcctgtagtcccagctgcctgggaggctgaggcaggagaatggcgtgaatctgggaggcagagcttgcagtgagtggagatcatgccactgcactccagcctgggggacagagcaagattctgtctcaaaaaaaaaaaaaaaagaaaaaaagaaaaagaaaatctttgaaaaaaggaagataatttaatatagcttaatttctgttgaaggcagcaatagtaatgtgaccccaaacttccccacccctggggagaaacatagttgaagatatatttttgcaaaatcccttcaaagagactgaactattctcccagttagatacacagcctcaaaaaaacaaagtatcagagagaggaaagttgcaacatgccataatcctagtgttcaacctgagtaattttttttttttttttttgggacggagtctccctctgtatcccaggcgggagtgcagtggcacgatctcggctcactgcaagctccgcctcccgggttctcgccattctcctgcctcagcctcccgagtagctgggactataggtgcccgctaccacgcccggctaatttttttgtatttttttgtagagacggggtttcaccgtgttagccaggatggtctcgatctccgtgatccgcccgccttagcctcccaaagtgttggaattacaggcatgagccaccgtgcccggccaacgtgagtaatttttaatagattaaaatattggcaaatagcctgtttctgtaaataaaattttaatggaacacagtcatgcctgttcatttacatattgcataacccctacccctagaattgagcagttgcaacagaggccatatggcctgacaaagcctaaagtgtttacctattgggttctttacacaaaatgtttgcccaccccggattatatcatggactcgacttgttttggtttcatattcatagtctgaatatattttggtagccttaacagttctacagggagagaatatacaagtcaggctattctaggttttctgtagtttcacagatttgtcattataatcagatggcatcctgaatggtgtcagtttcttacaagcttgattaatgagtctgttactaagaaactgatttagtgattttttccccccatccccatgcacacaaaaatgaagactgcaaaatgttgtgacgtttaaagtactacaccctaaaagaccttattaggtgactgggtgactccataaccagtttctgtaacaaagactcctctgggtctcctccagtctcatattgccatcaacctaaagaaagctgacagtccactccttttttcatcatggaaggtagccgagttatataaagacttggaatcaggatattaaggtttgagtctgtttaccactcaccatttaatctggaaacaagtcatttaacctgctgatccttgttacatcatttgaaaacagaggagaggggatgtgtttgttgtgaggttattgtgtttaagtgagccagttgtgagctagcatagtggcctggtatatataaagtccttagtaagtctaagtgtagatgactagacagtaaaaatctgggtatgttgctaggtagctattacagggtgaaaaaaaaaaaaacttttcagaggctagctgtggtggcctgtaatcccagcactttgggaggctgaggtgggtggatacgttgagagcccaggagtccaagaccagcaggcaacatggcgaaaccccatctctaccaaaaaaaaaaaaaaaaaaaataagctaggcatggtggtgcgtgcctgtagtcccagctactcaggagcctgaggtgggaggatgtcttgagcccaagaagtccaagctgcagtgagccaagatcacgccactgcactctggcgtgggcaactgggcaagaccctgtctcaaaagaaaaagaaattcttaagtatttgtgtgggtgttttccccacatatttatactgtaaccatcagctttttactctgtaaaacatattttgttagcttctttaagatgacattattcaaccatagttttttggagatggttgaaaaagataagcgaaaacgaccactactcatcactgttaacattttggacgtaaacattcttatgttgtgtttgacttactagggcttgcgtttcaagaaagcccatgtaacacatcctgaactgaaagccaccttttgcctaccaatacttggtgtaaagaagaatccctcatccccactgtatacaactttgggtgttattaccaaaggtactgtcattgaagtaaatgtgagcgaattgggccttgtgacacaaggaggcaaagttatttggggtaagtgaatttttgaatacagggctgctgtgttctgcagtactaatagaaatactattcaagttgatgtattaataaaatatacagcaaatttttttaatgcagtagagctaaaacactgtaaatcagatgtaaatatttagtaaaaaatactttatagaaaaagttgttataaatacaattgttttaaaatttagcttactggttttagttacataaggtgtaatacattctgctagatttatttttatcctttttagccaggcacagcagctcacgcatgtaaatcccagcactttgggaggctgaggcgggtggatcacctgaagtcaggagtttgagaccagcctggccaacatggcaaaaccccacctctactaaaaatacaaaaaaatcagccgggtgtggtggcgagcacctctaatcccagccacttgggaggctgaggcaggagaatcacttgaactcaggaggcggagcttgcagtgagctgagattgtgccactgcactccagactgggagacagagcaaatctccatctcaaaaaaaatttttttaacctttttaataaaaattattataagggaagcagatgcaaagttataactaagaaatattataagaaaatagaataaattaaccatgagcagaggaagggaggcatatatcaaacatattttaaaagtgaggtcagcttacatgaagtattagccaatgactaaagatgtcttccgtaagaaaaaatttcttttgccacaactttatattatgtaaatacttcttatatttacatgctaacattaagagaaaatacctattacatttaaagaaatagaactatctgtcccacgtaggtaaactgatcattgaaactgccaggagcggtggctcagcctgtaatcccagcactttgggaggctgaggcggacagatcatctgcagtcaggagttcaagaccagcctggccaacatggtgaaaccccatctctactaaaaatacacaaattagccaggtgttgtggcccacacctgtaatcccagctgctccggtggctgaggcaggagaatcgcttgaacctgggaggtggagcttgcagtgagctgagatcgtgccattgcactccagcctggatgacagagcgagactctgtctcaaaaagtaataataataattgaaagtgatttaacacagtttagttcgttctgttaattcccattaacaggtctcagaaatcatgtagaagcttccaggctttaaaaagccccctcgctatctgggcgcagtggctgacacctataatcccagcacttggggaggccgaggcaggcggttcacttgagactggagttggagaccagcctggccaacatgacaaaacgccgtctctactaaaaatacaaaacaattagccaggtgtggttgtgggtgcctgtaattccagctactcgggaggctgaggcaggagaatcacatgaacctggagcttgcagtgagctgagatcatgccactgcactccggcctgggagacagagcaagcctccatctcaaaaataagtaaaataaaaatattttgatcttttttaataaaaattctttattacaagggaagcagatgcaaagttataactaaaaaaaattgtaaaaaaaaaatagaataaattaaccatgagccgagggaggcatacaacatataatcacactagatcagtaataattaaaacagaaatgtgtcatgcagtaattttaaacgccctcatttgcttagttttctacctttagtacccagatccaatttctttgaaagggaagaatacacgctacaacttcttcagtcattggtttatacttcatgtcagctgacctcagttttaaaatatgttgttaccttgacttgaaactcatttgaaacttgatacattttccaggaagaattatgtgaaaaagtgacaatgctcaggtcaatccacaaaagcctgttaatgcaatgtactaataacatggagctggccattatttgcaaaaacactatttgtatgaaaattgtattcagaactcaaatttgtccttaaatgattgaattttgtaaaatctcatttatcctttatggttcatttcttatttattgaaagtggtaattagaaatattttaggcatggctgggcgcagtggctcacacctataatcacagcactttgggaggccaaggcaggcggatcatttgagctcaggagttcgagcccagcctgggcaacatggcaaaaccacatctctacaaaatacaaaaacaaaaaaattagccaggcagtggcgtgtgcctgtggtcccagctacccggaagactgagtgaggagaatcgcttgagcccaggaggcagaggttgcagtgagccagatcacgccaccacactgcagcctggggaataagagtgaaaccctgtattaagacaaaaagaaaaaaaaggcaaaagttatattctttaaaattaatttttattagctaacaaccctcccttttcccttttttggttttgttttccttaggaaaatatgcccaggttaccaacaatcctgaaaatgatggatgtataaatgcagtcttactggtttgacagcaatttcatatataattattgaggactacacaccaattgaagaaactgccattactgtgatgtttctgaatactaccaaacagccatacatgtctgcaatgaagagatttattaaattgtaaacattaaagtggtccagttttataaatggtctttattttgaaatacgctttgaccccatgttcataaaactgaatgattgaaaaaaagcaaatatacaaatatcctacttcatcaatatctgcatttgtgagtgggtattcagcaatttcctgaaaaaaccaccagtgttcattgaaaatgcctttcaaaaaggttaatacacaattatgtgtctgagaatttaactgaagtatcttcaaaatctcgttaatcattaatcctaaaaaaggtaggtagcattaatacagatgttaagtttatagtgtttgtttacactagaagtatgtgagaagacactaaaagttcagaaatcttagagaaatcttttcacctgtgaaatccagtacagcaaaggtctagtgaattcacattctaaacatttttttcatctcatttaccatgtataataatacctacttggcactattttctacttgaatcatgaaaatgaaaaaaatatactaaagtctttgtactctcttagcattttctgtattctaaacaatatatttatactttcagaatagtattaagaattagtttaagtaactccagctaagttttaaaaggaaaaagaagactgcactgattccctgaggagaaatttatttgcagttacttagatgatgtaaaaaggtaaggatttacggttgtaacttggtgaaagcacttttgtgatctgttatatgttgtggttttaaggatggcgtatattacattaatctataatcaccacattgttttaaattgtttattttttttttaaagaagtctgtcttcagagtacaaccaatgtgattaattgtgcctttaacaaagtcattcaatgtctaaacaaattcagtatctgaaacatcttcatgaggaaaactgaaggaaaggaatttaaaaacacagaccaggaaacaatcacaaaatataggtttaattactacttttaaacttaaaaaaaaataaaaaccaagaaaacaaacataggtactccagtaagacttgctactctgaataatgtaacattttttctaagttctataaatatatactggaagttttagaacacatacagacgcttaggaaaagaaaggctagttccttggaaatgacgatccaggatgatacaatcacttgatgacagaaggtaagcctttcttacaattagattttagcagataattttaccactaatataaatgggtgatgtgtggatcacaagttctagaaggcgaataaaaatactgactccaggtaatttctggatactacaaaaatgaagtttgcttgttttttttagaaccaaaaatactatcttgtaaggtacaaagaaagcttgatattaagtatgaaaacataagcataacatttgtaactaatcacacccatgaaagacgactagatgacacctgaaacatttttcaaaatactgtaacacagatgagtaatattagtataaattttttatgtacattaagatctgtttcagtttgctggtgtgaccaaaccttagaaggtaatcccaagggataaagcagaacataagagcagatatttagatattagtacaggctcaatttgatgcaatcataaaccttcaagatttctagtcactgaaaccccattgtaggtagtgttctggagtctgctataagtaaatctttaatgactagatgttttccttaccatctacactgaatggaaataccatgaatatagacacattttaagtagaagactgacgttctaaatcatgctgtttgattttataaaaaaatcataatagaccctctcacctttaaaagttgtagaggagctttataataaattcttaaatatactaatttctgtgatgtctagcaattgaataatttaaacttgaaagaactaaaatactaataaccatctgctttatattacacaaggaaatatacacgtatgtacataaaaagtgaactcccttcacaaataagttcacaaaggactatgtgtaatgtgactggacattcaacaactagactagccggttgaaatcacattttcagtcctctgtaattgtgaaattttttctaatgccttgcaaaaactacagataactgattaagttcatgtaggttccttattgaagataaattgtggtataaattctatactcagttactgaacatgagagttaggtttttccaagtgatctaacttttccctctataatctataaaccccaaaataacaatttctgtcagagagaatctgtaacagaagtgttcttgtgtgctgaacaaaaaacttctaaattgtttacaattcacttactatttaacccaaacaagtttaacaagaataagtttatactgttagcccccaatggtcatatatgattaataaacattttttgtaaactcaactatattcacacatcaagagttgagccagtgagctcaatctttaaaaaactacacttgtctaaagaaagtcttttagtgctcacttcggcagcacatatactaaaattagaacaatacagggaaaattagcatggcccctgtg

SEQ ID NO: 8253 - DNA, 671 bp, Homo sapiens
ctgtaatcccagcactttgggaggttgaggtgggtggatcacctgaagttaggagttcaagaccagcctggccaatgtagtgaaaccctatctgtactaaaaaatacaaaaaataagctgggcgtggtggcgggcgcctgtaatcccagctactagggaggctgaggcaggagaatcgcttgaacctgggaggcggaggttgcagtgagctgagatcacgccattgcactccagcctgggcaagaagagcaaaaatccgtctcaaaaaaaaaaaaaatcttttcagcttcgtgagagatttgaaaaagtagtatcataagacattgtcagtgaattctgacttttaaacatgacatattagaatcttcattttccacagtcatattttcctcattaaactagtgatctacaatatgcctgatattgtctaggtctcaaaacacttcttgtctttgacagcagttcgaaaacttgagtaggactgttttataagagtcaattccagtttgataaggaaagtatctaaatgcttttgaaaatcattgaaaagccgggcgcggtggctcacgcctgtaatcccagcactttgggaggccgatgcaggcagatcacgaggtcaggtgatcaagaccatcctggctaacactgtgaaaccccatctctactaaaaa

SEQ ID NO: 8254 - DNA, 561 bp, Homo sapiens
ctgtaatcccagcactttgggaggttgaggtgggtggatcacctgaagttaggagttcaagaccagcctggccaatgtagtgaaaccctatctgtactaaaaaatacaaaaaataagctgggcgtggtggcgggcgcctgtaatcccagctactagggaggctgaggcaggagaatcgcttgaacctgggaggcggaggttgcagtgagctgagatcacgccattgcactccagcctgggcaagaagagcaaaaatccgtctcaaaaaaaaaaaaaatcttttcagcttcgtgagagatttgaaaaagtagtatcataagacattgtcagtgaattctgacttttaaacatgacatattagaatcttcattttccacagtcatattttcctcattaaactagtgatctacaatatgcctgatattgtctaggtctcaaaacacttcttgtctttgacagcagttcgaaaacttgagtaggactgttttataagagtcaattccagtttgataaggaaagtatctaaatgcttttgaaaatcattgaaaagccgggcgcggt

SEQ ID NO: 8255 - DNA, 183 bp, Homo sapiens
agtgattctcctgcctcagcctcccgagtagctgggactacaggcatgcaccaccacacccggctaattttttgtatttttagtagagatggggtttcaccgtgttagccaggatggtctcgatctcctgatctcatgatctgcccgtctcggcctcccaaagtgctgggattacaggtgtga

SEQ ID NO: 8256 - DNA, 204 bp, Homo sapiens
tttttcagcttagtgactataattactgtaaagcttgatttccttcttgttataataaactgcattagtttgaaataaataaataaaaacacatggaatattattcagccttataaaaggaatcttcacttgagcccagtttgagaccagcctgagcaacacactgaggccctgtctctaccaaaaatacaaaagttagccaag

SEQ ID NO: 8257 - DNA, 204 bp, Homo sapiens; identical to SEQ ID NO: 8256

SEQ ID NO: 8258 - DNA, 2538 bp, Homo sapiens
taaaaataaaatatctacaagtgttttcaaatctaagaaatgaaacatgtaaagattaagaatttactgaatcttaacagagtatttccctttgtgatattgacagaagtttctcataaaatgtataaaacagcataaatgtttggtagattcactaatagtagtcatacttttttttttttacttagtattagcatttgttgaaaaaataaatggccaaagtgctttaattttcatttagaatgaaataatctggcttacctttgactaattaaagaaaatatagggtaatacaattgttcaaaatctaacacaaataggagcgtttactatttttgtctgctttaagattttaacttgatcgaaaataccaacatccccaaacaaaatttactgacctgacatcagcttactatagactgaatacactttcaacatcagtccttagctacctcaaataatgacacaaagtcttagtttcttttgcataaggatcaagatcaagctatttttaaaacaatttaaatggtctcaaaacattctccaacttaagtgcaaatttgagtacacataatatttccaaagagtagaactgtttttagattatctttggattctaataaccattttgtccatttttaaataaattacaaaaaataacagttcagtgttttttttcttcaaattttcctaggcctttgttatggcaacacaatatatacttaacaggccagcttgcaaccagtactcagtacaaatcaaaggatgattgaagcctccaatatgattgaagcccttgtaaccacagctcccccaaaggcagtttacccctgccatataggtctaacactgggggcagttttactcctgccatataggtctaacattgtggggtgcacctccaaacctacccaaaaatggacatcaagggcataagccggcaggcaggaagatctgttgattggagaatcactccatgagttacagaagtagatgaaagctgtgggggaatataaataagactgtagaattagggaggtggcaagatttaaggagatgccttaggaaggagcctcatacttctgaaatatagatgttaactgggttgggataaaagtaaaatctccagcttaatttatctatctgatcaggaccagaagtccaaattaaaccatgtctccaaagtatagttgtgatttttacctgattaaaggtgaaagtctaaacttctaggcgtctgcacatatgcagacaaaaaaaattacagcaaactaatacttcaaatgaaattttaaataattagtccccacatgccacagttaaatccctgacagtactgttaacatcagatgatagaatgaatcagaaacagattttatgtgtacctttccatagatagtgaagtcaaaggaaaaaactgcatctatatctaggattaagaggccaaaaccaaaatatcttcatgaacctttgaccgtaagtttctgtttttgtgctctcatttacttgaagttatattttttctaatttattgacacttatttttgtttaggcatgcctacattttaaaaaattggtgattagttttgaaatttaaaacttctagaaccctcaccaagttttactattaaaacccttagtataaaagatttctgtgatccttataagtaatggaaatcctactactttcacagctttttaattatatttttgaaataatggtcagatgtaccacctgataaagaaaatataatatgatctggtttcccaaaattgaaacatggttaataaaaataaaaaattgcatttaccaaaaatagcctggaaaattaaaaacaatggtgaattctacgttctaaagggaagcaaaaaactgcatagtaagtaagttcaaattgaaattttggaaatttttgtcctgtgccccatgctgtttattaattaccatattttaaaaacaacaactatgttacaaagaagaggatttatcatccactttcttcttccttcaggtcagcttagctttcttcttagcaggtcctttatgccctttggcctttcttcttaaattccgcctgtctaccacaggcacttccacttctatttcctctgagctgctatccacagctttttctgccgattgtgtaaactgatccagttgctcggaagatgcttcagactgctcctctgactgattcttctgtcctgcattctgtgaaaatggcacgtcttcaagttcaacctctatcaaagaactctgaggaagagcagtagatgtttcctggggctcagataccccctcctcaccctggtcttccaatgaggaagtagtattaggagacaaattctcagagaccggttcttcggaaaattcagctatcacagagtttggaaaaccaccatcagatcgttcttcatttgacatagtagcaacattgtctgaactcccaagatgtgctttctttcttggaagtagggacaatttctcttccatgtgccccttttcatcagatgtgccttcatccatcaacatttctg

SEQ ID NO: 8259 - DNA, 575 bp, Homo sapiens
cagaatctgttctttgcttgaatgattgaaatgactggtgtaaactgcaatcacttaactagacttttattttgactttgagtcaaagatgtgttcatggtcctttttataaaggccatgaattttcatgttacttttttgtgatatatgttaaatttcttatccccgtgttggggttcagaaacccatatccccaaatacggcactttgacatgctgaactgaagaagcctcaaggtctatgtgaccttccccctttctcctcagccaccatctctcccaaacacaggatgaagttaaagttctttatctgcctaaaatccagacccaccaaggagatcttctccatcttattagaccaagatgtaaccacacctgaatggacattttcccaagataatgtctgagttaatccctgctccctgatccattcattctccctcgcaatccctttaacagaattcctcttctctccctgctattttgccaggaaggcatagaagcttctgactctagttggggttttgtggttctccctgtgtatacattaataaagtttgtatgcctttgccctga

SEQ ID NO: 8260 - DNA, 327 bp, Homo sapiens
ataaaaatgacaaattcaaatatatcatcctctcaataaatgcacttgggctaaacactagagggttaaaactcagattgagctttaagaaatccaactaaatactgtttataagaggcagtcttggctgggcgtggtggctaacgcttgtaatcccaggactttaggaggccaaggtgtgtggattgcttgaggccaggagttcatgaccatcctgggcaacacaagaagaccccatctgtattattaaaaataagaagaagaagaaaaaagagacaatcttaaaacataatgacccacctctaaagtagtcagattcaaagaaac

SEQ ID NO: 8261 - DNA, 814 bp, Homo sapiens
tgatatttcacgtcacatggccagtgagtgggtaggcctctcttcacttattacacttctgcttctaagctgtgttctttcctgtattacactggaggaaggagaaaaagaacttgtatttggtccttgactgggtggaatatcctttaatgtggctgtaaggacatgggtagaatactctggtcaattcatttcttatttaaatagtgacaaaggtatgtccatgttaaccatttctcacttatgctttatacataaggatggcttatagggaatgttgctttattatatcacttaaaatgtttggtcaggcaatagtgactcatgcctttaatcccagtacttttgaaggacaagtcaggaggatcgcttgagaccaggaactcaggaccagcctggacgacaaaacaggatctcgtctctacaaaaaataaaatagtcgagtgtggtgatgcagtattgtagtcccagctatttgggaggctgaggtgggagtatcgcttgagaccaggagttcaaggatatagtgaatgatgatcgctccactgcattccagcctggacaacaaagcaaaaccctatttctaaaaaaaaaaaaagtttttagtttcttaatgatcagcaaaactaataccctatcctcatgatacacttctgaacttctgattaatagctcgtgccagggcagagtaatgggtgtgccatataactatagacagtccttctgttacttctagttagatcccttttatctggatagattctgtctgttaagatttaggatatattctttagtttttaaagcaggtttttct

SEQ ID NO: 8262 - DNA, 289 bp, Homo sapiens
atgagccaccatgcctggccatttcttacacttttgtatgacatgcctattgcaagcttgcgtgcctctgtcccatgttattttactctgggatttaggtggagggagcagcttctatttggaacattggccatcgcatggcaaatgggtatctgtcacttctgctcctatttagttggttctactataacctttagagcaaatcctgcagccaagccaggcatcaatagggcagaaaagtatattctgtaaataggggtgaggagaagatatttctgaacaatagtct

SEQ ID NO: 8263 - DNA, 289 bp, Homo sapiens; identical to SEQ ID NO: 8262

SEQ ID NO: 8264 - DNA, 5876 bp, Homo sapiens
cttaaaattttttttttagcatttatgagaccagtacaaactactcaagaggaagatggctgtagctgccgatttccagaagaagaagaaggaggatgtgaactgtgaaatggaagtcaatagggctgttgggactttcttgaaaagaagcaaggaaatatgagtcatccgctatcacagctttcaaaagcaagaacaccatcctacataatacccaggattcccccaacacacgttcttttctaaatgccaatgagttggcctttaaaaatgcaccactttttttttttttttgacagggtctcactctgtcacccaggctggagtgcagtggcaccaccatggctctctgcagccttgacctctgggagctcaagtgatcctcctgcctcagtctcctgagtagctggaactacaaggaagggccaccacacctgactaacttttttgttttttgtttggtaaagatggcatttcaccatgttgtacaggctggtctcaaactcctaggttcactttggcctcccaaagtgctgggattacagacatgaactgccaggcccggccaaaataatgcaccacttttaacagaacagacagatgaggacagagctggtgataaaaaaaaaaaaaaaaaagcattttctagataccacttaacaggtttgagctagtttttttgaaatccaaagaaaattatagtttaaattcaattacatagtccagtggtccaactataattataatcaaaatcaatgcaggtttgttttttggtgctaatatgacatatgacaataagccacgaggtgcagtaagtacccgactaaagtttccgtgggttctgtcatgtaacacgacatgctccaccgtcaggggggagtatgagcagagtgcctgagtttagggtcaaggacaaaaaacctcaggcctggaggaagttttggaaagagttcaagtgtctgtatatcctatggtcttctccatcctcacaccttctgcctttgtcctgctcccttttaagccaggttacattctaaaaattcttaacttttaacataatattttataccaaagccaataaatgaactgcatatgataggtatgaagtacagtgagaaaattaacacctgtgagctcattgtcctaccacagcactagagtgggggccgccaaactcccatggccaaacctggtgcaccatttgcctttgtttgtctgttggtttgcttgagacagtcttgctctgttgcccaggctggaatggagtggctattcacaggcacaatcatagcacactttagccttaaactcctgggctcaagtgatccacccgcctcagtctcccaagtagctgggattacaggtgcaaacctggcatgcctgccattgtttggcttatgatctaaggatagctttttaaattttattcattttatttttttttgagacagtgtctcactctgtctcccaggctggagtacagtggtacaatcttggatcaccgcctcccagtttcaagtgatctccctgcctcagcctcctaagtagctgggactacaggtatgtgccaccacgcctggctaatttttatatttttagtagagacggggtttcaccatgttgtccaggctggtctcaaactcctgacctcaggtgatctgcccacctctgcctcccaaagtgctgggattacaggcatgagccaccatgcctggccatttcttacacttttgtatgacatgcctattgcaagcttgcgtgcctctgtcccatgttattttactctgggatttaggtggagggagcagcttctatttggaacattggccatcgcatggcaaatgggtatctgtcacttctgctcctatttagttggttctactataacctttagagcaaatcctgcagccaagccaggcatcaatagggcagaaaagtatattctgtaaataggggtgaggagaagatatttctgaacaatagtctactgcagtaccaaattgcttttcaaagtggctgttctaatgtactcccgtcagtcatataagtgtcatgtaagtatcccattgatccacatccttgctaccctctggtactatcaggtgcccttaattttgccaagccagtgggtatagaatgagatctcactgtggtcttagtttgcatttgcttggttactgatgagcaccttgtcaaatatttatataccatttgtgtttatttttttaaataaaatgcttgctcatgcttttttgcccatttgcaaaaaaacttggggccgggtgcagtggctcatgcctgtagtcccagctctttgggaggccaaggtgggcagatcgcttgagcccaggagttcgagaccagccttggcaacatggcgaaaccctgtctttacaaaaaatacaaaaattagccgggtgtggtggtgtgcacctgaagtcccagctactcagtaggttcgctttgagcctgggaggcagaggttgcagtgagctgggaccgcatcactacacttcagcctgggcaacagagaaaaaccttttctcagaaacaaacaaacccaaatgtggttgtttgtcctgattcctaaaaggtctttatgtattctagataataatctttggtcagttatatgtgttaaaaaatatcttctttgtggccaggcacggtagctcacacctgtaatcccagcactttgcggggctgaggtgggtggatcatctgaggtcaagagttcaagatcagcctggccaacacagtgaaaccccatctctactaaacatgtacaaaacttagctgggtatggtggcgggtgcctgtaaccccagctgctccagaggctgtggcagaagaatcgcttgaacccaggaggcagaggttgcagcgagccaagattgtgccattgcactccagactgggtgacaagagtgaaattctgcctatctatctatctatctatctatatctatatatatatatatatatatcctttgtaatttatttttccctttttaaaattttttataaaattcttttttatttttatttttagcagaggtgaggtttctgaggtttcattatgttgcccaggctggtcttgaactcctgagctcaagtgatcctcccacctcagccttccaaagtgctggaattgcagacatgagccaccgcgcccctcctgtttttctctaattaatggtgtctttctttgtctttctggtaataagcaaaaagttcttcatttgatttggttaaatttataactgttttctcatatggttaacattttttcttgcctggctaaagaaatccttttctgcccaatactataaagaggtttgcccacattttattccaaaagttttaagttttgtctttcatcttgaagtctaatgtatcaggaactggcttttgtgcctgttgggaggtagtgatccaattccatgtcttgcatgtaggtaaccactggtccctgcgccatgtattcaatacgtcgtctttctcctgcgggtctgcaatctcacctaccatccatcaagtttccatagggccatgggtctgcttctgggctccctgttctgttccattgtcaatttgtctatcctgtgccagtatcacactgtgtttattacaatagctttgtaacagctctcgatatccggtaggacatctccctccaccttctttttctacttcagaagtgtcttagctaggtcaggcacggtggctcacgcctgtaatcccagcactttgggaggccgacgcggatggatcacctgaggtcaggagttttgagacagcctggccaacatggtgaaaccccatctctactaaaaaatacaaaaattagtcaggcatggtggcatgtgcctgtaatcccagctatttgggaggctgaggccggagaattgcttgaacccggggggcggaggttgcagtgagccgagatcgtaccattgcactccagcctgggtgacagagcgaaactctgtctcaggaaaaaaaagaaaagagatgtcttggttattcttggttctttattattcaatataaattttagaagctgaatttgaaaagatttggattggaatttcattaaatctacaggtcaatttagggagagttgataattttacagaattgagtcatctggtgttccaataagaataagagaacaattattggctgtacaattcttgccaaatagtaggcaaagcaaagcttaggaagtatactggtgccatttcaggaacaaagctaggtgcgaatatttttgtctttctgaatcatgatgctgtaagttctaaagtgatttctcctcttggctttggacacatggtgtttaattacctactgctgactatccacaaacagaaagagactggtcatgccccacagggttggggtatccaagataatggagcgaggctctcatgtgtcctaggttacacaccgaaaatccacagtttattctgtgaagaaaggaggctatgtttatgatacagactgtgatatttttatcatagcctattctggtatcatgtgcaaaagctataaatgaaaaacacaggaacttggcatgtgagtcattgctccccctaaatgacaattaataaggaaggaacattgagacagaataaaatgatccccttctgggtttaatttagaaagttccataattaggtttaatagaaataaatgtaaatttctatgattaaaaataaattagcacatttagggatacacaaattataaatcattttctaaatgctaaaaacaagctcaggtttttttcagaagaaagttttaattttttttctttagtggaagatatcactctgacggaaagttttgatgtgaggggcggatgactataaagtgggcatcttcccccacaggaagatgtttccatctgtgggtgagaggtgcccaccgcagctagggcaggttacatgtgccctgtgtgtggtaggacttggagagtgatctttatcaacgtttttatttaaaagactatctaataaaacacaaaactatgatgttcacaggaaaaaaagaataagaaaaaaagaccttattttaaaaagctttttataactgttgcaacatcatatcataaagggtaatcatgaaataaggtgccattctttgtaaactttggcttttagtgccgaaggatgctaaagatttccagtatgagattccttttgctttcaacaattgacttattagttacataaaaatggatgctgttgatcgggtgcagtggctcacacctgtaatcccagcacttggggaggccaaggggggtggatcaccagaggtcaggagttcaagaccagcctgaccaatatggtgaaaccctgcctctactaaataatacaaaaattagccgggcgtggtggcatgcacctgtaatcccagctacttgggaggctgaggcaggaaaatcacttgaacttgggagacggaggttgcagtgagccaagatcccaccactgcactccagtctgggcgacagagcgagactctgtctcaaaaaaaaaaaaaaaagaagaatgctgtttttggccagtcacagtggctcacacctgtaatcccagcactttgggaggctgaggcgggtggatcacatgaggccaagagttcaagaccagcctggccaacatagtgaaacctcatctctactaaaaatacaaaaattagccaggcatggtggcacacgcctgtaataccagctactcgggaggttgaggcacaagaatcacttaagcctgggaggtggaggtggcagtgagctgagatcacaccactgcactccagcccgagagacagagtgagactctgtctcaggaaaaaaaaaaaaaaaaaaaaaa

SEQ ID NO: 8265 - DNA, 292 bp, Homo sapiens
catgcctgtagtcccagctctttgggaggccaaggtgggcagatcgcttgagcccaggagttcgagaccagccttggcaacatggcgaaaccctgtctttacaaaaaatacaaaaattagccgggtgtggtggtgtgcacctgaagtcccagctactcagtaggttcgctttgagcctgggaggcagaggttgcagtgagctgggaccgcatcactacacttcagcctgggcaacagagaaaaaccttttctcagaaacaaacaaacccaaatgtggttgtttgtcctgatt

SEQ ID NO: 8266 - DNA, 638 bp, Homo sapiens
cttaaaattttttttttagcatttatgagaccagtacaaactactcaagaggaagatggctgtagctgccgatttccagaagaagaagaaggaggatgtgaactgtgaaatggaagtcaatagggctgttgggactttcttgaaaagaagcaaggaaatatgagtcatccgctatcacagctttcaaaagcaagaacaccatcctacataatacccaggattcccccaacacacgttcttttctaaatgccaatgagttggcctttaaaaatgcaccactttttttttttttttgacagggtctcactctgtcacccaggctggagtgcagtggcaccaccatggctctctgcagccttgacctctgggagctcaagtgatcctcctgcctcagtctcctgagtagctggaactacaaggaagggccaccacacctgactaacttttttgttttttgtttggtaaagatggcatttcaccatgttgtacaggctggtctcaaactcctaggttcactttggcctcccaaagtgctgggattacagacatgaactgccaggcccggccaaaataatgcaccacttttaacagaacagacagatgaggacagagctggtgataaaaaaaaaaaaaaaaaa

SEQ ID NO: 8267 - DNA, 637 bp, Homo sapiens
cttaaaattttttttttagcatttatgagaccagtacaaactactcaagaggaagatggctgtagctgccgatttccagaagaagaagaaggaggatgtgaactgtgaaatggaagtcaatagggctgttgggactttcttgaaaagaagcaaggaaatatgagtcatccgctatcacagctttcaaaagcaagaacaccatcctacataatacccaggattcccccaacacacgttcttttctaaatgccaatgagttggcctttaaaaatgcaccactttttttttttttttgacagggtctcactctgtcacccaggctggagtgcagtggcaccaccatggctctctgcagccttgacctctgggagctcaagtgatcctcctgcctcagtctcctgagtagctggaactacaaggaagggccaccacacctgactaacttttttgttttttgtttggtaaagatggcatttcaccatgttgtacaggctggtctcaaactcctaggttcactttggcctcccaaagtgctgggattacagacatgaactgccaggcccggccaaaataatgcaccacttttaacagaacagacagatgaggacagagctggtgataaaaaaaaaaaaaaaaa

SEQ ID NO: 8268 - DNA, 116 bp, Homo sapiens
tcacacctgtaatcccagcacttggggaggccgaggcgggcggatcacaaggtcaggagatagagaccatcctggctaagacggtgaaaccccgtctctactaaaaaatacaaaaa

SEQ ID NO: 8269 - DNA, 122 bp, Homo sapiens
ttttttttagatggagtctcactctgtcacccaggctggagtgcagtggcgcaatctcagctcactgcaacctccacctcccaggttcaggcgattctctgcctcagcctcccgagtagctg

SEQ ID NO: 8270 - DNA, 372 bp, Homo sapiens
gcagttatggatgggggtagccatggggggtttcgatattctttctgctaatctgtatttaactaatttttatttcttaaacaagcattgttttcataacaaaactgttattgataacaccttctcctcccatttggaactttaatgacctgtgctgaagacccataggcttgttatgcatcccacagggattactgccaggcaaggtgctttgggaactgtagagagctttgaagacatcagctgccactcctggtggttggtttacccttcaaacttcgagtatctgggcctcccttctgagacttaggaagctgagataggagcatggtggaagccacagcagccgactcataggcaactgtgagaaaa

SEQ ID NO: 8271 - DNA, 261 bp, Homo sapiens
tggtggcaggtacctgtaatcccagatactcaggaggctaaggcaggagaaccccttgaacccaggaggcggaggttgtagtgagccaagatcagagcactacactctagtctggatgacagagtgagactctatctcaaaaaaagaaagaaaagaaaatactcgcccagcattgtattttatatatatgtatgtaattttccatttgaacacagttcgatgagttttgactcacaagcaatcatgtaaccaccaccacaa

SEQ ID NO: 8272 - DNA, 102 bp, Homo sapiens
ttttgagacggagtctcgctctgtcgccaggccagagtgcagtggcacaatctcggctcactgcaacctctgcctcccgagttcaagcaattcttctgcctc

SEQ ID NO: 8273 - DNA, 458 bp, Homo sapiens
agagttatatcactatttagaggatgttagggggtagaaagagctttttccacacttggtgttctttaggtgaatgataccatattctcaaaatcagggcagcagtacacggtatgcatggaggtacaaatgggcagggagagatgttggttgccattgtcccaaatgtgctacatgaatattagcactttctacatgtgccagggcttggaaaaggttggaaattaccccaggaacaggttataaagagtgaagaaggcactactcctatctactggaaaaaggatttttattatttggttagctttgtgttttaaaaaaatgatgagtatgatatcattcatctgttataaaattcaggtaacttttactggtgaacttgttagttctcactttagctttagcttagccatgcctttatgatacaattgaatttataaatagcattcttatgttaa

SEQ ID NO: 8274 - DNA, 149 bp, Homo sapiens
tttttgtttacatataattgtatttgtgaaatgtgttgggcatttccattgtgactttagagtagcatctattctatgtttctatttcatgtctaatttaagaggtggggcaagtctgagactgccattccaagatgtagaagccctta

SEQ ID NO: 8275 - DNA, 416 bp, Homo sapiens
acatatactatttcctttttatttttttaaaatttttttgctttttgtctttacaaaataatctcaacataacagtgaagtcaaaggctttccttttcttactctgtatgtatattttccagttggttatttgaggctttgaggtatttataaacacaaaaggctgtatttctgctcccctacctcttcttatgtctgtaatgaagttttgaaatgagtcatgatttttaagtttcttttgcttggtatttattgcctaattaaaagtgtatgagttagaacaggctttttaaattatggagtaaaagaatcttagcatttttgtcccctcctaaatctgtttcttgaatgagatttatcaccatgcctgctgttgtgcaccataacgaaaaaaaacaccttttggtaaacaccat

SEQ ID NO: 8276 - DNA, 529 bp, Homo sapiens
agactgtatgttttttctgaggcctaatatgatattgtcaaagcatattatgtaattgaatatctttttcacttctgttcagacattcccttgacaacctgaaaaaaaggggaaaaaagttatttttaacacaaacaaatacatagtcatttgggagaaaggagctgctgctttattgtgtttttttctctgtttccttgatggccagttgcatcaggagtgcaacctggagtggctttggagtgcatccttccagccacccagaacgctctccctttagtacacttgccaggtcatccagtgacaaggaggtcacccacgcatacagtgtcacattccgcatatgacagccataatccttagactgtgcttcactttgttgaccccagctttgcctccatgcagattccaatcatgtatccaggccctgccctctagagtatagaagagtatattgtatttcttccagaaaaaaataaaataatacacacacaccccacccccatatatgttaaaaccatttcgaatt

SEQ ID NO: 8277 - DNA, 208 bp, Homo sapiens
cttataatttcagcactctgggaggctaaggcaggcagatcactggagctcaggagttcaagaccagcctggacgacatggcgagatcccagcctctaccaaaaatacaaaaaaaaatagctaagcatggtggtatgcgccagtggtcccagctactcgggaggctgaggtgggaggatcgcttgagcctggtggggcaaaggtcaca

SEQ ID NO: 8278 - DNA, 342 bp, Homo sapiens
aagaagatagggcctagtaaatttacctgaaaaatatttaagtattctaatataaaaactgaatctcactgagggattcaggtggcttaaaactcacctgaaccctgaacctctattttctcatttactgaagtttattggggtttttggtttttttgtttttttttgaaatgaagtctctgtcacccaggctggagtgcagtggcataatctcggctcactgcaacctccacttcccggctcaagtgattctcctgcatcagcctctcaagtagctgggattacagatgcacaccaccatgcccgactaatctttgtattttaagtagagttggagtttca

SEQ ID NO: 8279 - DNA, 321 bp, Homo sapiens
agaagatagggcctagtaaatttacctgaaaaatatttaagtattctaatataaaaactgaatctcactgagggattcaggtggcttaaaactcacctgaaccctgaacctctattttctcatttactgaagtttattggggtttttggtttttttgtgtttttttgaaatgaagtctctgtcacccaggctggagtgcagtggcataatctcggctcactgcaacctccacttcccggctcaagtgattctcctgcatcagcctctcaagtagctgggattacagatgcacaccaccatgcccgactaatctttgtattt

SEQ ID NO: 8280 - DNA, 142 bp, Homo sapiens
tttttttttttttttgacacagagtctcgctctgtcgcccaggctggagtgcagtggtgcaagtctcagctcactgcaacctccacctcccaggttcaagtgattctcctgcctcagcctcccaagtagctgggattacagg

SEQ ID NO: 8281 - DNA, 620 bp, Homo sapiens
gtgaactgacatttgatgtgaggtaacaataaacaaataggaagaaatgtctaccttcacctcggattcaaagagggctgatacataactgacctttccagagctcctactctttgttccaataatctctagaagtgggaacttttggaaatttatcctaggaaaataattaaaatgtagaaaaacgtttatgcatgatagtatttgtttttgtacatatgggatagcaatgaagcagaatcaacctattacaggagcatcattaggaatgcgcctcataaattctcaatgccattgttattctaattattctcatacaatgctgacgtaaaaatgatacttttgaagatgataataccctcaatgcccagcattgtacgttatatgaagaaggcagaatacccattcaaatgaatacaaagtatgaaattatatatcattttatataactatttatagacaaccagttaaaagaacatatgggccgggcacagtggctcacatctgtaattccagcactttgggaggacgaggcaggtggatcacttgaggtcaggagttcgagaccagcctggccaacatggtgaaaccctgtctctactaaaaatacaaaaattagc

SEQ ID NO: 8282 - DNA, 620 bp, Homo sapiens; identical to SEQ ID NO: 8281

SEQ ID NO: 8283 - DNA, 620 bp, Homo sapiens; identical to SEQ ID NO: 8281

SEQ ID NO: 8284 - DNA, 346 bp, Homo sapiens
agatatggtggtatgtgactctccccctagggcccaagagatgaggctggtgaggaagccgtggatgatggtaccaatcagatcaatgaacaagccagttttgctgtaaacaaactgcgagaactaaatgagaaacttgaatataaaaggcaagctctaaattctattcaaaatgcaccaaaacctgacaagaaggtaactctttgctttcaaggttgtctttgaaagttaacatttgtctaatttggtagttttcagttgaggttgagaagtgtcagtttcttttaaaataattttaaccatgaacaagttccattgttatttttttgcttctaggatagaatta

SEQ ID NO: 8285 - DNA, 346 bp, Homo sapiens; identical to SEQ ID NO: 8284

SEQ ID NO: 8286 - DNA, 1535 bp, Homo sapiens
ggggacgtgactgggacaggttcctgccttatcattttctccctaggacattcccttgtagcccccagaattgtctggcccaaattgaatagaagcagaaaaacatttagggataacatcaggccagtagaattaagcctctccacctgtcccaaccataaaaagggtctcccagctttccatctctggctctatatgctttatcccaaaacaaagcagataacgttcagacgtcggccatttagtaatttaaagcgaatttccagcagcaagcatgctttgatatctggttcagactatcatcaggaagaaaaaaaaatcccacagtacctgaaatgtgattgttgcagtgttcagtttccttgggggcctgctcccttcacaccttgagcccaagtccttttccgttggctgattcagctcccagaagagacgaggaagtgtgtggcaagggactggaaaacttcacttgcttggattaggcaaggctccactcattgttgatatttgcccagcaggaaaatcatgtaagttataccaccagaaagcaaaaggagcatggtttggtggttaaggtttagtgggatgaaggacctgtcttggtgggccgggccctcttgtgccccgtaggctaggtcttagggcaactccttgccctcctgctcagcacctccatttccccatccttggtgagataacaagctatcgcgaaaagcacttgggagatttggatgatttgagaagagtgacttaaaaaaaatgcttctgtgctctaagatatatatgtgtgtgtgtgtgctacatatatatttttaagaaaggaccatctctttaggatatatttttaaattctttgaaacacataaccaaaatggtttgattcactgactgactttgaagctgcatctgccagttacaccccaaatggctttaatcccctctcgggtctggttgccttttgcagtttgggttgtggactcagctcctgtgaggggtctggttaggagagagccatttttaaggacagggagttttatagcccttttctactttcctcccctcctcccagtccttatcaatcttttttcctttttcctgaccccctccttctggaggcagttgggagctatccttgtttatgcctcactattggcagaaaagaccccatttaaaacccagagaacactggagggggatgctctagttggttctgtgtccattttcctctgtgccaaagacagacagacagaggctgagagaggctgttcctgaatcaaagcaatagccagctttcgacacatacctggctgtctgaggaggaaggcctcctggaaactgggagctaagggcgaggcccttcccttcagaggctcctgggggattagggtgtggtgtttgccaagccaaggggtagggagccgagaaattggtctgtcggctcctggttgcactttggggaaggagaggaagtttggggctccaggtagctccctgttgtgggactgctctgtcccctgcccctactgcagagatag

SEQ ID NO: 8287 - DNA, 397 bp, Homo sapiens
aataaagccattgagtattttttctttatttgtgggcaataaatcaatccatctaagtataactgggtttatttaaattagtggctaatgcagtgacattgtatgcatttcactactctgtaacaggcagcacctaaatggggaatacaataagatacttgtcagaaatagaaattttaaatttttaaaaatttcttaatgttttattttaaatacccactttttgataccaacataaacatggtttaaatgccaagaacgaatacctttatattgttcttgtatgctctgtgtttgtagaaatgaagaacatttgagttatataaacaccaaagttaaccccaaagtttcagaaaatctgagctctttggaaaaaactaaattttgaggtagtttc

SEQ ID NO: 8288 - DNA, 525 bp, Homo sapiens
aaagaggctatgattaaaagcaaaaaaaaaaggaaaagaaacaaaatccacatttaatgattccacatggtacattttatcttttccaataccgtcctccaaaatgcagtgggatagagatttttgttgttgttgggtttttttttttcctcctctgaaaatggcttgtttctcattagaaagagtcatttgagaatgatactatcaaaatctgtcagggtaggtcctgcagaatattccagatgttcccctacaatctcttgcaaacaaatgattaaatgtagtactggtagatttttagacaaaaagaaattttaaatagctctcataaaattacattgtttgtaatgataagatgtattttaaaagttccattcttctagaaaccttgaactttccatcgttatttttcagttaatcttccagaatatcctttctgtccctgctctgtgaagttgaacgcttggttcaacttaggcttggtagctaatgtattgccacctgaattgtgcctatttaatacta

SEQ ID NO: 8289 - DNA, 339 bp, Homo sapiens; identical to SEQ ID NO: 7638

SEQ ID NO: 8290 - DNA, 339 bp, Homo sapiens; identical to SEQ ID NO: 7638

SEQ ID NO: 8291 - DNA, 339 bp, Homo sapiens; identical to SEQ ID NO: 7638

SEQ ID NO: 8292 - DNA, 248 bp, Homo sapiens; identical to SEQ ID NO: 7635

SEQ ID NO: 8293 - DNA, 248 bp, Homo sapiens; identical to SEQ ID NO: 7635

SEQ ID NO: 8294 - DNA, 248 bp, Homo sapiens; identical to SEQ ID NO: 7635

SEQ ID NO: 8295 - DNA, 171 bp, Homo sapiens
cctgcctcatatctgccattttccccaacctgtctccattcctgtttttagcaataggaagactcacagagatacagcagcctagacttcaaccagcttgtcatctccaatcaattatttgtggatacattgagcactgtgctgacaggctcagctttaatgtcatgatct

SEQ ID NO: 8296 - DNA, 95 bp, Homo sapiens
ttgtttttgagacagagtctcgctctgttgcccaggctggagtgcagtggtgctatctcggctcactgcaagctctgcctcctgggttcacgcca

SEQ ID NO: 8297 - DNA, 478 bp, Homo sapiens
tatcatttgagatggagtctcgctctgtcgcccaggctggagtgcagtggtgcagtctcggctcactgcaacctctgcctcctgggttcaagcagttcttctgcctcagcctcctgagtagctgggattagagacacacaccatcatgcccagctaatttttgtatttttagtagagacaggctttcctcacgttggtcaggctggtctcgaactcctaacctcaggtgatcggcctgctttggcctcccaaagtgctggggattataggcgtgagccaccaagcccggcctcaacactatttttaagaagtccatctttacttctctgatttgagaggctgctttgtcatacactgaatttctttatgtacttggttctagtctgattttccttttagtatcaatgatgtttctgtttatttacattttttgtttgtttatttttaagagtctgagtcttgtcttttttaaccaggc

SEQ ID NO: 8298 - DNA, 459 bp, Homo sapiens
gaaaccctgtctctactaaaaatacaaaaaattagccgggcgtggtggtgcatgcctgtaatcccagctacttgggaggctgagacaggagaatcgcttgaacccaggaggaagaggttgtggtgagccgagatcccggcattgcactccagcctgggcaacaagagcaaaactccatctcaaaaagaaaagaaagaaacaatcttgccgggcgtggtggctcacccctgtaatcccagcagtttaggaggccaaggtgggtggatcacaaggtcaagagatcgagactatgctggccaacatggtgaaactctgtctctactaaaaatacagaaattagctgggtgtggtggctcacgcctgtagtcccagtgactcaggaggctgaggcaggagaatcacttcagcccgggaggcggaggttgcagtgagccgagattgcgccactgcactccaccc

SEQ ID NO: 8299 - DNA, 740 bp, Homo sapiens
attttgttgtaatagaagactcttcacagtatttagcgtagcatattgctctaagtagaaagcccctgattgttttataagaaataatgttcattattttatttttacttttgagactagagtctcactgtgtcatacaggctggagtgcagtggtgcaatcttggctcactgcaatctccgccttctggggttcaagtgattcttgtgcctcagcctcctgagtagctgggattacaggtgaatgccatcatgtctggctaatttttgtatttttagtagagatggggttttgccatgttggctaggcatgtctcgaactcctggcctcaagttatctgcctgccttgacctccaaagtgctaggattacaggcatgagccaccatgcttggactcattattaattttatagcaggttttcctgttttcttttttcctcccaagtggaaagaaaaactttcttgtaatttttctctaaaaatttatgtttggctttgatgcagttacatgtggtgtctgccatttcataagctgtcagaatggtacattcatttttctacagcagtattttagaaagtgaaagtagagatggaagtcacaatatttacttgtatttatcacacagtaacttaaaaggagatggagcaatggtacatttctttccagcatttaaagaaaattccgtttttggagttacataatacgtgattgtagttcatttagtatgcttagccaaaaa

SEQ ID NO: 8300 - DNA, 787 bp, Homo sapiens
gccatgcctactccgccccacacactcctcagaggcccctctcctaatagaagcccaactccacactccccacctgcgggctgtctagttctacatttgcgaggttcacatcttaaacgttcagatggaatgttccttgagagaagcagctatgaagaccacctctaatttctttctgaccttttagtaaggaaaggttggacgtactgcttgctgtgcatttccctagcaatgtcccttatctggtattaatctgtcagtgacttggggcccgactcactaagacactacccatcttttaatgcagtcttgctggaggctgaaaatggtgcaaactccactatctggaaatggaactctgggctaatacctcagctcggcaatgtttttccttcttaccccagctggaggtgaagacagtaactcttactaagctattttctcctggaaacacagacgctccctgagagagaatgagagaatgaccagtgatgccatctcccgttggcagcgccatgctgtggtgcggcccagatgggcctccatgggactgctgctacccgtgggatcacggcccctccgtggatttgggggatctgagaacacgttttctcaggtgtttatctggcaacctacaaaatcccccagcccttctccagtagaagcccagaagggtgattatggtttaaaaagccaagtcataaatcgggctttctctactcaacttgctttgtagctgaggaaatccgcagagagcaatttaaaaggaaaagaaaaaggctgagaa

SEQ ID NO: 8301 - DNA, 365 bp, Homo sapiens
gttaattatttctctaaaatgtaggtttaatgtttcatcttcttggtagcttacttatttcaaacgcagaaagttatcaaggaattccgttcctttttttaaaaaaatattttcagaaaaaaccacaatatttctgcctttgactctccttattttctttgaatctaaataagaatatctaaaaataccccatttgaaggaactggatttcttcccccaccccagaaaaaagaaatatagttttatctgtaagattagtgtgttgagtctatttcattcaaccttgtgagttgaacataatttaaaggtagtcttatttaattatatgaatgtgcatattaattaaaaagcagttgactaagcat

SEQ ID NO: 8302 - DNA, 455 bp, Homo sapiens
atttggattctcgcgtattgcaaaggtctaattagcaagtgtgtgctgtttgcagccaagaaaatgcaagttgccgctcgaggaacctatctcctatgcctgctgaatcctgcatctcctctcggaagatgttggctgctctgcttatcactctcagaaatatctgatagggctggggagcactgagtgtagaaaatctgacttctccaaaactggcttgtttggaaaacaacacttccctttctcaagcttaggaaattttttaaaagttacggaaagggccccatagtgcacttcggttggaaagaactgtgtactgcacgtgattatttacagccaagtggagagtgactggatcctaaatacatgtttccgtccctcagcccctgtgttggtctgtttgcttaataatgtaattagtgctcagagggagaatattgacgctgctgccagca

SEQ ID NO: 8303 - DNA, 529 bp, Homo sapiens
tgataatttaccacgtgttaggcctacacttgctactgggaatagaatattattaaaagaccatagtttctatcttcaaggagctcagtctagtgtatgggcaaatatgcaaactaaaattacatcttagttaattggtattaaattggcattaaaacatttttatttgagcaaaagctagtgtgtattaaaagacaaagaaaagtgattaaaaggtgctaacgttataaggattataagtggctcagtattattgagtgtaggtacatggaggaaagaccaaaatgagctagacagacaggcaggggccagatcataaagggctacatatgcagtactgattagaagccttgaaatattttgagcataggtgtgggaaaatgattatagaattttgaaactaaaaataatactgttttacagaaatgaggaggttggctttgaggacatgatctgctataggcagactgtgccccttacagcagttaaaaagacatcactggaaaattctttgatactcttctattgg

SEQ ID NO: 8304 - DNA, 529 bp, Homo sapiens; identical to SEQ ID NO: 8303

SEQ ID NO: 8305 - DNA, 4805 bp, Homo sapiens
tgaatgagtgagtgaacaaacaaatgcagtcaagaacttgagatggttgtattctaactgccatgagttaatttaccagtgatatctttggttctaggtgtcagtaattaacactgtggatacctcccatgaggacatgattgtaagtattaatatcaccctccctggaggggtgtggacatgggcatttttgtgggagggaagcaatttggggttttcattacccctttctgttgatcattcatggatccagggtggctttgcagtggttgcctatcagcctgtaatctcggggtatggcaggctccctagcagtgccctctgagttgtcaggactgtggcagtctaatcactctctgctgggaggaacctgggaataatttgtagttctaggctgtcagtcttccagccaacacaataacctgctctcggatgaaggctgagtgggtacggaggcttgacaatagtcttcccacctgtcttcctcctgctgtcacttcttagccccactggaaaggggggtgaaaagaagagagtgtagaaagatgactcaatacaaaggcagagggcagccacagtgaaagccccaggcagagcccagtcaaaccaccaagacaataggccagacaaggccctttgaaccagaagtccacactcagggcatttcctgagaggtaaacacaaggctcagtataagaggacagggctgcaggagaaggtccagaggttaaagtctaccgcaggaaaaacacagactctgcttcattcagggccaagcagcctttgagcaagacccaggacagctggctgacagtgtttcatgtcagggttcttgccctcacaacctgtccaccaacagttgcttttgggtttctgagaggttgtctggtcccagagttgtatatgttctctggattcagtcatgagtggtctagctgtaagaccacacctccttggagatagcatggaatcatgggcaggaagacccagtctgagactccctagccaatatcttaacttttctgagccagcctcaatttacttacgggaaaaataatggatatgctacctactcgtatgagtttggtttgagaactagatgaggccaagtagtaatgacaaacatttgcatgctcactgagtgtcaggccccatgctaagtacttttccttttttttttttttttttttgagatggagtttcgctcttgtagcccaggctggcatgcagtggcgtgatctcagctcaccgcaacctacgcctcccgggttcaagtaattctcctgccccagactcccgagtagctgggattacaggcgtgcgccaccactcccagctaattttgtatttttagtagaggcaagttttctccatgttggtcaggctagtctcgaactcccgacctcaggtgatccgcccgcctcagcttcccaaagtgctgggattacaggcgtgagttttcattcaatatcttgtttaaccttcataacaactgttgagacagatgctatctttagccttatttaaagataagggaactaaggcccataggatgttggtaaataataaagataaggaaactgaagctcaaggagatgaagtgttttcaaagtttgcacagcaggtaaactaaggagataggatttagatctgaaaggtactatgtcctgcctccttccactgagaagcatgagaagtgcttcagaaacactcctctactgcctgccctccaagaaaccaaggcctgatacagtggagggagttcccaaagaaaaatcaggatgtgttccttgcgtagggaggtgagaattcccatctgagccagacagaatgagtgcctttgaatgggcataattgcccctggtggccatgggagtgcagctgatagtcctgaaactcccagggtgggacagctggggaaagggacatccattggaataggcagggccagcaagcagaagggaccagggtgttcagtggtgcaggaggcatggtgcctcagagaccatcaccctgcggacaaggatctgcaggtaggggccaggcctagttctgcatgctcagtcagcatcaaggaattcggttcacaagtggtgagagcagcgacacttaaggcattgtgttccttgggtggaaagtctgggaagctctgggcacactactagggaaaaggtcgagcagaagccccaaaacaaaggtccacaaaggatccagggccagggctggaaagagcccaaatatctgaatggaaccctgtgtgcaggccagagctgcatcacagaagacctgactggggactccaggcagtcagaggcccactcctttggcctgctcccatgcattagcatcaggtgctagggctgagctgaacccaggggtattcccctttagcccacagagcctaagaactgaatagggcctgagaggatggaggaagaagagggcagctaggccaactttttttctcccatacccaccctgcggaacaggaatggaagagcccttccctgaggtatgtaaagggtctgtgacaccagctgggcatggcttgctttgtccatttcagagagacactgcccataggtgaagtgagaatgtccacatgctagcttcctgcctgagggtgatgatactttgagatcagattgatttcagggagattctggtccaaactagactctgtgtagtgacagccctcaccccacccacccacccacccagcctgcaggcttcccgagctgtcctccctttgcagcacgacgcccagatggactactatggcacccgcctggcaacctgctcatcagacaggtccgtcaaaatctttgatgtgcgcaatggagggcagatccttatcgccgacctcagggggtaagtgctggcgagcccagggaagggctccaggaatggtgtgggttctcaggccctgcttcaagcgtgggagcaaagcatgggagcccagattcagagcaaccccaaagcacatttagcggagaggacgctgggatcccagccagcctggctgtcctcagcggacgtccccagggatgatgctgttaagggcacaggtggatacaggtgtgaatctcagctctgccactttatgtgtacccaccagaagaccttgggcaagtgactcagtttctctctcagagccttcatctgctcatcctcaaaattgggccaatgctacctcctatccagctagtgtatgcaaggccctgacacagggcccaggacacagtaagtctttagtgcaggcagctactgctacttttaaaagtggtaaacagtaccatttcgttcaagtttagccagtatgacctaaagtgtcacaaaagcatcaccgtaagaataatgtaagaatgctatcattttataaatcccattgttctgcctatacgcccgtggcacgtgttcagtgattatttacaaatgtttgacctgccctgctccctactgagattcttgaggaagtcctggctcatttttatggccacatctctactgctttccctcagctcactgcctttcacgtatttgtgggtttgcctgggtgccgtggatctccaagggttctgtgaatagagttcaggggttgatgaattgggacagggggaaaaaaatgcattttcagtgactctgatatttagcatttccttcaattatggatgtaggccagaaacttcagtagtatttgtagtgcctgtcactttgtcaccagtagaagtcacagatattgtcatcacacatcacggttacttagctacctcaaaataccacttatgctcatcacaactttgaaattacagtggttattagacctgccgctagggtttgttgcttgaagtgttaacaaagaagtacatgcatcactatctcataaattgctttataatattttgataacaggctgggcaaggtggctcacgcctgtaatccttacactttgggaggctgaggtgggaggatggcctgagcctaggagtttgaggctgcagtgagccacgatggtgccactgcactgcagcctggatgacagggtgaaacccttctcaaaaaaaaaaagttgattactgtataatttataattgaattttctttataagcctagttctgtgtgttttgtacattagtctgatgagggtccataaccttccccagaatgcacagaaaagattaagagccatgacaggtgggtgctcagcatgtgtttgttcactgaattaaaaagcataaactaagtcagtgtccatttggggaaatgggcctagaagctcccctctgtctgagtgtcaaatgatcaagtgactgaggagccaaatcaagcttctctatgcaggagccccccaggcaggcagagagctgctgcagtgcagcgtgttggccaaggcagttatgtttgctgtgactctgtcctttctgctgtttttcttacattcaaaggatgtgaaatattggagggataaaaaaaattcccaccccattcttttttccccttagtaaaaactgtgctagttgttggaagattgagtctactcagtttcattagcagcagctttgtagggactgggaatgtcctgttgtcccagccagagggaggaggagacttgagtgtgtgcagcccacggtgaaggagtaaaccaggagcagcactaatagctaatgggtattgagtggcttttttctttccttctaccaagcattgttccaaactttatgaaagaattcttattgatgtctccattttcaggtaaagagacaaagatatccttgcctaaagtcaagagctagtgaatgggaga

SEQ ID NO: 8306 - DNA, 25576 bp, Homo sapiens
gcgcgttgctgcccggaggctcctacgccacggcccgtcgggcccggcgccggaagtgagctgttccgaggcgccgccgggagctgccacgtccgagacctggagcagccaccgccgcaatcatggtgagtgttggtactgaggaggcctagcagggtgaaggccacggtcgcggccttcacgggttcctcggccgtcctgagtcccaaatcccaagctggagccgttcagctcccctccaccgcttagagatttggggggctctggccccgtccttgcggaccattccgaggggagtccagaggtgaggccgaggaacctccctgactttgcggggcgcgccgctcctgcgtctcctgccagtctcccttccttcttttcggtcaacaattgaaaacaaaacgaggaacagcagaggagctactgtataccgagccctcagcattgttcgtaatctccgcctgctaacagccttgtgaagaaggtgctattcttctcaacactttacagatgaggacacttgaggttcggagacgtggagcctcttgcacagctgcttaagtggtagtagagccgagatttgaaccctcctaaccattcctttctgccgcctactgcagctcccagcagagatgattgaactgttgctcggggtagggcccccaggtaggatgggcacctcgggaaacgtaaagatggcctgaacgaccctccgaaggcaggggctcagggttttttaagtctctgtggcatctgcagtgtacattcactccacacttactccttgagtgaatgaatgactgaaggagaactaaagaatggaagtatctgggctgagcctggaatatctagtacatgcattcttttagaaacatgggtgtgtctcagcagcaggtttgagggaacctgcaggaacctagaaatcagaacactgtgttcttgttctgcagagggttaggtgtaaatcactcacctctggctcttccactgcaggttagagttgaggcttttatgctctgacattcagctcatcctaaatgaatttttaactcattatctgatctcaaagaggtgaattattttgagtgcaggtgttaacagggaccagataataccaggtccctgggaagaagtactctaagaagttctctctctctctctccccaccctccctctctccccactccctctccctccccccttcctctccctctccctttctctctctccccctccctctcttctctctctctctccccgctccctcttcctccccccttcctctccctctccctttctctcccgcccttcctccttccttccgtccttttctctccccctccctctttcctcccccccccccccccccgccttctctctctctctctctctctctctctctctctcattcagaagtgtggttcatcaaccctgactggtgggtgagagtggttagaattaaatgctgattatttctaaggtcctttggtaacctggttgaaactacctctcagtaaactttcttcgtgaacctacttaaccgcagctttacagaactcagtgtaacaactgctttacattctagacaggcagcctggtggagtgaagttttgtggactcagcattagaaggttaggggatggggctcttttcccaggtctgccttgaactagctctgtgactttggcaagtgctttctcttctctgggcttcttcatttccttagtctgtcgcaggtctctgattgactgtgcccttggtaccctgccctccccgccttcctgtgcactttgtaacctatacagctcggcacatggaggaaactccttattgtccttacttgcctttgcagacttcggggacctggtttttagagagtctagaatctgatgagagaacctgtgcttacttggtgtgtacctcttgaactgctttgcagccatcctcttccactgtctgcctttctgaaatcacaagtcaaactttatacctacagggcttgtgctggaaaagatgaaatggggaaaatggtaagaaatgtctgttccacactgaaacttcttttaagtcctcttttctatcccaagaatttaagagaagagtggttgagcaaagaaaaaaaataacagcttttgttcatttacttattcattcagcaaatagtcgctgagttccttctatttgcaaagcactgtgctggatgatttgaggggatttgaaactgcagatggctcagaccatggctccaaggagctcaccttctagtggggagaagaaacagcataaagtgttgtatgtgttccttgctgaagatatgcaagagagtccagccatttgagggtctgagaatcttcaagaaaggtgatggatggccctttttgagctggacctcaaagaatagataggagggagatgaccatgacaccatgttccagccctacaaactgttcaactctggatcccactacgtgacggaccagggagcagcctcaggaaacactcgaatcaagtctcccagtctgaagtaataaccccgttatgcataaactgcctggaacatcagaggctctgtcatccaggaaaggaacaccagctgtagctcccttggggtctctcctcaaccttaagggtagccaggactgcttgccgtttccccacacacatcaggctctctcagacctctttgtctctactcgtgtattccctctgcttggctgcttggactggtattttcccctgtgccacctgcaaattcctacccatcatctagggctcaattcgtgtctaccaccccagcccctcaggctcctacaggacacacaaaccaccattaaataatttattttgcgacactagcattattcgcgagcttctcaagggcaaaaagttcctcttatttgtgtctgtatatccagttcctagcacagtgcttggcagaaagaaggtacttagaatgaatgcttactgaatgaatgaatgaatgagtgagtgaacaaacaaatgcagtcaagaacttgagatggttgtattctaactgccatgagttaatttaccagtgatatctttggttctaggtgtcagtaattaacactgtggatacctcccatgaggacatgattgtaagtattaatatcaccctccctggaggggtgtggacatgggcatttttgtgggagggaagcaatttggggttttcattacccctttctgttgatcattcatggatccagggtggctttgcagtggttgcctatcagcctgtaatctcggggtatggcaggctccctagcagtgccctctgagttgtcaggactgtggcagtctaatcactctctgctgggaggaacctgggaataatttgtagttctaggctgtcagtcttccagccaatacaataacctgctctcggatgaaggctgagtgggtacggaggcttgacaatagtcttcccacctgtcttcctcctgctgtcacttcttagccccactggaaaggggggtgaaaagaagagagtgtagaaagatgactcaatacaaaggcagagggcagccacagtgaaagccccaggcagagcccagtcaaaccaccaagacaataggccaaacaaggccctttgaaccagaagtccacactcagggcatttcctgagaggtaaacacaaggctcagtataagaggacagggctgcaggagaaggtccagaggttaaagtctaccgcaggaaaaacacagactctgcttcattcagggccaagcagcctttgagcaagacccaggacagctggctgacagtgtttcatgtcagggttcttgccctcacaacctgtccaccaacagttgcttttgggtttctgagaggttgtctggtcccagagttgtatatgttctctggattcagtcatgagtggtctagctgtaagaccacacctccttggagatagcatggaatcatgggcaggaagacccagtctgagactccctagccaatatcttaacttttctgagccagcctcaatttacttacgggaaaaataatggatatgctacctactcgtatgagtttggtttgagaactagatgaggccaagtagtaatgacaaacatttgcatgctcactgagtgtcaggccccatgctaagtacttttctttttttttttttttttttttgagatggagtttcgctcttgtagcccaggctggcatgcagtggcgtgatctcagctcaccgcaacctacgcctcccgggttcaagtaattctcctgccccagactcccgagtagctgggattacaggcgtgcgccaccactcccagctaattttgtatttttagtagaggcaagttttctccatgttggtcaggctagtctcgaactcccgacctcaggtgatccgcccgcctcagcttcccaaagtgctgggattacaggcgtgagttttcattcaatatcttgtttaaccttcataacaactgttgagacagatgctatctttagccttatttaaagataagggaactaaggcccataggatgttggtaaataataaagataaggaaactgaagctcaaggagatgaagtgttttcaaagtttgcacagcaggtaaactaaggagataggatttagatctgaaaggtactatgtcctgcctccttccactgagaagcatgagaagtgcttcagaaacactcctctactgcctgccctccaagaaaccaaggcctgatacagtggagggagttcccaaagaaaaatcaggatgtgttccttgcgtagggaggtgagaattcccatctgagccagacagaatgagtgcctttgaatgggcataattgcccctggtggccatgggagtgcagctgatagtcctgaaactcccagggtgggacagctggggaaagggacatccattggaataggcagggccagcaagcagaagggaccagggtgttcagtggtgcaggaggcatggtgcctcagagaccatcaccctgcggacaaggatctgcaggtaggggccaggcctagttctgcatgctcagtcagcatcaaggaattcggttcacaagtggtgagagcagcgacacttaaggcattgtgttccttgggtggaaagtctgggaagctctgggcacactactagggaaaaggtcgagcagaagccccaaaacaaaggtccacaaaggatccagggccagggctggaaagagcccaaatatctgaatggaaccctgtgtgcaggccagagctgcatcacagaagacctgactggggactccaggcagtcagaggcccactcctttggcctgctcccatgcattagcatcaggtgctagggctgagctgaacccaggggtattcccctttagcccacagagcctaagaactgaatagggcctgagaggatggaggaagaagagggcagctaggccaactttttttctcccatacccaccctgcggaacaggaatggaagagcccttccctgaggtatgtaaagggtctgtgacaccagctgggcatggcttgctttgtccatttcagagagacactgcccataggtgaagtgagaatgtccacatgctagcttcctgcctgagggtgatgatactttgagatcagattgatttcagggagattctggtccaaactagactctgtgtagtgacagccctcaccccacccacccacccacccagcctgcaggcttcccgagctgtcctccctttgcagcacgacgcccagatggactactatggcacccgcctggcaacctgctcatcagacaggtccgtcaaaatctttgatgtgcgcaatggagggcagatccttatcgccgacctcagggggtaagtgctggcgagcccagggaagggctccaggaatggtgtgggttctcaggccctgcttcaagcgtgggagcaaagcatgggagcccagattcagagcaaccccaaagcacatttagcggagaggacgctgggatcccagccagcctggctgtcctcagcggacgtccccagggatgatgctgttaagggcacaggtggatacaggtgtgaatctcagctctgccactttatgtgtacccactagaagaccttgggcaagtgtctcagtttctctctcagagccttcatctgctcatcctcaaaattgggccaatgctacctcctatccagctagtgtatgcaaggccctgacacagggcccaggacacagtaagtctttagtgcaggcagctactgctacttttaaaagtggtaaacagtaccatttcgttcaagtttagccagtatgacctaaagtgtcacaaaagcatcaccgtaagaataatgtaagaatgctatcattttataaatcccattgttctgcctatatgcccgtggcacgtgttcagtgattatttacaaatgtttgacctgccctgctccctactgagattcttgaggaagtcctggctcatttttatggccacatctctactgctttccctcagctcactgcctttcacgtatttgtgggtttgcctgggtgccatggatctccaagggttctgtgaatagagttcaggggttgatgaattgggacagggggaaaaaaatgcattttcagtgactctgatatttagcatttccttcaattatggatgtaggccagaaacttcagtagtatttgtagtgcctgtcactttgtcaccagtagaattcacagatattgtcatcacacatcacggttacttagctacctcaaaataccacttatgctcatcacaactttgaaattacagtggttattagacctgccgctagggtttgttgcttgaagtgttaacaaagaagtacatgcatcactatctcataaattgctttataatattttgataacaggctgggcaaggtggctcacgcctgtaatccttaacactttgggaggctgaggtgggaggatggcctgagcctaggagtttgaggctgcagtgagccacgatggtgccactgcactgcagcctggatgacagggtgaaacccttctcaaaaaaaaaaagttgattactgtataatttataattgaattttctttataagcctagttctgtgtgttttgtacattagtctgatgagggtccataaccttccccagaatgcacagaaaagattaagagccatgacaggtgggtgctcagcatgtgtttgttcactgaattaaaaagcataaactaagtcagtgtccatttggggaaatgggcctagaagctcccctctgtctcagtgtcaaatgatcaagtgactgaggagccaaatcaagcttctctatgcaggagccccccaggcaggcagagagctgctgcagtgcagcgtgttggccaaggcagttatgtttgctgtgactctgtcctttctgctgtttttcttacattcaaaggatgtgaaatattggagggataaaaaaaattcccaccccattcttttttccccttagtaaaaactgtgctagttgttggaagattgagtctactcagtttcattagcagcagctttgtagggactgggaatgtcctgttgtcccagccagagggaggaggagacttgagtgtgtgcagcccacggtgaaggagtaaaccaggagcagcactaatagctaatgggtattgagtggcttttttctttccttctaccaagcattgttccaaactttatgaaagaattcttattgatgtctccattttcaggtaaagagacaaagatatccttgcctaaagtcaagagctagtgaatgggagaatgggtctggtctcctaaccactaactctaccatgctactctacctcttgagtgctaaggtgcaaaaccttccctgggccagagaaatggtcaccgtacaaagcctggcacagagcatgtgctcagatagcacctgttatcaggtgaatggataaagatcagaagagaagggaaagacatgcctttcgaacaaattaaaagagtagtggaaaacatcaaaatgaaaccaataatgcctcctcaggaagctgaccgtcgggaaggatgaatagcaattcagtctacaaatatttcctgaacacttctggctggaaaccttggaccaattaatgactatgctgtagacagcacatacagacagtgctggctgcagtctgggcaagtgaggctcctgcctggccaggacaggaaggctgacccagaggctcaactctctctcaaaggctctgtgaccttaggttgcttaacctcttaggacctcaggctcctcactgtccactgagcaccccttttgcaatggcattgtatagttctccctttgaagttcttaagcaattctgccctgatatatcgtctcagggagccatttagttctgtccaaagtagtgcctgcagaggcactgtgggttcctctggcctatctctccctttgtagtcatgagggtcctgtgtggcaagtggcctgggctcaccccatgtacggcaacatcctggcatcgtgctcctatgaccggaaagtcattatctggagagaggaaaacggcacctgggagaagagccacgagcatgcgggacacgactcctcaggtatgctgagcttggcagcagagcgggcaaggggaccactgggtaaaaaaggactctgtcccggctggagccctggctccctgcccctcgtggtgcctcttgtctgtctcttgagctttggttggcttttctgctactctgtcctcagctgagtaaggccctaagacctaaagccagtccaaagcaaataagaaaagacaggtgagtttctcttcaggattattcattgcaaggactacccttcattctcagattgttttcctacccacttttttgttagatagactgtaggttatgaaatcgtggtattagtaggtgatggggtttttttgtgtcctcagttgaccaagttacagcttcccccggtgactcctacagttgtttgttgtagacatttagtaaaacagtaaatctgtggaaggcgggacctggggccgcggtctccctgctttgctcactgcactctccctcttcccgcagtgaactcggtgtgctgggccccccatgactacggcctgatcctggcctgtgggagctcggatggggccatctccctgctgacttacaccggggaaggccaatgggaagtaaagaagatcaacaacgctcacaccgtgagtccatcccctgcctttcatgcagtgagagcgcctgccttgccccgtgtctgctgcagcctccctagagggtggcacgggagggtccccgctgggcagtgggccggggagtggtcagctgaccagacatgattgctctagagcagctttgagcctctctgccctgaagccagaccaggcagggcttggcactgcttccttgttgtgtgctcccaagcaggggagggctggtgcagcagcagcctgctcactgccaccttagctatggttgcctccaggtgacatgccctgcagtagtcattgggaccctgtagaatggagtggtgttattaaaacttttaaaaagtatgtgagctatgcatacatttaagaaagattaatataaacaaggtcattctttacccaacttttggtgaatcagcgagtgacagtggtcgtgatgttggtggttcaatcaaggaataaatgtttgcaaagcgaacatcaatgtcctacctcctaccaccacacagttcaaaaaccaacaataaccaatgtggggggctcatatgactaatgccacatcgtttgctgtcatgcatctgtatgattattggatattttatgagtttaattctacaataatttgtatctattctttttctaatctactcattccagttcagggtcacaggtggttggagcctgtcctggcagcttagggcatgaggcagaagccagccctggacaggataccattccaccagaggagcactcacacacacacccacactcacactgggacaatgcagacgtaccattgaagtgaacatgcacatctttattgtgtgaaaggaaaccagagtaccaggagagagcccacgcagacacagggagaacacacagactccacacaggcaggggcccccgctgggagttgtttttttttttttaatcttgtcagcattataatgaaatgaaattgaggatcagttgtacatagaatgagacaatctgtggtcttttgtgactggcttctcctacttactataatgagttcaagtttcatccatatcatagcgtgtatcagcactccattcctttttatggctggataatactccattgtgaatatagacattttgtttatccattcatcagatgatggatgttctcggccttatgaataatgctgctatgaacatttgcagataagtttttgcatgaacatatgtttttaattctcttgggtctatacctaggtgtgaaattgctgagtcatatggtaattctgtgtttaactttttgaggaattgctaaactgttttgcaaagtaactgtacccttttacattcccatcagcagtgtatgagggttctaatttctccacatcctcactaacatatgtctgtcattttggttacagctgtcctagtgaatgtgaggtggtatcttattgtgattttttgggtttgttttgttctgtttttttgagacggaggcttgctctgtcacccaggctggagtgcagtgacatgatctcggctcactgcaacccccgcctcccaggttcaagcaattctcatgcctcagcctcttgagcagctggaattacaggcacacgccacaacacccggctaatttttgtatttgtagtagagacagggtttcaccattttgcccaggttggtctcaaactcctggcctcaagtgatccgcccacctcagcctcccaaagtgctgggattacaggtgtaagccaccacacccggcccttattgtgatttttatttgcattttgctaatcaaagatgatggtgagcatcttctgggggcttttggagaaatgaccaggaggggtttgcactctgtaacaccgagtgagtggaagcggcccacaataagaaaggctgaaggggcgggaagaaatctgagctctgtgatcctccagagcaagcctctgggacagggcccctcaggaggaagaactgcaggaaatgaaatcacagttgagctggatagggacgcaggaaaggaaggatgagatgtagaccaatgtggggaagaggaacaaagacaggaactcctgaaagccatctcccacgttttttaacaccacacagaaacaagggagagttctgagcttagactttcctgagcctttcttatcaggaaaactcatctcacctaaaaataacagaaaagtatttgaagtgaaattgcatacagttgttatataagaaacaagaatatgcaaaataacctccctgcggacaatgagagcacattagaaagacatgcccacataaccgagccaagctgtaacctgctatttcaaatcaagccaggtgacattctaacaatacaaaacaagagagaatagtgtaaatcaactttttaaaaatcagaaataaggtgacagaactcaggaaagaattagaattaaaaatcatttcagaagtaaagaaagactaagacgaaatgcaagtgtcgatgaacacagcagatcctgcctgaaaaggataaacagtgtgaaaaaggaaacatttcaagagcaaaaaaatgaagaggtaaaaaggttttgaccaaaagtaaagacaggcagaaaggtcagacatacgaataccaggagtccctggaaaggaaaacagaataccaaaaagtaatccagaaaactttcttaaaattaaaaaacaaagatttgaaacttgagattgagagatcataccccacacttaacaatatcagccgggcgcagtggctcagcctgtaatcccagcactttgggatgctgaggtgggcggatcacctgaagtcaggagtttaagaccagcctgaccaacatggttaaaccccgtctctactaaaaatacaaaaattagccagacgtggtggcgcacacctgtaatctcagctactcggaaggctgaggcaagagaattgcttgaacccgggagtcagaggttgcagagagccaagatcacgccattataatccagcctgggcgacaaagcaagacttgtctcaaaaaaaaaaaaaaaaaaaaatcaaggccaggcgtgatggctcagcctgtaatcctagcactttgggagatcgaggtgaactcctgtttgaggccaggagttcaagaccaacctggccaacatagtgagaccccgtctctaaaaaaaaaaaaaaaaaaaaattcaactcagcatcaccaacaaaaagatataattctagtaaaattattagactttaaagaaaattttggggggttctagagaaaaggaaccttgtgacttaaaggggaaagacaattagattattgtcagactcttcaatagtaaggattggtgcagaagaaaaaagaataacatgtttaaaatactccaggaaagaaagtgtgagccaaggatttataaccaggaaaattgactttgaagttcacacaaagacttatacacaaaaggttatagcagctttaatagccaaaaactggaaatagtccacatgtccatcaacaggtaaatgataagttgtgatatatccatactttggaaatactgcgagcaataaaaagaaatgactgcaataaaaagaaatgacttaacaaaataagatgaagaataaatttcaaaataattatgctgagtgaaaaaaagaagaaaaaggacacactgtgattccactgctgtaatatctaggaaatgcagctgagcaggcccatggtcaccacgattgggggctgcaggatggggagatggattaccaggggatccgaggaaacttttgggaatgatgggcatgttccttatcttgattgaggtgatgtgatgatcctacaggatatatttttgtcaaaattcaccaaatcatgcacttgatatgcagtttatgtcaattatactatatcaaagctgtttttaaaattagcttttgagtgtaaaggatatgaactattatcaatatgcaagaattcagggactatgtttctaggagcccttcctgagaaatctactagaggatacaagtcacacaactaaaatgactacaaagacttcagcataaatatatagttacttgtagagaactaagacgaaatgaggggttaaagggctgggcccagggcaggcacagtggctcacacctgtaatcccagcactttgggaggctgaggcaggcggatcacctgagctctgtagttcaagaccagcctggccttcatggcaaaaccccatgatgtggtttggctgcgcccccacccaaatctcattttgaatgcccatgtgttgcagggggtaaccagtgggagttgagtcatggtacgaaggctattccatgctgttctcacgacagtgaataagtctcacgagatctgatggttttatgaaggggagttcacctgcacaggctctctctccctttttgctgccatccatgtgagatgtcacttgctcctccttgccttctgccatgattgtgaggcctccccagctacatggagctgtaagtccattaaacctctcttttttttgtaaactgcccagtctcaggtatgtctttatcagcagcgtgaaaatggactaacacaccccgacgctactaaaaatacaaaaattagccaggcgtggtggcacacacctgcagtcccagctacacaggaggctgaggcaggagaatcacttgaacctgggaggtggaggttgcagtgagtcaaaatcgcgcctctgcactccatcctgggcaacagagccagactctgtctcaaaaaaaaaaaaaggcagtggctcacacctataatcccagtactttgggagtctgaggtgggaggatcacttgagcctacgaagtttgaggctgcagtgaaccatgatcttaccagcctgcactctagcctgggtgacagtgagaccctgtctcaattttaaaaaaaaaaaattgttaataataaataaagaggagaatcagtcatctttggaaagtgatagaaccagttcagaaagaatcaagcgtttatccagcctttcctttttgaccttgtattagtctgttttctcgctgctggcaaagacatacccaagactgagcaatttacaaaggaaagaggatggagaactcacagttccacgtagctggggaaacctcacagtcatggcagaaggcaaggaggaacaagtcacagcttacgtggatggcagcaggcaaaagagagagcttgtgcagaaaaactcccatttttaaaatcgtcagatctagcgagacttattcactatcatgagaacagcatgggaaagacttgcccctgtgatacaattacctcctaccaggtccctcccacaacacgtgggaattcaagatgagatttgagtagggacacagccaaaccatatcagacctctatccctgggtaactgaatagttaatgagaagaagtgtccctatctggagcattccatggaataaatgacaaagaaaggatggaattagagtatcaccattttacaagccccagtgaattaagagaggcctgagttattgacagctgttaatataagagacaatctaacgtgcctcctgatgagagaacgcaccagctctagtcttgccaaagggatcacacctgagtctgtccagtcttggctccagctgacagttttcaggaattcagaggaacatattgaactgcatatgaagcagcaaaacccagaccgagagactaggctctcttcagcagaaaaattgtaaggaaaaaaatcagaggaggaatctgcaaagtaggagatgtaaaaaacatccaaaaaaatgtttaatggacaagactaaactatagtatctaggggtgcacatttgggtgataaaatggggggaaaatgggttagaagttagggcagtggttacttatagtggaagagggagctgtgattaggaagggcataatgacagggcttttcaggcaggtggcagaatttttgtttcttgatctattactttataataaaagatttttcttaaaaaaaagctccaatgtaccattctttcatgtgtttagaaaatgtcctgtttcttaaacttgtgggagttcttaatttctacttttagcgcacactgcagaaaaatgcacacactgttgggatccttgagggagaattctgagcagtggaccccatgatgagtgcttcatgtcagccttcacacacactccagtcctgagaagcggaggggagagggacagcaggcttgggtctgcagaagcagtgttctcttgcaaggcagagtcaccatgtgtcccatctttacagattggctgcaatgccgtcagctgggcccctgctgttgtacctggaagcctcatagaccacccatcggggcagaaacccaattacatcaagaggtttgcatcaggtggctgtgacaacctcatcaagctgtggaagtaagtagggatgtgtggccttctctttgaggggacacttctaccctttaccctactcaccatgactcagccacactcacaagaaacaaggtcacctttctttctccctcctgccagtaaaatactgttttcaatctgttggaggacatccttgaaaaacaacacaacacctgttcacctaattcccaactgttggagctgactctttggctgtggaagcagagcattttctggagggtttttttttacagctggggtgaagggaataaaatgccacaaactccatgaatgaaagaagaaagatggaatcgcttctccaccccaggcagagcctgttgggttgggcaggagttgaggtgtgggaacggccccctgctgattctctttctgtccccactgttagggaggaggaggacggccagtggaaggaggagcagaagctagaagcgcacagtgactgggttcgagatgtggcctgggccccctccatcggcctgcccaccagcaccatcgccagctgctcccaggtcagcccagggccatgagtatcccttgtcatttagtctcgagtcaggcccatcagctcttagtctccttagcagaaagtcctctgggaaggtaaagggagagcaacaggcacctttggcccagagcacagggagtcaggtcattgtgtggggaagtcttggtcagaagccacaagtggcctgcctccactgagatgagacagctacaacagaaccggcaccaagaaggaggcggattcgggatgaattttcccttctgacccatgtgagactagggcgccgaggtgcccaggtgcagttccaagtgttcccaagcaacgatggggttggatgggaattatacgcttagctaccaagccacccttcccagacagcaaggacggccaagggtgagccttcagttatacaccaccaccctagagggagccagctaggcctttcacatcatgggaacctgtttggtttggttctaaacttgggatttttgtgcttttttacttgtgccttctcattcttggagcttggtttttggagagctctgcccattcagttgagaaggtatagacggccagtggaagtgacttggcaggcatgaggaaaaccccagagaaaatctgagttagcaatgcagacagagtccacctccgaaacccggatgagaaaaggaatccgggagactcttaaccagtgtgaagagacagaaacaaagctgtggacgccccagaggtcctcggctcctctttgaatcccccaccctgttcctgcagagaggtgccgggtggctctagactgggaagacatcacatcacaaacgcaggagtcttgactccacctcctgactctatcctgtttcttcctaggatggtcgtgtgttcatttggacctgtgatgatgcctcaagcaatacgtggtcccctaaattgttgcacaagttcaacgatgtggtgtggcatgtgagctggtccatcacagccaacatcctggctgtctctggtggagacaataaggtacatacccattccccgtggcatggtggacacagcctgttggtcttcaccccgcccactagagagggcacttgacattcccatctgactgcaggctgggcaggagccttagccaggactgcgttttgagtgtgcctcttagttacatcattaatgtcacagcccctgaggtagtattaacacgtccccctttcacagatgaggaaagaagctgacagaggcgatttgacttgcatgggggtcccaaaactatgaggtggcagagccagtcaggcccatcaccctactaagcatttggtcacctcatggtgatgttcagttagctgtgccaaaaaggcaagtgtataagaacccataaacagaagaagattggggatattttttgtccataacactgaaaaggctttttaaaaacctttagagtttatgaatacttgttatgctggtaagaggcaggtacacagtgggtgcactggaagagtttgcattttgcagctgaaagagttctggagaccagctgctcagggacccaaatgtacttcacacaactggactgtgcagttaaaagtggccaaggtcattttatgtgacgtgtattttacaattagaaggaaaaaagctacccgcagaaaggaagcagtaacaagccatagccatctgcccagctgaattcccctataagacagaggatctctaacgccgcagggtcagttccacgtggagtggctgtgctgcgttttcaggcacatctgctctgcgcctgaagtgcgagttggtctggatcctgccagcccttgctgcttctctcccttgcctatgttggtcttttactgtttcccagtggccactttggctccatgtcttacctttcatttgtgtggctcacggcacaaccaacacaggcaaggcagagaagcagctggtctccagaactcttttcagctgcaaaattgaaactctgtacccattaaataactcccttccccattgcccctccccagccctggcagccacccttctcctttctgtctatgtgaatgtgactgctctagcggcctaatctaagtggaatcaaacagtatttgtcctttgcggactatgtcacaagcagtatgcccttaaggttcctcccatgctgtacgtagcatgtgtcagaattccctccctttgtaaagctaagtagtgttgcattgtatagacagcccacaccctgtttctacacttattcctccaccaaagggcacctgggctgctgccaccttcttagctattgcgaatagtgtggctgtgaacatgggtgtgcagatcttgagagcctctgcaggcggcttttctggccgagggtccctttcatctacagtggtcccagaaagatctagcaggccccctctcaaagccatatttctagtgagtgccagagtcaggaccagaacccaggttgatggcactcagggcagaccaagggacccagattgcctcaagcaggcccccagtgacttttttacaaggctgtaagcaagtgcctggctgtgcacgcagtgttgtggggcccgtcactgtgcatttaggcttcttgctcttctttacaagcctgtttcctttcgctgtctccatagcacccttacctaaaggacttagtatgttttcaatcccagagcattctgcagtgtgttgagtgaatagtttgtccctaaagcaagagttcttaaaatcaaaatcgttattttcatttttaatcaaactaatatatgtacataggtttagattgtttttgttttttgttttgttttttgagatcgagtctcgctctgtcgtccaggctggagtgcagtggcgcagtctcggctcactgcaacctccgcctcctgggttcaagcgattctcctgcctcagcctccccagtagctgggagattacaggtggctgctagtttttttgtgtgtatttttagtagagatgagatggggtttcaccagttcaggctggtcgcgaactcctggcctcaggtgatccacccatctcagcctcccaaagtgctgagattacaggcgtgagccaccatgcccgacctagactgattttttttaatgcagcctcctaattttctctccaggggcaaaccttttcagctcttagctatttcttatacagtttacttcagtgtagaaacaacatattgaactgttaccttcctctaccacagtagttttcaaactgcagtgttgttaaacctgttaaaacagattgccagccccacccccagagcttcctaatcagttgttccaggccccaagaatctgcagttgtagcaagctcccaggtgaccgatgctctgctctggtctggggaccacactttgcgaaccctgctccccgccaccccatatcctctcgctgtagctctgtcacagtttgctgaaaacagtatcctgtgttgacatcatcatccacagctgctgttattgttacttctttttttctgtgagtttttattcctggactctcattttggtgagatttcagtggaggagggacatgctctgttcacccacaagcctctgggcagtggttcttgatgaggatgaggctcatatttaggggacagcagagggaagggcacagacccgtgataatctgcttgtgcactgactcgcaggtgaccctgtggaaggagtcagttgatgggcagtgggtgtgcatcagtgatgtcaacaagggccagggctccgtatcagcatcagtgacagagggccagcagaacgagcagtgacaagacaggtggggcctggctccccacccgccagctccaggactgccccttcctgggccaactaaccagacaactgggaagagcccccaactccaacaggattattttcccaggaggagttacagatgcagccacagattgatcatctgccttaacgtgatcggagatgctttgtaatctactgtccagctgaaagcactcatgttacgaggaagaaactacaagtgatgttcaaatctattttgggtcatttttatgtacctttgggttcaggcattatttggggggttttgtttccaaaggaactaaataaagtcatattgcttataattcctgctgcgttatcctaaccaccccaccccaccagctcagtttgactcttgtcggtccacgcactagaacaaactattcacaaaggccacggctgtgatggcctggcttaaccccacgcacaaaggtggcttgtcactgcatgagcatctctgattcagtttatactgaaagcaccatacagagcactggactcagcctttggtgacaaggactgtagccctgggtctgctacttaccctctcggtacacatcctgttctgcagaatgggactaatacagtctgccctacaggatggctgcaagattcaaacacgctagtgcatctggtgacctacaaaatgccacgcagatgcaacgtggtattaaccaaacaccaatagttaagatgctggcccagaaagtgggcacgattcatttagtttattgaccctgtcaggaaaaggagggccccatgatgggagacctaactgaccctgaaccaggtatcacctttcagcggaggccctgtgaccctgacaatcgccatagccatcagtgagcctgcggtgagccagaccctacactggatctttcacacattcgctaatttaagcaacacgagaaccccgtgtgggtgtacccagttcactgatgaggaagcgctcagaaggtagaagccctgcccaggactgtgcaaacgtaaagccagcgtcagggcctggcccatctcaacagttactccccactgtagaatcagggtgggagctggggggctctcctcagctgtaatacaagggtgtttctcacaccaaacctttgtatgaatagattcagataaaaggtcagcccacttgcctcaggccccctagtctgcctacttcttgtccttccctcctttttcagcagcaaaatcccctttaaaaaaaaaaaaaatctttgatcatactatgtaacatagaagaaagtgaaactgctttggttaaaggtgaggacagagaggccatggcctggcccagtcagcctccagtcagtccacaaagcccaagccttctgagaccaacatgaaaacagctgcttccttccttcccttactcagaaaagcaaagcccaggaaggcaccttcacgtgcactactgagtgtcgagttctacagtgaatccttgaaccatatccacgtctgcctccctgatacgctctgtgctcctcaagcctgggcctgggcttcctatggtgccagctgctgtcgccaagaaaataccgagaaggaactagtcccgtgtcactctgggttggtggtaggttaatgggtccctgactgtgtgctctattttaactcccaccaccaaggattggttaagataattatgaagttggcaccataatagttgtttatacttagagtggcaacacattaaccattcctgggtaagaggagaccccaaaatttattaccacaaaatagcctagtcaaatagaaatactatctgtaaaacttgccgggcagttgtcaagcccaaatgagataaaagtaagggaaatttaaaaggcatagagctctggttagggccagatggcgctagcagccatatgtttttaatccttttgcaaaaacaaagcaactgggacagcaaaagaaacccacagaccctagaacatggagcaggccaaagccttcatagacacaatacctctgagagatcagcagggtgaagaaaagggagtttttatggtgctataagccagagaccccaaaaattgccatcaaatactcatccattctgagtgcaaaactcagcaagccactgtgaaaacaactcccaaaactagaagattcacaggcttccatttacaagtgagcccagaaacactaaggggagaccttccacttctgcatataaaggattaacgattgtaagaatttcccagccaacatggtggctcacaactgtaatcccacacttcgaaaggccaagacgggcggaatgtttgagcccagaaattcaagaccagcctgccaacatggcaaaaccccatctctactaaaaatacaaaaattaggtgcagtggtgtgtgcctctgtagtgccagctactcaggaggctgaggcacaagaatcgcttgagcccaggaggtggaggttgcagtgagccgagattgcaccactgcactccagcctgggcaagagagtgagactctgtctaaaaaaaaaaaaatttccctggctgggcgcagtggccagcactttggaaggttgagggaggaggatctcttgagcccaggagtttgagatcagcctgggcaacacagcaagagcctgtctctttaataataaataagaatttccctcacactatagacaactaggaaattaattcaagatggattaaagacttaaacgttagacctaaaaccataaaaaccctagaagaaaacctaggcattaccattcaggacataggcatgggcaaggacttcatgtctaaaacaccaaaagcaatggcaacaaaagccagaattgacaaatgggatctaattaaactaaagagcttctgcacagcaaaagaaactaccatcagagtgaacaggcaacctacaaaatgggagaaaatttttgcaacctactcatctgacaaagggctaatatccagaatctacaaagaactcaaacaaatttacaagaaaaaaacaaccccatcaaaaagtgggcaaaggatatgaacagacacttctcaaaagaagacatttatgcagccaaaaaacacatgaaaaaatgctcatcatcactggccatcagagaaatgcaaatcaaaaccacaatgagataccatctcacaccagttagaatggcaatcattaaaaagtcaggaaacaacaggtgctggagaggatgtggagaaataggaacacttttacactgttggtgggactgtaaactagttcaaccattgtggaagtcagtgtggcgattcctcagggatctagaactagaaataccatttgacccagccatcccattactgggtatatacccaaaggactataaatcatgctgctataaagacacatgcacacgtatgtttaccgcggcactattcacaatagcaaagacttggaaccaacccaaatgtccaacaatgatagactggattaagaaaatgtggcacatatacaccatggaatactatgcagccataaaaaatgatgagttcatgtcctttgtagggacatggatgaaattggaaatcatcattctcagtaaactatcgcaagaacaaaaaaccaaacaccgcatattctcactcatagatgggaattgaacaatgagaacacatggacacaggaaggggaacatcacactctggggactgttgtggggggaggggacgggggagggatagcattaggagatatacctaatgctaaatgacgagttaatgggtgcagcacaccagcatgtcacatgtatacatatgtaactaacccacatattgtgcgcatgtaccctaaaacttaaagtataacaataataaaataaaaaaataaaataaaataaaataataaatttaaaaaaaaaacaacaactaggaaatcatgaaaagtacatgaaacaactactgctttcagacataggacaacaggcagtgtttgggaaaagggaaacaggtaagcacaacaaatgcaccaggttactactacccagaagcagtttctgggccaaaaggtaaagagagactccagagtctagtagtctccaggagttgaagagacagaagtcagagttcaggaagaccaaggcaggccgggcgcggtggctcacgcttgtaatcccagcactttgggaggccaaggcgggcagatcacctgagatcaagagttcgagaccagcctggccaacatggtgaaaccctgtctctactaaaaatacaaaaattagccgggcgtggtgttgcacccctgtaatcccaactactcgggaggctgaggcaggagaattgcttgaaccagggaggcggaggttgcagtgagcaaagattacaccactgcactctgccctgggcgaaagagcaaggctctgtctcaaaaaacaaacaaacaaacaaaaaagaccaaggcagaactgaaggcagaagaggacgagaggaggaagctgcacagagcaagctcctgagagctgaagagtctcctggagtctttggacaagtactaaccttcatatatgaagggtgaaaccaatagaccaagcagctggagctcacataggggtgggaatagcccatgttcccagcaaccagaaaaaaaagagacattccatccagaagaacaaatataagagtggcagcaggccaggcgccgtggctcacgcctataatcccaacactttggaaggctgaggcgggtggatcacgaggtcagaagtccgagatcagcctgaccaagatggtgaaaccccatccctactaaaattagccagacatggtggtaggggcctgtaatcccagctactcgggaggctgaggcaggagaattgcttgaacccgggaggtggaggttgcagtgagccgaaatcacgccactgcaccccagcctgggcgacagagcaagactctgtctcaaaaaaaaaaaaaaaaaaaaaggagcagcagccaacttctcatcagaaagtaggcaaaccataagaaaattaacatctttaaagtactgaaaaaattaaaaaaaaaaaaacctgtcagcctcaaattctatacctagtgaaaatatatatatattttaatacagactctttcaaataaaagctgaaagaattaatcaccagcagagctgccattacaagaaatgtcaaagaagtttccttcaggcagaaggaaaatactagatgaaaaacaggctgggcacagcggctcacacctgtaatcccagcactttgggatgctgaggcagcaggattgcttaagcccaggagtgtgaggccagcctgaccgacatggtgagaccttgtctctacaaaaaaaaatacaaaaattaggatttacaaatacgacttcaggcccagcgcggtggctcatgcctgtgatcccagcactttgggaggccaaggcagatggatcacttgaggtcaggagttcaagaccagcctggccaacatggcaaaaccccatctttagcaaaaatacaaaaattagctgggtgtggtggcgcatgcctgtagtcccagctattcaggaggctgaggcaggagaattgcttgaacccaggaggtatgggttgcagtgagccaagatcacgccactgcactctaacctggacaacagagcaagactccatctcaaaaaaaaaaaaaaaaaaaaaaaaaaaacaaa

SEQ ID NO: 8307 - DNA, 25574 bp, Homo sapiens
gcgcgttgctgcccggaggctcctacgccacggcccgtcgggcccggcgccggaagtgagctgttccgaggcgccgccgggagctgccacgtccgagacctggagcagccaccgccgcaatcatggtgagtgttggtactgaggaggcctagcagggtgaaggccacggtcgcggccttcacgggttcctcggccgtcctgagtcccaaatcccaagctggagccgttcagctcccctccaccgcttagagatttggggggctctggccccgtccttgcggaccattccgaggggagtccagaggtgaggccgaggaacctccctgactttgcggggcgcgccgctcctgcgtctcctgccagtctcccttccttcttttcggtcaacaattgaaaacaaaacgaggaacagcagaggagctactgtataccgagccctcagcattgttcgtaatctccgcctgctaacagccttgtgaagaaggtgctattcttctcaacactttacagatgaggacacttgaggttcggagacgtggagcctcttgcacagctgcttaagtggtagtagagccgagatttgaaccctcctaaccattcctttctgccgcctactgcagctcccagcagagatgattgaactgttgctcggggtagggcccccaggtaggatgggcacctcgggaaacgtaaagatggcctgaacgaccctccgaaggcaggggctcagggttttttaagtctctgtggcatctgcagtgtacattcactccacacttactccttgagtgaatgaatgactgaaggagaactaaagaatggaagtatctgggctgagcctggaatatctagtacatgcattcttttagaaacatgggtgtgtctcagcagcaggtttgagggaacctgcaggaacctagaaatcagaacactgtgttcttgttctgcagagggttaggtgtaaatcactcacctctggctcttccactgcaggttagagttgaggcttttatgctctgacattcagctcatcctaaatgaatttttaactcattatctgatctcaaagaggtgaattattttgagtgcaggtgttaacagggaccagataataccaggtccctgggaagaagtactctaagaagttctctctctctctctccccaccctccctctctccccactccctctccctccccccttcctctccctctccctttctctctctccccctccctctcttctctctctctctccccgctccctcttcctccccccttcctctccctctccctttctctcccgcccttcctccttccttccgtccttttctctccccctccctctttcctcccccccccccccccccccccgccttctctctctctctctctctctctctctctctcattcagaagtgtggttcatcaaccctgactggtgggtgagagtggttagaattaaatgctgattatttctaaggtcctttggtaacctggttgaaactacctctcagtaaactttcttcgtgaacctacttaaccgcagctttacagaactcagtgtaacaactgctttacattctagacaggcagcctggtggagtgaagttttgtggactcagcattagaaggttaggggatggggctcttttcccaggtctgccttgaactagctctgtgactttggcaagtgctttctcttctctgggcttcttcatttccttagtctgtcgcaggtctctgattgactgtgcccttggtaccctgccctccccgccttcctgtgcactttgtaacctatacagctcggcacatggaggaaactccttattgtccttacttgcctttgcagacttcggggacctggtttttagagagtctagaatctgatgagagaacctgtgcttacttggtgtgtacctcttgaactgctttgcagccatcctcttccactgtctgcctttctgaaatcacaagtcaaactttatacctacagggcttgtgctggaaaagatgaaatggggaaaatggtaagaaatgtctgttccacactgaaacttcttttaagtcctcttttctatcccaagaatttaagagaagagtggttgagcaaagaaaaaaaataacagcttttgttcatttacttattcattcagcaaatagtcgctgagttccttctatttgcaaagcactgtgctggatgatttgaggggatttgaaactgcagatggctcagaccatggctccaaggagctcaccttctagtggggagaagaaacagcataaagtgttgtatgtgttccttgctgaagatatgcaagagagtccagccatttgagggtctgagaatcttcaagaaaggtgatggatggccctttttgagctggacctcaaagaatagataggagggagatgaccatgacaccatgttccagccctacaaactgttcaactctggatcccactacgtgacggaccagggagcagcctcaggaaacactcgaatcaagtctcccagtctgaagtaataaccccgttatgcataaactgcctggaacatcagaggctctgtcatccaggaaaggaacaccagctgtagctcccttggggtctctcctcaaccttaagggtagccaggactgcttgccatttccccacacacatcaggctctctcagacctctttgtctctactcgtgtattccctctgcttggctgcttggactggtattttcccctgtgccacctgcaaattcctacccatcatctagggctcaattcgtgtctaccaccccagcccctcaggctcctacaggacacacaaaccaccattaaataatttattttgcgacactagcattattcgcgagcttctcaagggcaaaaagttcctcttatttgtgtctgtatatccagttcctagcacagtgcttggcagaaagaaggtacttagaatgaatgcttactgaatgaatgaatgaatgagtgagtgaacaaacaaatgcagtcaagaacttgagatggttgtattctaactgccatgagttaatttaccagtgatatctttggttctaggtgtcagtaattaacactgtggatacctcccatgaggacatgattgtaagtattaatatcaccctccctggaggggtgtggacatgggcatttttgtgggagggaagcaatttggggttttcattacccctttctgttgatcattcatggatccagggtggctttgcagtggttgcctatcagcctgtaatctcggggtatggcaggctccctagcagtgccctctgagttgtcaggactgtggcagtctaatcactctctgctgggaggaacctgggaataatttgtagttctaggctgtcagtcttccagccaatacaataacctgctctcggatgaaggctgagtgggtacggaggcttgacaatagtcttcccacctgtcttcctcctgctgtcacttcttagccccactggaaaggggggtgaaaagaagagagtgtagaaagatgactcaatacaaaggcagagggcagccacagtgaaagccccaggcagagcccagtcaaaccaccaagacaataggccaaacaaggccctttgaaccagaagtccacactcagggcatttcctgagaggtaaacacaaggctcagtataagaggacagggctgcaggagaaggtccagaggttaaagtctaccgcaggaaaaacacagactctgcttcattcagggccaagcagcctttgagcaagacccaggacagctggctgacagtgtttcatgtcagggttcttgccctcacaacctgtccaccaacagttgcttttgggtttctgagaggttgtctggtcccagagttgtatatgttctctggattcagtcatgagtggtctagctgtaagaccacacctccttggagatagcatggaatcatgggcaggaagacccagtctgagactccctagccaatatcttaacttttctgagccagcctcaatttacttacgggaaaaataatggatatgctacctactcgtatgagtttggtttgagaactagatgaggccaagtagtaatgacaaacatttgcatgctcactgagtgtcaggccccatgctaagtacttttctttttttttttttttttttttgagatggagtttcgctcttgtagcccaggctggcatgcagtggcgtgatctcagctcaccgcaacctacgcctcccgggttcaagtaattctcctgccccagactcccgagtagctgggattacaggcgtgcgccaccactcccagctaattttgtatttttagtagaggcaagttttctccatgttggtcaggctagtctcgaactcccgacctcaggtgatccgcccgcctcagcttcccaaagtgctgggattacaggcgtgagttttcattcaatatcttgtttaaccttcataacaactgttgagacagatgctatctttagccttatttaaagataagggaactaaggcccataggatgttggtaaataataaagataaggaaactgaagctcaaggagatgaagtgttttcaaagtttgcacagcaggtaaactaaggagataggatttagatctgaaaggtactatgtcctgcctccttccactgagaagcatgagaagtgcttcagaaacactcctctactgcctgccctccaagaaaccaaggcctgatacagtggagggagttcccaaagaaaaatcaggatgtgttccttgcgtagggaggtgagaattcccatctgagccagacagaatgagtgcctttgaatgggcataattgcccctggtggccatgggagtgcagctgatagtcctgaaactcccagggtgggacagctggggaaagggacatccattggaataggcagggccagcaagcagaagggaccagggtgttcagtggtgcaggaggcatggtgcctcagagaccatcaccctgcggacaaggatctgcaggtaggggccaggcctagttctgcatgctcagtcagcatcaaggaattcggttcacaagtggtgagagcagcgacacttaaggcattgtgttccttgggtggaaagtctgggaagctctgggcacactactagggaaaaggtcgagcagaagccccaaaacaaaggtccacaaaggatccagggccagggctggaaagagcccaaatatctgaatggaaccctgtgtgcaggccagagctgcatcacagaagacctgactggggactccaggcagtcagaggcccactcctttggcctgctcccatgcattagcatcaggtgctagggctgagctgaacccaggggtattcccctttagcccacagagcctaagaactgaatagggcctgagaggatggaggaagaagagggcagctaggccaactttttttctcccatacccaccctgcggaacaggaatggaagagcccttccctgaggtatgtaaagggtctgtgacaccagctgggcatggcttgctttgtccatttcagagagacactgcccataggtgaagtgagaatgtccacatgctagcttcctgcctgagggtgatgatactttgagatcagattgatttcagggagattctggtccaaactagactctgtgtagtgacagccctcaccccacccacccacccacccagcctgcaggcttcccgagctgtcctccctttgcagcacgacgcccagatggactactatggcacccgcctggcaacctgctcatcagacaggtccgtcaaaatctttgatgtgcgcaatggagggcagatccttatcgccgacctcagggggtaagtgctggcgagcccagggaagggctccaggaatggtgtgggttctcaggccctgcttcaagcgtgggagcaaagcatgggagcccagattcagagcaaccccaaagcacatttagcggagaggacgctgggatcccagccagcctggctgtcctcagcggacgtccccagggatgatgctgttaagggcacaggtggatacaggtgtgaatctcagctctgccactttatgtgtacccactagaagaccttgggcaagtgtctcagtttctctctcagagccttcatctgctcatcctcaaaattgggccaatgctacctcctatccagctagtgtatgcaaggccctgacacagggcccaggacacagtaagtctttagtgcaggcagctactgctacttttaaaagtggtaaacagtaccatttcgttcaagtttagccagtatgacctaaagtgtcacaaaagcatcaccgtaagaataatgtaagaatgctatcattttataaatcccattgttctgcctatatgcccgtggcacgtgttcagtgattatttacaaatgtttgacctgccctgctccctactgagattcttgaggaagtcctggctcatttttatggccacatctctactgctttccctcagctcactgcctttcacgtatttgtgggtttgcctgggtgccatggatctccaagggttctgtgaatagagttcaggggttgatgaattgggacagggggaaaaaaatgcattttcagtgactctgatatttagcatttccttcaattatggatgtaggccagaaacttcagtagtatttgtagtgcctgtcactttgtcaccagtagaattcacagatattgtcatcacacatcacggttacttagctacctcaaaataccacttatgctcatcacaactttgaaattacagtggttattagacctgccgctagggtttgttgcttgaagtgttaacaaagaagtacatgcatcactatctcataaattgctttataatattttgataacaggctgggcaaggtggctcacgcctgtaatccttaacactttgggaggctgaggtgggaggatggcctgagcctaggagtttgaggctgcagtgagccacgatggtgccactgcactgcagcctggatgacagggtgaaacccttctcaaaaaaaaaaagttgattactgtataatttataattgaattttctttataagcctagttctgtgtgttttgtacattagtctgatgagggtccataaccttccccagaatgcacagaaaagattaagagccatgacaggtgggtgctcagcatgtgtttgttcactgaattaaaaagcataaactaagtcagtgtccatttggggaaatgggcctagaagctcccctctgtctcagtgtcaaatgatcaagtgactgaggagccaaatcaagcttctctatgcaggagccccccaggcaggcagagagctgctgcagtgcagcgtgttggccaaggcagttatgtttgctgtgactctgtcctttctgctgtttttcttacattcaaaggatgtgaaatattggagggataaaaaaaattcccaccccattcttttttccccttagtaaaaactgtgctagttgttggaagattgagtctactcagtttcattagcagcagctttgtagggactgggaatgtcctgttgtcccagccagagggaggaggagacttgagtgtgtgcagcccacggtgaaggagtaaaccaggagcagcactaatagctaatgggtattgagtggcttttttctttccttctaccaagcattgttccaaactttatgaaagaattcttattgatgtctccattttcaggtaaagagacaaagatatccttgcctaaagtcaagagctagtgaatgggagaatgggtctggtctcctaaccactaactctaccatgctactctacctcttgagtgctaaggtgcaaaaccttccctgggccagagaaatggtcaccgtacaaagcctggcacagagcatgtgctcagatagcacctgttatcaggtgaatggataaagatcagaagagaagggaaagacatgcctttcgaacaaattaaaagagtagtggaaaacatcaaaatgaaaccaataatgcctcctcaggaagctgaccgtcgggaaggatgaatagcaattcagtctacaaatatttcctgaacacttctggctggaaaccttggaccaattaatgactatgctgtagacagcacatacagacagtgctggctgcagtctgggcaagtgaggctcctgcctggccaggacaggaaggctgacccagaggctcaactctctctcaaaggctctgtgaccttaggttgcttaacctcttaggacctcaggctcctcactgtccactgagcaccccttttgcaatggcattgtatagttctccctttgaagttcttaagcaattctgccctgatatatcgtctcagggagccatttagttctgtccaaagtagtgcctgcagaggcactgtgggttcctctggcctatctctccctttgtagtcatgagggtcctgtgtggcaagtggcctgggctcaccccatgtacggcaacatcctggcatcgtgctcctatgaccggaaagtcattatctggagagaggaaaacggcacctgggagaagagccacgagcatgcgggacacgactcctcaggtatgctgagcttggcagcagagcgggcaaggggaccactgggtaaaaaaggactctgtcccggctggagccctggctccctgcccctcgtggtgcctcttgtctgtctcttgagctttggttggcttttctgctactctgtcctcagctgagtaaggccctaagacctaaagccagtccaaagcaaataagaaaagacaggtgagtttctcttcaggattattcattgcaaggactacccttcattctcagattgttttcctacccacttttttgttagatagactgtaggttatgaaatcgtggtattagtaggtgatggggtttttttgtgtcctcagttgaccaagttacagcttcccccggtgactcctacagttgtttgttgtagacatttagtaaaacagtaaatctgtggaaggcgggacctggggccgcggtctccctgctttgctcactgcactctccctcttcccgcagtgaactcggtgtgctgggccccccatgactacggcctgatcctggcctgtgggagctcggatggggccatctccctgctgacttacaccggggaaggccaatgggaagtaaagaagatcaacaacgctcacaccgtgagtccatcccctgcctttcatgcagtgagagcgcctgccttgccccgtgtctgctgcagcctccctagagggtggcacgggagggtccccgctgggcagtgggccggggagtggtcagctgaccagacatgattgctctagagcagctttgagcctctctgccctgaagccagaccaggcagggcttggcactgcttccttgttgtgtgctcccaagcaggggagggctggtgcagcagcagcctgctcactgccaccttagctatggttgcctccaggtgacatgccctgcagtagtcattgggaccctgtagaatggagtggtgttattaaaacttttaaaaagtatgtgagctatgcatacatttaagaaagattaatataaacaaggtcattctttacccaacttttggtgaatcagcgagtgacagtggtcgtgatgttggtggttcaatcaaggaataaatgtttgcaaagcgaacatcaatgtcctacctcctaccaccacacagttcaaaaaccaacaataaccaatgtggggggctcatatgactaatgccacatcgtttgctgtcatgcatctgtatgattattggatattttatgagtttaattctacaataatttgtatctattctttttctaatctactcattccagttcagggtcacaggtggttggagcctgtcctggcagcttagggcatgaggcagaagccagccctggacaggataccattccaccagaggagcactcacacacacacccacactcacactgggacaatgcagacgtaccattgaagtgaacatgcacatctttattgtgtgaaaggaaaccagagtaccaggagagagcccacgcagacacagggagaacacacagactccacacaggcaggggcccccgctgggagttgtttttttttttttaatcttgtcagcattataatgaaatgaaattgaggatcagttgtacatagaatgagacaatctgtggtcttttgtgactggcttctcctacttactataatgagttcaagtttcatccatatcatagcgtgtatcagcactccattcctttttatggctggataatactccattgtgaatatagacattttgtttatccattcatcagatgatggatgttctcggccttatgaataatgctgctatgaacatttgcagataagtttttgcatgaacatatgtttttaattctcttgggtctatacctaggtgtgaaattgctgagtcatatggtaattctgtgtttaactttttgaggaattgctaaactgttttgcaaagtaactgtacccttttacattcccatcagcagtgtatgagggttctaatttctccacatcctcactaacatatgtctgtcattttggttacagctgtcctagtgaatgtgaggtggtatcttattgtgattttttgggtttgttttgttctgtttttttgagacggaggcttgctctgtcacccaggctggagtgcagtgacatgatctcggctcactgcaacccccgcctcccaggttcaagcaattctcatgcctcagcctcttgagcagctggaattacaggcacacgccacaacacccggctaatttttgtatttgtagtagagacagggtttcaccattttgcccaggttggtctcaaactcctggcctcaagtgatccgcccacctcagcctcccaaagtgctgggattacaggtgtaagccaccacacccggcccttattgtgatttttatttgcattttgctaatcaaagatgatggtgagcatcttctgggggcttttggagaaatgaccaggaggggtttgcactctgtaacaccgagtgagtggaagcggcccacaataagaaaggctgaaggggcgggaagaaatctgagctctgtgatcctccagagcaagcctctgggacagggcccctcaggaggaagaactgcaggaaatgaaatcacagttgagctggatagggacacaggaaaggaaggatgagatgtagaccaatgtggggaagaggaacaaagacaggaactcctgaaagccatctcccacgttttttaacaccacacagaaacaagggagagttctgagcttagactttcctgagcctttcttatcaggaaaactcatctcacctaaaaataacagaaaagtatttgaagtgaaattgcatacagttgttatataagaaacaagaatatgcaaaataacctccctgcggacaatgagagcacattagaaagacatgcccacataaccgagccaagctgtaacctgctatttcaaatcaagccaggtgacattctaacaatacaaaacaagagagaatagtgtaaatcaactttttaaaaatcagaaataaggtgacagaactcaggaaagaattagaattaaaaatcatttcagaagtaaagaaagactaagacgaaatgcaagtgtcgatgaacacagcagatcctgcctgaaaaggataaacagtgtgaaaaaggaaacatttcaagagcaaaaaaatgaagaggtaaaaaggttttgaccaaaagtaaagacaggcagaaaggtcagacatacgaataccaggagtccctggaaaggaaaacagaataccaaaaagtaatccagaaaactttcttaaaattaaaaaacaaagatttgaaacttgagattgagagatcataccccacacttaacaatatcagccgggcgcagtggctcagcctgtaatcccagcactttgggatgctgaggtgggcggatcacctgaagtcaggagtttaagaccagcctgaccaacatggcgaaaccccgtctctactaaaaatacaaaaattagccagacgtggtggcgcacacctgtaatctcagctactcggaaggctgaggcaagagaattgcttgaacccgggagtcagaggttgcagagagccaagatcacgccattataatccagcctgggcgacaaagcaagacttgtctcaaaaaaaaaaaaaaaaaaaaatcaaggccaggcgtgatggctcagcctgtaatcctagcactttgggagatcgaggtgaactcctgtttgaggccaggagttcaagaccaacctggccaacatagtgagaccccgtctctaaaaaaaaaaaaaaaaaaaaattcaactcagcatcaccaacaaaaagatataattctagtaaaattattagactttaaagaaaattttggggggttctagagaaaaggaaccttgtgacttaaaggggaaagacaattagattattgtcagactcttcaatagtaaggattggtgcagaagaaaaaagaataacatgtttaaaatactccaggaaagaaagtgtgagccaaggatttataaccaggaaaattgactttgaagttcacacaaagacttatacacaaaaggttatagcagctttaatagccaaaaactggaaatagtccacatgtccatcaacaggtaaatgataagttgtgatatatccatactttggaaatactgcgagcaataaaaagaaatgactgcaataaaaagaaatgacttaacaaaataagatgaagaataaatttcaaaataattatgctgagtgaaaaaaagaagaaaaaggacacactgtgattccactgctgtaatatctaggaaatgcagctgagcaggcccatggtcaccacgattgggggctgcaggatggggagatggattaccaggggatccgaggaaacttttgggaatgatgggcatgttccttatcttgattgaggtgatgtgatgatcctacaggatatatttttgtcaaaattcaccaaatcatgcacttgatatgcagtttatgtcaattatactatatcaaagctgtttttaaaattagcttttgagtgtaaaggatatgaactattatcaatatgcaagaattcagggactattgtttctaggagcccttcctgagaaatctactagaggatacaagtcacacaactaaaatgactacaaagacttcagcataaatatatagttacttgtagagaactaagacgaaatgagggttaaaaggctgggcccagggcaggcacagtggctcacacctgtaatcccagcactttgggaggctgaggcaggcggatcacctgagctcaggagttcaagaccagcctggccaacatggcaaaaccccatgatgtggtttggctgtgtccccacccaaatctcattttgaatgcccatgtgttgtagggggtaaccagtgggagttgagtcatgggaggaggtcttttccatgctgttctcttgatagtgaataagtctcacaagatctgatggttttatgaaggggagttcacctgcacaggctctctctccctttttgctgccatccatgtgagatgtcacttgctcctccttgccttctgccatgattgtgaggcctccccagctacatggagctgtaagtccattaaacctctcttttttttgtaaactgcccagtctcaggtatgtctttatcagcagcgtgaaaatggactaacacaccccgacgctactaaaaatacaaaaattagccaggcgtggtggcacacacctgcagtcccagctacacaggaggctgaggcaggagaatcacttgaacctgggaggtggaggttgcagtgagtcaaaatcgcgcctctgcactccatcctgggcaacagagccagactctgtctcaaaaaaaaaaaaaggcagtggctcacacctataatcccagtactttgggagtctgaggtgggaggatcacttgagcctacgaagtttgaggctgcagtgaaccatgatcttaccagcctgcactctagcctgggtgacagtgagaccctgtctcaattttaaaaaaaaaaaattgttaataataaataaagaggagaatcagtcatctttggaaagtgatagaaccagttcagaaagaatcaagcgtttatccagcctttcctttttgaccttgtattagtctgttttctcgctgctggcaaagacatacccaagactgagcaatttacaaaggaaagaggatggagaactcacagttccacgtagctggggaaacctcacagtcatggcagaaggcaaggaggaacaagtcacagcttacgtggatggcagcaggcaaaagagagagcttgtgcagaaaaactcccatttttaaaatcgtcagatctagcgagacttattcactatcatgagaacagcatgggaaagacttgcccctgtgatacaattacctcctaccaggtccctcccacaacacgtgggaattcaagatgagatttgagtagggacacagccaaaccatatcagacctctatccctgggtaactgaatagttaatgagaagaagtgtccctatctggagcattccatggaataaatgacaaagaaaggatggaattagagtatcaccattttacaagccccagtgaattaagagaggcctgagttattgacagctgttaatataagagacaatctaacgtgcctcctgatgagagaacgcaccagctctagtcttgccaaagggatcacacctgagtctgtccagtcttggctccagctgacagttttcaggaattcagaggaacatattgaactgcatatgaagcagcaaaacccagaccgagagactaggctctcttcagcagaaaaattgtaaggaaaaaaatcagaggaggaatctgcaaagtaggagatgtaaaaaacatccaaaaaaatgtttaatggacaagactaaactatagtatctaggggtgcacatttgggtgataaaatggggggaaaatgggttagaagttagggcagtggttacttatagtggaagagggagctgtgattaggaagggcataatgacagggcttttcaggcaggtggcagaatttttgtttcttgatctattactttataataaaagatttttcttaaaaaaaagctccaatgtaccattctttcatgtgtttagaaaatgtcctgtttcttaaacttgtgggagttcttaatttctacttttagcgcacactgcagaaaaatgcacacactgttgggatccttgagggagaattctgagcagtggaccccatgatgagtgcttcatgtcagccttcacacacactccagtcctgagaagcggaggggagagggacagcaggcttgggtctgcagaagcagtgttctcttgcaaggcagagtcaccatgtgtcccatctttacagattggctgcaatgccgtcagctgggcccctgctgttgtacctggaagcctcatagaccacccatcggggcagaaacccaattacatcaagaggtttgcatcaggtggctgtgacaacctcatcaagctgtggaagtaagtagggatgtgtggccttctctttgaggggacacttctaccctttaccctactcaccatgactcagccacactcacaagaaacaaggtcacctttctttctccctcctgccagtaaaatactgttttcaatctgttggaggacatccttgaaaaacaacacaacacctgttcacctaattcccaactgttggagctgactctttggctgtggaagcagagcattttctggagggtttttttttacagctggggtgaagggaataaaatgccacaaactccatgaatgaaagaagaaagatggaatcgcttctccaccccaggcagagcctgttgggttggggaggagttgaggtgtgggaacggccccctgctgattctctttctgtccccactgttagggaggaggaggacggccagtggaaggaggagcagaagctagaagcgcacagtgactgggttcgagatgtggcctgggccccctccatcggcctgcccaccagcaccatcgccagctgctcccaggtcagcccagggccatgagtatcccttgtcatttagtctcgagtcaggcccatcagctcttagtctccttagcagaaagtcctctgggaaggtaaagggagagcaacaggcacctttggcccagagcacagggagtcaggtcattgtgtggggaagtcttggtcagaagccacaagtggcctgcctccactgagatgagacagctacaacagaaccggcaccaagaaggaggcggattcgggatgaattttcccttctgacccatgtgagactagggcgccgaggtgcccaggtgcagttccaagtgttcccaagcaacgatggggttggatgggaattatacgcttagctaccaagccacccttcccagacagcaaggacggccaagggtgagccttcagttatacaccaccaccctagagggagccagctaggcctttcacatcatgggaacctgtttggtttggttctaaacttgggatttttgtgcttttttacttgtgccttctcattcttggagcttggtttttggagagctctgcccattcagttgagaaggtatagacggccagtggaagtgacttggcaggcatgaggaaaaccccagagaaaatctgagttagcaatgcagacagagtccacctccgaaacccggatgagaaaaggaatccgggagactcttaaccagtgtgaagagacagaaacaaagctgtggacgccccagaggtcctcggctcccctttgaatcccccaccctgttcctgcagagaggtgccgggtggctctagactgggaagacatcacatcacaaacgcaggagtcttgactccacctcctgactctatcctgtttcttcctaggatggtcgtgtgttcatttggacctgtgatgatgcctcaagcaatacgtggtcccctaaattgttgcacaagttcaacgatgtggtgtggcatgtgagctggtccatcacagccaacatcctggctgtctctggtggagacaataaggtacatacccattccccgtggcatggtggacacagcctgttggtcttcaccccgcccactagagagggcacttgacattcccatctgactgcaggctgggcaggagccttagccaggactgcgttttgagtgtgcctcttagttacatcattaatgtcacagcccctgaggtagtattaacacgtccccctttcacagatgaggaaagaagctgacagaggcgatttgacttgcatgggggtcccaaaactatgaggtggcagagccagtcaggcccatcaccctactaagcatttggtcacctcatggtgatgttcagttagctgtgccaaaaaggcaagtgtataagaacccataaacagaagaagattggggatattttttgtccataacactgaaaaggctttttaaaaacctttagagtttatgaatacttgttatgctggtaagaggcaggtacacagtgggtgcactggaagagtttgcattttgcagctgaaagagttctggagaccagctgctcagggacccaaatgtacttcacacaactggactgtgcagttaaaagtggccaaggtcattttatgtgacgtgtattttacaattagaaggaaaaaagctacccgcagaaaggaagcagtaacaagccatagccatctgcccagctgaattcccctataagacagaggatctctaacgccgcagggtcagttccacgtggagtggctgtgctgcgttttcaggcacatctgctctgcgcctgaagtgcgagttggtctggatcctgccagcccttgctgcttctctcccttgcctatgttggtcttttactgtttcccagtggccactttggctccatgtcttacctttcatttgtgtggctcacggcacaaccaacacaggcaaggcagagaagcagctggtctccagaactcttttcagctgcaaaattgaaactctgtacccattaaataactcccttccccattgcccctccccagccctggcagccacccttctcctttctgtctatgtgaatgtgactgctctagcgacctatctaagtggaatcatacagtatttgtccttttgcgactatgtcactagcagtatgcccttaaggttcctccatgctgtacgtagcatgtgtcagaattccttcctttgtaaagctaagtagtgttgcattgtatagacagcccacaccctgtttctacacttattcctccaccaaagggcacctgggctgctgccacctcttagctattgcgaatagtgtggctgtgaacatgggtgtgcagatcttgagagcctctgcaggcggcttttctggccgagggtccctttcatctacagtggtcccagaaagatctagcaggccccctctcaaagccatatttctagtgagtgccagagtcaggaccagaacccaggttgatggcactcagggcagaccaagggacccagattgcctcaagcaggcccccagtgacttttttacaaggctgtaagcaagtgcctggctgtgcacgcagtgttgtggggcccgtcactgtgcatttaggcttcttgctcttctttacaagcctgtttcctttcgctgtctccatagcacccttacctaaaggacttagtatgttttcaatcccagagcattctgcagtgtgttgagtgaatagtttgtccctaaagcaagagttcttaaaatcaaaatcgttattttcatttttaatcaaactaatatatgtacataggtttagattgtttttgttttttgttttgttttttgagatcgagtctcgctctgtcgtccaggctggagtgcagtggcgcagtctcggctcactgcaacctccgcctcctgggttcaagcgattctcctgcctcagcctccccagtagctgggagattacaggtggctgctagtttttttgtgtgtatttttagtagagatgagatggggtttcaccagttcaggctggtcgcgaactcctggcctcaggtgatccacccatctcagcctcccaaagtgctgagattacaggcgtgagccaccatgcccgacctagactgattttttttaatgcagcctcctaattttctctccaggggcaaaccttttcagctcttagctatttcttatacagtttacttcagtgtagaaacaacatattgaactgttaccttcctctaccacagtagttttcaaactgcagtgttgttaaacctgttaaaacagattgccagccccacccccagagcttcctaatcagttgttccaggccccaagaatctgcagttgtagcaagctcccaggtgaccgatgctctgctctggtctggggaccacactttgcgaaccctgctccccgccaccccatatcctctcgctgtagctctgtcacagtttgctgaaaacagtatcctgtgttgacatcatcatccacagctgctgttattgttacttctttttttctgtgagtttttattcctggactctcattttggtgagatttcagtggaggagggacatgctctgttcacccacaagcctctgggcagtggttcttgatgaggatgaggctcatatttaggggacagcagagggaagggcacagacccgtgataatctgcttgtgcactgactcgcaggtgaccctgtggaaggagtcagttgatgggcagtgggtgtgcatcagtgatgtcaacaagggccagggctccgtatcagcatcagtgacagagggccagcagaacgagcagtgacaagacaggtggggcctggctccccacccgccagctccaggactgccccttcctgggccaactaaccagacaactgggaagagcccccaactccaacaggattattttcccaggaggagttacagatgcagccacagattgatcatctgccttaacgtgatcggagatgctttgtaatctactgtccagctgaaagcactcatgttacgaggaagaaactacaagtgatgttcaaatctattttgggtcatttttatgtacctttgggttcaggcattatttggggggttttgtttccaaaggaactaaataaagtcatattgcttataattcctgctgcgttatcctaaccaccccaccccaccagctcagtttgactcttgtcggtccacgcactagaacaaactattcacaaaggccacggctgtgatggcctggcttaaccccacgcacaaaggtggcttgtcactgcatgagcatctctgattcagtttatactgaaagcaccatacagagcactggactcagcctttggtgacaaggactgtagccctgggtctgctacttaccctctcggtacacatcctgttctgcagaatgggactaatacagtctgccctacaggatggctgcaagattcaaacacgctagtgcatctggtgacctacaaaatgccacgcagatgcaacgtggtattaaccaaacaccaatagttaagatgctggcccagaaagtgggcacgattcatttagtttattgaccctgtcaggaaaaggagggccccatgatgggagacctaactgaccctgaaccaggtatcacctttcagcggaggccctgtgaccctgacaatcgccatagccatcagtgagcctgcggtgagccagaccctacactggatctttcacacattcgctaatttaagcaacacgagaaccccgtgtgggtgtacccagttcactgatgaggaagcgctcagaaggtagaagccctgcccaggactgtgcaaacgtaaagccagcgtcagggcctggcccatctcaacagttactccccactgtagaatcagggtgggagctggggggctctcctcagctgtaatacaagggtgtttctcacaccaaacctttgtatgaatagattcagataaaaggtcagcccacttgcctcaggccccctagtctgcctacttcttgtccttccctcctttttcagcagcaaaatcccctttaaaaaaaaaaaaaatctttgatcatactatgtaacatagaagaaagtgaaactgctttggttaaaggtgaggacagagaggccatggcctggcccagtcagcctccagtcagtccacaaagcccaagccttctgagaccaacatgaaaacagctgcttccttccttcccttactcagaaaagcaaagcccaggaaggcaccttcacgtgcactactgagtgtcgagttctacagtgaatccttgaaccatatccacgtctgcctccctgatacgctctgtgctcctcaagcctgggcctgggcttcctatggtgccagctgctgtcgccaagaaaataccgagaaggaactagtcccgtgtcactctgggttggtggtaggttaatgggtccctgactgtgtgctctattttaactcccaccaccaaggattggttaagataattatgaagttggcaccataatagttgtttatacttagagtggcaacacattaaccattcctgggtaagaggagaccccaaaatttattaccacaaaatagcctagtcaaatagaaatactatctgtaaaacttgccgggcagttgtcaagcccaaatgagataaaagtaagggaaatttaaaaggcatagagctctggttagggccagatggcgctagcagccatatgtttttaatccttttgcaaaaacaaagcaactgggacagcaaaagaaacccacagaccctagaacatggagcaggccaaagccttcatagacacaatacctctgagagatcagcagggtgaagaaaagggagtttttatggtgctataagccagagaccccaaaaattgccatcaaatactcatccattctgagtgcaaaactcagcaagccactgtgaaaacaactcccaaaactagaagattcacaggcttccatttacaagtgagcccagaaacactaaggggagaccttccacttctgcatataaaggattaacgattgtaagaatttcccagccaacatggtggctcacaactgtaatcccacacttcgaaaggccaagacgggcggaatgtttgagcccagaaattcaagaccagcctgccaacatggcaaaaccccatctctactaaaaatacaaaaattaggtgcagtggtgtgtgcctctgtagtgccagctactcaggaggctgaggcacaagaatcgcttgagcccaggaggtggaggttgcagtgagccgagattgcaccactgcactccagcctgggcaagagagtgagactctgtctaaaaaaaaaaaaatttccctggctgggcgcagtggccagcactttggaaggttgagggaggaggatctcttgagcccaggagtttgagatcagcctgggcaacacagcaagagcctgtctctttaataataaataagaatttccctcacactatagacaactaggaaattaattcaagatggattaaagacttaaacgttagacctaaaaccataaaaaccctagaagaaaacctaggcattaccattcaggacataggcatgggcaaggacttcatgtctaaaacaccaaaagcaatggcaacaaaagccagaattgacaaatgggatctaattaaactaaagagcttctgcacagcaaaagaaactaccatcagagtgaacaggcaacctacaaaatgggagaaaattttcacaacctactcatctgacaaagggctaatatccagaatctacaaagaactcaaacaaatttacaagaaaaaaacaaccccatcaaaaagtgggcgaaggacatgaacagacacttctcaaaagaagacatttatgcagccaaaaaacacatgaaaaaatgctcatcatcactggccatcagagaaatgcaaatcaaaaccacaatgagataccatctcacaccagttagaatggcagtcattaaaaagtcaggaaacaacaggtgctggagaggatgtggagaaataggaacacttttacactgttggtgggactgtaaactagttcaaccattgtggaagtcagtgtggcgattcctcagggatctagaactagaaataccatttgacccagccatcccattactgggtatatacccaaaggactataaatcatgctgctataaagacacatgcacacgtatgtttaccgcggcactattcacaatagcaaagacttggaaccaacccaaatgtccaacaatgatagactggattaagaaaatgtggcacatatacaccatggaatactatgcagccataaaaaatgatgagttcatgtcctttgtagggacatggatgaaattggaaatcatcattctcagtaaactatcgcaagaacaaaaaaccaaacaccgcatattctcactcatagatgggaattgaacaatgagaacacatggacacaggaaggggaacatcacactctggggactgttgtggggggaggggacgggggagggatagcattaggagatatacctaatgctaaatgacgagttaatgggtgcagcacaccagcatgtcacatgtatacatatgtaactaacccacatattgtgcgcatgtaccctaaaacttaaagtataacaataataaaataaaaaaataaaataaaataaaataataaatttaaaaaaaaaacaacaactaggaaatcatgaaaagtacatgaaacaactactgctttcagacataggacaacaggcagtgtttgggaaaagggaaacaggtaagcacaacaaatgcaccaggttactactacccagaagcagtttctgggccaaaaggtaaagagagactccagagtctagtagtctccaggagttgaagagacagaagtcagagttcaggaagaccaaggcaggccgggcgcggtggctcacgcttgtaatcccagcactttgggaggccaaggcgggcagatcacctgagatcaagagttcgagaccagcctggccaacatggtgaaaccctgtctctactaaaaatacaaaaattagccgggcgtggtgttgcacccctgtaatcccaactactcgggaggctgaggcaggagaattgcttgaaccagggaggcggaggttgcagtgagcaaagattacaccactgcactctgccctgggcgaaagagcaaggctctgtctcaaaaaacaaacaaacaaacaaaaaagaccaaggcagaactgaaggcagaagaggacgagaggaggaagctgcacagagcaagctcctgagagctgaagagtctcctggagtctttggacaagtactaaccttcatatatgaagggtgaaaccaatagaccaagcagctggagctcacataggggtgggaatagcccatgttcccagcaaccagaaaaaaaagagacattccatccagaagaacaaatataagagtggcagcaggccaggcgccgtggctcacgcctataatcccaacactttggaaggctgaggcgggtggatcacgaggtcagaagtccgagatcagcctgaccaagatggtgaaaccccatccctactaaaattagccagacatggtggtaggtgcctgtaatcccagctactcgggaggctgaggcaggagaattgcttgaacccgggaggtggaggttgcagtgagccgaaatcacgccactgcaccccagcctgggcgacagagcaagactctgtctcaaaaaaaaaaaaaaaaaaaaaggagcagcagccaacttctcatcagaaagtaggcaaaccataagaaaattaacatctttaaagtactgaaaaaattaaaaaaaaaaaaacctgtcagcctcaaattctatacctagtgaaaatatatatatattttaatacagactctttcaaataaaagctgaaagaattaatcaccagcagagctgccattacaagaaatgtcaaagaagtttccttcaggcagaaggaaaatactagatgaaaaacaggctgggcacagcggctcacacctgtaatcccagcactttgggatgctgaggcagcaggattgcttaagcccaggagtgtgaggccagcctgaccgacatggtgagaccttgtctctacaaaaaaaaatacaaaaattaggatttacaaatacgacttcaggcccagcgcggtggctcatgcctgtgatcccagcactttgggaggccaaggcagatggatcacttgaggtcaggagttcaagaccagcctggccaacatggcaaaaccccatctctagcaaaaatacaaaaattagctgggtgtggtggcgcatgcctgtagtcccagctattcaggaggctgaggcaggagaattgcttgaacccaggaggtatgggttgcagtgagccaagatcacgccactgcactctaacctggacaacagagcaagactccatctcaaaaaaaaaaaaaaaaaaaaaaaaaaaacaaa

SEQ ID NO: 8308 - DNA, 1221 bp, Homo sapiens
cttctctctctctctctctctctctctctctctctcattcagaagtgtggttcatcaaccctgactggtgggtgagagtggttagaattaaatgctgattatttctaaggtcctttggtaacctggttgaaactacctctcagtaaactttcttcgtgaacctacttaaccgcagctttacagaactcagtgtaacaactgctttacattctagacaggcagcctggtggagtgaagttttgtggactcagcattagaaggttaggggatggggctcttttcccaggtctgccttgaactagctctgtgactttggcaagtgctttctcttctctgggcttcttcatttccttagtctgtcgcaggtctctgattgactgtgcccttggtaccctgccctccccgccttcctgtgcactttgtaacctatacagctcggcacatggaggaaactccttattgtccttacttgcctttgcagacttcggggacctggtttttagagagtctagaatctgatgagagaacctgtgcttacttggtgtgtacctcttgaactgctttgcagccatcctcttccactgtctgcctttctgaaatcacaagtcaaactttatacctacagggcttgtgctggaaaagatgaaatggggaaaatggtaagaaatgtctgttccacactgaaacttcttttaagtcctcttttctatcccaagaatttaagagaagagtggttgagcaaagaaaaaaaataacagcttttgttcatttacttattcattcagcaaatagtcgctgagttccttctatttgcaaagcactgtgctggatgatttgaggggatttgaaactgcagatggctcagaccatggctccaaggagctcaccttctagtggggagaagaaacagcataaagtgttgtatgtgttccttgctgaagatatgcaagagagtccagccatttgagggtctgagaatcttcaagaaaggtgatggatggccctttttgagctggacctcaaagaatagataggagggagatgaccatgacaccatgttccagccctacaaactgttcaactctggatcccactacgtgacggaccagggagcagcctcaggaaacactcgaatcaagtctcccagtctgaagtaataaccccgttatgcataaactgcctggaacatcagaggctctgtcatccaggaaaggaacacca

SEQ ID NO: 8309 - DNA, 107 bp, Homo sapiens
agatcaccagaggtcaggagtttgagaccagcctggccaacatggtgaaaccccatctctactaaaactacaaaaattagccaggcatggtggcacatgcctgtaat

SEQ ID NO: 8310 - DNA, 163 bp, Homo sapiens
cgtagttgttgaaggtattctgcaatatgttgaagtcatatttgtaaatcctagagcaaccactcaaagaatagaacagtacagtatagctaataagccgacggtgaagacaaaatgataccattcaaaaccctctaaaagtggttatgacaagagaaagaaa

SEQ ID NO: 8311 - DNA, 163 bp, Homo sapiens; identical to SEQ ID NO: 8310

SEQ ID NO: 8312 - DNA, 104 bp, Homo sapiens
tacaggcgcgcgccactatgcccggctaatttttgtatttttggtagagacggggtttcaccatgttggccaggctggtctcgaactcctgacctcaggtgatc

SEQ ID NO: 8313 - DNA, 1238 bp, Homo sapiens
aagaagagaagccgcggcccctgcaggacgggggtaagaacaagagactgagggagccagactcctgggtcccccaagagggtaggagcttgtgtggagcttgccatcagcgagcctgagtcccagaaattgggctaaactagggattggggactagataggagtcgcagaattccgtagttcggggaagggagcctcggctgggatttggaggtgtgtggacggcaggccgtgagatctcgaggcagggttggacacctgagacacaggcgcgcagaggggagtggcggtgctggaggggcactgggggtcgaacccagggcgatgggcgcgggattccccacgctcgccaacgacgccgcggtgtggaaccttcaactggctccaagcgctgtgggatctggaagaggcaagggagcgagggtgtcgtagagggcagaatgaacaagaagaattaggagggaggctgcgtgtgccggggctaggggctggaagtcctggctctagttgcacctcggaaggaaaaggcaaacagaggagggaaggcgtcttaggactgcctggatccagagcactttccacggcctctacaggcctgtgtcgctatgggttcccccgccgccccggagggagcgctgggctacgtccgcgagttcactcgccactcctccgacgtgctgggcaacctcaacgagctgcgcctgcgcgggatcctcactgacgtcacgctgctggttggcgggcaacccctcagagcacacaaggcagttctcatcgcctgcaggttcgaggggtggggcctggggcggggccaaatgggaaaggggtgggaccacagggccgttgagagggaatccgaagccaagtctttcagaagcaggaggcggagcgtcccagaattgggggcggggtgatagtgaggaggcgggactttttcagggggcggggcttcctgaagctgcgcatgtctcccttggttccccagcccccaaaggacttatctgctctctctctagtggcttcttctattcaattttccggggccgtgcgggagtcggggtgcacgtgctctctctgcccgggggtcccgaagcgagaggcttcgcccctctattggacttcatgtacacttcgcgcctgcgcctctctccagccgctgcaccagcagtcctagcggccgccacctatttgcagatggagcacgtggtccaggcatgccaccgcttcatccaggccag

SEQ ID NO: 8314 - DNA, 2138 bp, Homo sapiens
aagaagagaagccgcggcccctgcaggacgggggtaagaacaagagactgagggagccagactcctgggtcccccaagagggtaggagcttgtgtggagcttgccatcagcgagcctgagtcccagaaattgggctaaactagggattggggactagataggagtcgcagaattccgtagttcggggaagggagcctcggctgggatttggaggtgtgtggacggcaggccgtgagatctcgaggcagggttggacacctgagacacaggcgcgcagaggggagtggcggtgctggaggggcactgggggtcgaacccagggcgatgggcgcgggattccccacgctcgccaacgacgccgcggtgtggaaccttcaactggctccaagcgctgtgggatctggaagaggcaagggagcgagggtgtcgtagagggcagaatgaacaagaagaattaggagggaggctgcgtgtgccggggctaggggctggaagtcctggctctagttgcacctcggaaggaaaaggcaaacagaggagggaaggcgtcttaggactgcctggatccagagcactttccacggcctctacaggcctgtgtcgctatgggttcccccgccgccccggagggagcgctgggctacgtccgcgagttcactcgccactcctccgacgtgctgggcaacctcaacgagctgcgcctgcgcgggatcctcactgacgtcacgctgctggttggcgggcaacccctcagagcacacaaggcagttctcatcgcctgcaggttcgaggggtggggcctggggcggggccaaatgggaaaggggtgggaccacagggccgttgagagggaatccgaagccaagtctttcagaagcaggaggcggagcgtcccagaattgggggcggggtgatagtgaggaggcgggactttttcagggggcggggcttcctgaagctgcgcgtgtctcccttggttccccagcccccaaaggacttatctgctctctctctagtggcttcttctattcaattttccggggccgtgcgggagtcggggtggacgtgctctctctgcccgggggtcccgaagcgagaggcttcgcccctctattggacttcatgtacacttcgcgcctgcgcctctctccagccactgcaccagcagtcctagcggccgccacctatttgcagatggagcacgtggtccaggcatgccaccgcttcatccaggccaggtgagggaccctggctcggcgttctctgtgggtgaggtgttaagggcaaaggcagagtttaggaaatggcactaacgttcatcacactttccccagctatgaacctctgggcatctccctgcgccccctggaagcagaacccccaacacccccaacggcccctccaccaggtagtcccaggcgctccgaaggacacccagacccacctactgaatctcgaagctgcagtcaaggcccccccagtccagccagccctgaccccaaggcctgcaactggaaaaagtacaagtacatcgtgctaaactctcaggcctcccaagcagggagcctggtcggggagagaagttctggtcaaccttgcccccaagccaggctccccagtggagacgaggcctccagcagcagcagcagcagcagcagcagcagcagtgaagaaggacccattcctggtccccagagcaggtacagagtctagaacctcaagaatttgtcagagctggcctcagctagaagacagagtcattgggccttgatggtcaggaggaagggagataggtggtgggtttcagagacactagctcaccttaaggagctggccagagaccaggtttattcagcagggtggcacttgggcagtacaatggatgtggctcattggtcaacaatattggctcaccctgagagggcaggcctttggctccaaatttcccaggagagaacccccacccctcaaccgtacaatctcttttaaccctttccttgccatctgcctaggctctctccaactgctgccactgtgcagttcaaatgtggggctccagccagtaccccctacctcctcacatcccaggctcaagacacctctggatcaccctctgaacgggctcgtccactaccggg

SEQ ID NO: 8315 - DNA, 32250 bp, Homo sapiens
aatgtcagtagcctcatctgaaaagcatgagaaccaaattagataacctaacaaaaacacctggaaaggaaaatatttctataagttatagtttacttctatagtttctttcttagtgctcttttctaatttattagaaagttgaaccgagttagaaggttgcaagtcttgaccaagtggattgggaagaggagggaaaagtcattgcagatatgggcaactgcaagggagagagtaaggaaggaccaaatatatattgatccaggagtcaggggagaaggaatttggacacagggacaagggagccttgtgggtgagggaaagaggggcccatgtagtaaaaaggatgaggatttgaaaaggaaataaaatgggttttacctattttaaattttgcaacaatatgccactatgacaatggccagatagcttctgtagcttgcttagctctttttgataaaagaagttcacagaagatggaccccaccctggctgctgattgaaagattcatgatgcaggcagctgcccagcagcctctgagaaccaccctgcatcccagctcccatctcattgtaagtttttgtcgtcaatctcactgtcccttagagagtcagggctcttcctcctcgatgttttcacaagctggggactgtagtccttagggagacaatgaatgggtttaatgagctccatgagcctcctaaaattgtatgcaagataaatgtatatttttccagggagtgtttatggctgtcatcagattctcaaaagggtctgtgatcccctaaagtaaagaaccacttattgggttggggaagcttagaagcctagaactatgtgccaggcatggttttaggaccagacaaagacatctaggggcctaaagcagggaaatgacaaagaagatggggataggaagaaatggatatgatttagattaaggaagtggagttagtgtctgaggagagggtggaaatgaggcagatagggaagttcaggttgactctggtttttggctagagtgacaatagggagagtggttccattagttagtttccaggggcagtggtaggggaggtaaccattgtgagagagagctgccaccagccatcatcctcatgaggaagtgaataaaagatgagcagacatgtttcctctggtgatttgccagcctctgccacagagaacctgagacccctcgggccttccccagggctgggggtgtgccaaggttgggcttttgtccattcaccaccagatcctgggcagctgtcagctctcaggataagaacgtttctgcacctgggcatgctggcccaaagcccagcaggcagggcattctgactgtttggagacacctggtttgttagagaaaacagtccttaatggtccagaacacagctgcttccactcagatccagttagaatagtttcacttggtagctagtttgcttctattaagacaccattcatgcgtcaaacaagtactgcctctttttaaaatattaggtttgagtccatctaaaggcaaagtcattatgtgttttgagaggatggttttattaaatataaatgtaaatgacaagagagaaaaaggaagagaataactaaatgggtgcctgtcacaggtttgtactaatgtattttcagctgaatcaggaatgagttactgaaactcaaaaccttgaatcgtgcgagcacggtgaaatgtcaatttaatacatgttgaaacattcagaaatctttgtgttgactgtaagttctcactgtaagtccccagtgctccctcgtctttgaagattgtgaatccaacactggactctctcactttggaatgggatccaccgagccacccgaatggcattttgacagagtacaccttaaagtatcagccaagtaagctgttgggaggaagagaaggggaaatatgtttttttattttatttattattttaattgacaaataattatacctcctcatggggtacgtagtgatgtttcgatacatatagtgatcagatcaggggaattcgcatattcatcttctcaaatatttatcatttatttgtgttggaaacatttaatatcctccctctagctgtgtaaggaacaccagaacttagtctttgtatctagctatcattttgtatcatatatatatatacacacgtatatatatatatacgtgtatatatatatacacgtatatatatacacgtatatacatatatatatatatatatatatatatatatatatatttgagatggagtctcgctctgtcacccaggctggagtgcagtggtgagatcttggctcactgcaagctccatctcccgagttcacaccattctcctccgtcagcctcccgagtagctgggactacagacgcccaccaccatgcccggcaaattttttgtatttttagtagagacggggtttcaccatgttagccaggatggtcttgatctcctgacctcgtgatctgcccacctcagcctcccaaagtgctgggattacaggcgtgagccactgcgcccagccttccctttaactgatatctccctatctcgccttccctctgtccttcctttatttctgggatgctgtgttctactttttacttctgtgacatgaactttttttagctttcacctatgagtgagaacatgtggtgtttaacttaactgttatcaaaaaatacaagctagtttttctttatatctgtagaatatatacatataacttcaagtgttgtttcagaaagaacttcaaatcttactttttaaagaaaaatgatgtctatgttattaaaaattaagtaatctgtagaataatacagacctttaggagtggggtttaggtgagtcctgtcattaaatcacatatgcattttctacaaatagaaaatggttcctttggcaaaagtcctctgaagaaaaatgtttggggttatttaacaatacaactccacctgcaagaacacaggggaaaaaattctattgtgattcaaccacaacattcttctagtttattagccaatagagaacatactacccccttgtgatatatgatatgatatgatatgatacgatatgatagaacatagcataggagctgttaaaaggttatcacttagttatgctggggaaagagtgagtgggattataaaagtcaatgtaagccaggttgaacatttttagttgacgtatttatttataatagtattcctatagcagttaatggagaatgcacttgttcattatttcttattgacagttaacagcacacatgaattaggccctctggtagatttgaaaattcctgccaacaagacacggtggactttaaaaaatttaaatttcagcactcgatataagttttatttctatgcacaaacatcagcaggatcaggaagtcaaattacagaggaagcagtaacaactgtggatgaaggtaagatgggtatgtataaaatccatataattataagcatcatgaaataaaaatctttaagtttatgctttttccttcttgctatggaacgtctgtcttacctgattaacgcaaacacttatttgtaatttctcattctgatatataatcagctatttagttcatattggactgatatttttcaactccatgtgaaactttcttaaacttacattaaaatcttagtgtgggagtgagtaagcataatatttgccacacttgaatttgaagttcaggggaatgttgtttcctgtttacaactttatatattatatatattcatgcacaaacatacatatgtacacatacacataatacacacatatgcatacacagacatacacatctatatacacacaaatatatgtaattcgagttctggtcctgatttactggaaaaaattttctagttcacatatcaatttacattttctagcaaggaaatcgaaacagttattaaagagtgcatttattttgtgtttgagcaaaagattttgcattttggtatgtacaaagaaagcaaaatagcccattatagtatttagaaaaggaattaacacttcttttcatactttaaaaagttattctgaaatcttgagattcaatgaaaattatcaaaaatattataaaaggttttctagttttgcatgtctctaaattgtagagttgcttaaggattattcatttgactatctttgatagcataaaaaattgacaatttctatccaaaaattggtttgaaatatcctaagccttcatacataatcaacaagtatgaataatgcaccttaagtaatgtgtttgaatactgggtattcaaactgggtatcctgataaaatgttggtactggatttgaatactagataagtttggggacaccaacatatctttgtcccctatacctgatgtggtacacttcattcttcttgcatgctttagcattttaataagtgtttttgtatcgctatacatgctcatgggtgtgttacatctaactatatagtgtcctatttctgtttcccttcattaaagctggtattcttccacctgatgtaggtgcaggcaaaggtaaaataattcatctgcatgactttatacatgtgtgaaatttgcaatgtgaaacatggggaagtgcagcatgggtaaaacagagaaaatatgctttgaaccaccaaaagaagagaagatctcatccaatcttggctttaaaattaatttctagtcctttctttacaagtagaaagccacatattgaattctcaaaacattttttcttgagacttatccctggtacaaatcctaatcttagcttctaatactatgattttggctggatcagacaggaccaaaactgtgtatttgtcacagatcctctatatggccatgccacattatttggggttcagaaatattagccctgtgatgaaaacagcctggtagaaatcagatcaaccaagcttcctgttctattctgatttagctgctctccttgtagacacagtgtacactcggctgccattgcacaaaaccgtccatttggaattacagcgtagcaatgccctccaactggtttgggactaagtctccccgagcttagggtcccctgcaagtgagtcttccaggtgacccatatgctcttctcaaatgtgttatcccacccatcctgtcttcacccaactgcctaagtctcttcctcctgagtaatagccaacaatccacaatggattttgttctcctttatttctgacagctctctgggtcagaaagatttgttgggagaatggtgcttgaataagttgtaatatgtcttccattagtggcaatgccaaagatgccccagtctttgacccctggctgctggttgaccagtcagctttttagagagcagtggagtacctgccactgggcactgttttcacgtggcatgcccatggtcaggggctttcgcacatcaggtgagtataaacaggaatgaagaaaaggaagaccaagagaaaaatgtgctttgccctatgttattcaactcctgtgagcttagacttgatagatttattctatttgcttagaaatttgcttatattcagagctttggtaaattacaaaatatcgatcagatagattttggagttattgaataaggactgtagccattttcagtaatcttaagagtattatatttgtgtttttagacttgacgaagttgtaaaaattcaaaatttctatatcacagagcgatgtaaacttacttctatttatttgtatacttccttcctatgataattagatatcaattaaaatcattagtagttttacaataatatattgctttataacttcaattggagcatttcactaaaagcctggccttgtttcctatgcagtggacatgtcactgtggctgtgcctagagctgatagcagagaaattgtgcttcagcaggactgtctgtgaagcaagtctgaattctcagtggacttgtcacgttagaagtagatatgcactccactggaaaaacatcacccctctgtttttaataaattaaaactaaattctatatttaaagagttttggttttaccatttgatgttactaatttgaattgtgagctacttatgattagagagacaagcaaaaatggagtgtctgaaagttcattaagcccccagtattaaaatctgatggatcttagataagaaaagaatagcgtttaaataagggggaaaaaagctaactctgaccttaattttaatatggtttattttaatagtatagcagtagttaagtatggcttacataagaggatattttgccagtaagactttaaactgctcaagcataatttgtgatcctgggttttccttccttaaaaatacttctttttttcaatctgaaaatgaattctatcctcttcactatttcccttctccatatggaatttaactgctctgtgacaggagaaaaattgaagttctccactatcctcccaaattttaattttttaaatgtatcttttacatttttatttaaatcaggacaatagggaataaataagagatgaataaagaggaaacatgtgatatccttagctatagaagcatcaatatggccgggcgtggtggctcacacctgtaatcccaacagtttgggaggctgaggcgggcagatcacgtgaggtcaggagttcaagaccagcctggccagcatgatgaaaccccatctctactaaaaatataaaaattagctgggcgtgttgttgggcgcctgtaatcccagctactcaggaggctgaggcaggaaaactgtttgaactcaggaggtagaggttgcagtgagctgagattgcaccattgcactccagcctgggcaacgagcaaaactccatctcaaaaaaaaaaaaaaaaaaaaatcaacatctcataagattttattatgaattatgatttcatgaaaagtggttttaattcatttctggtcaaagaggggaaaagaaatgcatctgagtttacatttttaaactttcttacagattttaagagatgttaatgaaacctaagttttcaaatgtataattacaaaaggattataaacctgaaggaaaacccaggataattcaattaactatatgatgccatactaacccttcttcttaccattctcctcaagataattacatacgcgagacctttgagtcatttatttttgtccttttctttgttggattaaagctctcaatatttgtgtaggaattatagttgattggcatattttttcaatttctatgtctctttaaatgaggctgggtgtggtggctcatgcctgtaatcccagcactttgggaagctgaggcaggcagatcacttgaggtcaggaattcgagaccagcctggccaacatggtgaaaccccatctctactaaaaataccaaaattagccaggcgtggtagtacacacctgtagtcctagctgcccgggaggcggaggcaggagaattgttttaacccaggaggcagaggctgcagtgagctggaggctgcactgagccaagattgcaccactgcaccccagcctgggcgacagaacgagactccatttcataaataaataaataaataaatgatttcagggtctggaattctaggaagtagactgtgaaggcatgtatagaaatgaaccaaaaatgtgcaggctcaaaaagatttatgttcccagtattgctgatgatccacaatgccatatccattgcatgtaatctggcgctctgaggaccaagcatcaaaatacttttatagggtaattagttggaatacagaaacagggataaactaactggcaaagcaggaatctgcattcttgacctaacttgcagcctactatggtcaaccaattaggagtgagcagagaagagcattgaggatcagctagtggtgaatcccttctgtgatctgactctcactacattattttactaaagaaccagtaaataaaaaataaaattccttttttggcctatacgaaaacaaaacaagacatctagaagcatagaagtttcaatcagttcaacagtgaatgtctctctggcacataaaatgcacccgtgtttgtttaagaagctgtgtataaagacagtaagacaaaccctggccttgacatgcttgaaatctggcaggtaagaccaacgtatagaaagagtaataaattgacgctaaactagaaattggagcaaaatgttatctgaatatagaggtgtgaaccattttttttgccaagcaggatcaggaaaagcttcacaaagaaaataatattgaactgggccttgaagcccagtttttgttttatttttgtcagatgagtcagggagttgcagtgtgtaaagtcttggtaggggtcataagcacatggcgtttgaaaacataccggatgtctgggttataccaagcggtccacttaggctgacttgtagagagtgtgtggaaaagagaagaccctgagatgggactggagcagtgggcggggccagatggtaacagctctgaagggccatgaatgctttgctaaggaatttgtatttacctgtaggcagagttttaaacagagaagtggctagataagagttgtagtttcagcagctaaaatgtaggtaactacactggcggtatctacagaggaagacttacagttgggcgaggcacaccggaagcagtccgttgggaaagcccagagaaaggggacactacagctcccttgtatggtacaaaataggtgctctgtgagtgagaaggtggatgagtggggattaaaaggaaggagagttcgaattccctatggtaaaagtggctaaacagcatgccttaggaaattgtggtatcttttctgggtatctttaagaataagctaaatgcaaatttccagtgtataatactttattattaactataattagtaatataatgctgtacattagatctctagaacttgttcatcttataactgaaagtttgtaccctttgaccaacatctcccatttccccaacccccaccccacctctagcccctggcaaccactattctacactcgttctctaagtacaacttttttagattccacatgtgaaccccgaaaatctgagacaggtttcagttaatttagaaagtttatttgcccaggttgagaacatatgcccgtgacatacccatagctcaggagaccctgaagacatgtgcccaaggtggccagagcacagtttggttttatacactttagggagttatgacacatcaatcaacacatgtgagatgaacattggtttggtctggaaaggagggacaactcgaagcagggagtttctaggtcataggtaggtgagagacaaacggttgcattctttttgagtttctgatgagactctccgaaggaggcaatcagatacgcatttatctcagtgagcagagggatgactttgaaaagaatgggaggcaggtttgtcctaagcagttcccagattgacttttccctttagcttagtgattctggggcccaaagatttattttcctttcacacacatttaagtgagatcacgcaatatttgcctttctgtgtctggattattttacttagcatagtatcctccaggttcatccatgttgttgcaaatggcaggatttcctttttttttaaagtcggaataatattccattgtgtaaatatatatatatatggtaatttctttatccattcatctgtcaatggatatttaggttgttttcatgtcttgactattgtgaataatgctgcaatgaatttaggagagtcgatactcgtagagataatgatttcatttcaataaaactagaaacaaaataataataatgaacagtttagagaagaaactctgagaagggagcacccatagaaaccaatgtaaaatataagaagaaactaaatgcttttccgttagaagtattttgctcttctgttagtaaatgctcttgtgttagaagtattatgtttctgccttgaacatcttccatattactccaagattaaattcctgtttcaatattccaaaattttttaagaaaattaatgtttttcctgggttgccattgatgttttacacatgtgtgcatatttactgtcattgattgatcatattcctattattttacctataagaagaaaatctcggaaaactaaaattaattaggtccacagaaggactctgcataattcagtaatcagttttgccctctgctgtttccccatgcttagcacaaagagatacaaaatttgcatgtgttgttgaattatatttcagaagtcaaaagcattatttaactgctttaatatctttcttttcttaattctaagaaatgtaattttattacatttatttgaacaaaggtcttgagcgtctacattttataaacatatcttagaatataattttagtgtcttggtaaacctattgatgctgtctgattgactatcctagtaaattttatgtgagataataaattgatcttcttttttaactacccaaattaacacatctgtaaatgtttcatttttagtttaagctattgaggtaggactgatagaattgcctgcctcaggtattcaaataacattttttaatgactttagatgttgtctttacccagtagcaagcatgtagcatcatctggtctccataatttggatttttaagaagctatttaggttgcactatgatttttcagaaaatgctttgtaacaaacagttaacaggtaagattgtcttgctctctaggaaatgttacatgaaatagtttttactccttttatttattctttcttaacttctgatagaacacatctggaaattccttttgcagcttctcttccaacatacccttaccatccatcattctctaaagcagggatttcttacctggggtccctgagtttcccagtgatactcaaagaagtctgttttttaaaacagatcaaaaacgctgttcaaaggggcattctctgtcacaccaacacagattttttaaagacctgcattgagatgacaaataggtttgaaaagtagccacatagtattgggttttaccttggcgtctctgacattccatgatgacgtctgtccctgggattgttcagcaatccccctctccatcacactttagtaaatgaagacggtgacatttcccgggactgtatctaatggacaacagttaacattgttcagaacccatataatagaactcacaaattttaatattatgcgtcattatttctgattattaatttcctagtgctgaatttaagaaacaaaaacctttctgtaatgaaagcaaagcatgagtgaaccctaaattttagcagtaaattctatttaattctatttgcacaatttcagagtatttaaacttattttatattcgtgtgtatggtgttgcaatatgattgtttgttttatttttctattgtatgtttagttcaagcagtaaatcccaggatcagcaatcttactgctgcagctgctgagacctatgccaatatcagttgggaatatgagggaccagagcatgtgaacttttatgttgaatatggtgtagcaggcagtaagaaacaatttcattacccgatttttaatttgggggatgcattttttaaaagattaaaaacattcttaagaatttactatggatcatcttgaaaaataacttgatccaattaaatgaatgagttatctaaaaaaattatagtgaaccatcagcctaccacatattatatgcacgactaggaattgcttttttatgttattaataacagagggcatatgttccattacgtatgttattttcatatcatagtacttgaaactagttctgtgcccacaacacataaacaagagtaagaaggaataattatatttgcaagtacaatagaaaagaagaaaaggtttttttttcaaattggatcttgaagtaacagaaatcaaactgacttgaaagtattcattttgccctgactagcccaacagaattttataagaaaccgcagaaaattaatactttgggagagcattcattatgttttaacgtttgatgtattctcaagtcaggcactcttcgtagatcctggccacatctactgggagatggggcagctttcactttcagcagtttatgaaaagccagtacccccctcctaagtgcagtgtgcttacatagaacaaatgaggtggccaataaatgtttgtgacaaaatgttgaacagagtccaactttctgtttaagcctttatcatgcaagtaaatgtttttagaaatgacgatccctttagaaaaaccggtacttgggaaaggttgaatcgattaattggatacgttggaaggcatttaagtttactaaaagattcatcttgtgaatcataaaaaaacaattcttcccatagttcacttaagctaattaatgtgtatcagttcttttgagaaacatctttagagaaactcaacagtttcataaggcaaggtgcagataaagaaccttcctttgtattaaagaggagaattaatacaatgggaatatatacaattaataagcaagctagatacccagtctatttttctttgaggatattttcctgtaggtcattttaattgatttgtttgacatgactacatttataataatctaaaatggtaaacctaagcatcctacatcttgtctttagcttataaagaattttcctttcttgaagcattaagtgacttctggtcccttaaaatattcaaatgtgttgtttttgcaaaatttccataggcaaagaagaatggagaaaagaaattgtaaatggttctcggagcttctttgggttaaagggtctaatgccaggaacagcatacaaagttcgagttggtgctgtgggggactctggttttgtgagttcagaggatgtgtttgagacaggcccaggtgaggctcacaccacacctgttctggctcccgctcagaggtggaggccgccaggtgctccagctggagatgggggctggtggagctgtgttatgggtagggcatgaatgtctttctatggggccctgttgggttgggagttttggtttttgtctttggttctttatatcaaatgaattacggaatttagcaaatcatctagccacattattaccaaaaaccatcagaaaaatagacttaaatatgattttaacttatattatttaaagaattcaattgttcatatcacatgtataaactttccctcagtgttaaactgaaattttttaagtgcttttgaagatgaaagaacttataagaaagtcacaattctggccgggcgcggtagctcacgcctgtaatcctagcacttagggaggccgaggcaggcggatcacctgaggtcaggagttcgagaccagcctggccaacatgatgaaaccccgtctctactaaaaatacaataattagctgggcatggtggtgggcgcctgtaatcccagctactcaggaggctgaggcaggagaatcacttgaacccgggaggcagaggttgcggtgagccaagattgcgccattgctctctagcctgggtgacagagtaagactccgtctcaaaaaaaaaaaaaaaaagaaaagaaagaaagtcacaattctttatttcaaaatggcctacaacccagcagaaccctgcagtcagcttagacaactgatacagatattattacatttgtatggaacaagaacttgtacaattcatatgctacattttttatcacaccaaattttactgcctgtatatatttacttatgtgaatattaacaaaatatgcaagtaaaaagtgaagtttctaaaataaagaaaaatgttcatgtgaaacatgagagcattcgtatttgctcgctagatggagaacaatccctgcttacttacatttcaacaagagttgtttgtggtacatgttcactctgtggttcatacccccatgttattttcattcactccatgcattcttaaagaaatgtgcatatcctgtagaatacattacacaatgtattttttgtgactttcattaacaaagcattatgatttttaaagtcagtttttacaatttagaaaaatataaatcataagtggtttttaaaaagaaacaacaataatgtattaaactatattttaaagatattcatttgctaaaatcataatgttttaagaaaaccacacattttattctgttctttgtatttcatatccatttatgtatatagtcctgggaaaccagtgtgttaagcttaaaaggggaatatctaatcaattcatagctagtttacaaggtttttgtttgttattgataacttttattttcaaaatactaaaagtcaagtagatattatcttcatatatagctggaatgctaataatagtaatgggactagcatttagtcagctctcctatacagcaggaagtggttttctcattcagtccttacaacaatcctatgatgtaggcaccattattactccacttacccctcaagtcagagaggtcgagtacctgccaggtcgcccagtaggaacgtgacagagctgggattagaagcttgtcgttccgtctccagaagaaaggcctcactatacccccactgcagggtcacaaaggtccacaggccaaggaggacaggctgtctcagaaagggcagcttcggtcaacacttggtatatccaatcagtgattctggacccctgcaggctgcatgtggttactggttctggattatttatgaagaatctactatgtataaaaatgacctgttgttaaaattgttagaaatgtttaggaaaggaaaaagtgactttatccaaagttagattcaccctcaaaatcaagttgtagcatttgttgtccttctataggacaaaagacaactcctttagaaaattatttttcactcagcagtgtaatgcctacagttccagcagcaactgccagatagtttgaggtgaggaatcgtgataggtgggccttcttgtgtgccagtgatggagagacaggacaaggtcacaaccagttcttgtcactttttacatataaatgtattaaaaagaacaaatattgattcacctctagtgaccttagttaacacatcgcctgtaagagcaaatgctgccagcattctagaatgcctcagtttaccattacgctgcctcccttttcccagttcacaatgcttcatcctttggggctgctgggttaactccagtgtgaaagcaccgtcttccactgcccctgctcctgctcctgctcctcctctcctctcctctcctctcctctcggttccgcggtgtaaggatgtcaatatttggcatgaaagcctatcattggctaatttttaaactctgcattcatgatctacttctctctctttctctgatttctgctaattttaggacactggactcaactttatctatagttatttcatcaatcttcctaccattacaccatctctcccttttataccctggatttctaaggtatatttcttaatttttttcctatggcacaaactgaaaaacagacgagataggcggtgtcctgatgctgcgcttcttccccgtactactggtatgacctctcattaccccaccccacctggtatgacctctcactaccccaccccacctggtatgacctctcattaccccaccccacccggtatgacctctcattaccgccaccccacccggtatgacctctcattaccccaccccacccggtatgacctctcactaccccaccccacctggtatgacctctcattaccgccaccccacccggtatgacctctcactaccccaccccacctggtatgacctctcattaccgccaccccacccggtatgacctctcactaccccaccccacccggtatgacctctcattaccgccaccccacccggtatgacctctcactaccccaccccacccggtatgacctctcattaccgccaccccacccagtatgacctctcattaccgccaccccacccggtatgacctctcattaccgccaccccacccggtatgacctctcattaccgccaccccacctggtatgactgctcattagcgccactccctgcccccgtttgacctctctttagtgccaccccatctggtatgaccagacgtgacctctcattaatgccatccacctccccttcctcttttacctctgtccctcaattacccagtctttcttatcatcacaaaggatttaaaacagatttgttttcacgaggcccaacagcttttttgtcagttgtctccaaactttggttaaggtcacattttgctcttcctaaacacatctaagcgtttgatgtctaagcatttgaacaggacattttcatccatagtgcattcttcataaatagtagagaacaaataaccatttccctcaccctgtctctcttctgtgttgattctatggttctgaggactcaagagcattttcctcagagacctcctaccacagagcacagatatccatgacagcaagcaacgccagagcagaagactgttgtaaagctgacttccagaaaacaaagcaaatctcattctcctgccatattttctgttttcatgttctttatatgtgtttaatttatcattttgtggattactcaaataatacatgaatataattttattgttaaaaaaaatcaagtaatgaagattctcttttactccgctacccagcccttcaatgggtgatatccacccactgaaactgattctagaaggaaaactcccataggtttaattctctctctgtggggtatatgtgtgtgtatgcgcatgtgtgtgtatgtgtgtgtgatgcatgatcatggttatggcttggatttgtatgtcccaggtgattttagattgtcctgaaaaggcttcatgcctattttaatcattctggaatttaaatcttttcttttatggatggaaagtcaatagaaatttttattccatttacacagtttctgttttatatcaatttctggtgtacttgtgtgtgtgtgaatgtgactgtgtgtgtgcacacatgcacctattaccatattgtgtctgcctattttaaataatagggcagtgaaatattcgatacttttttctttagacacagaggcagaaattcaaagtcagtgaatgtggatgtttgtgtaccacccatcaaacatccatccagtttttccatggttgcatagcagcaaactgccagtcagtagttcgattttggcagtcaccatccttgtagaacaatatctctgctagtacctgagtatcttgtttttccctttttagttgcatttaattagatgaaaaatgtaaatgctgaatgtatttatgacaaggctgtaaatcagcacactgaaaacaagaactatagtcaaatgcttaagagacttaatgccatttggtttttggttcagttttgaagaaaaagcacagaccaggcattaattgaaagaaatatgttgccaaagaggatgtaatgatggacttttaatacctttttgcctgtctcagaataggaagtgcctatagcattttattctttaacttaagatttttgcagatttggtatctggattgtttttaggaatgcattacagcagtataatataatggctagtagcatattttctggagtcagacacaggttgctccaactcttgggcaagttcttaaccttctctgggcatggatttatttctgatgcctacctcagagaattgttgtaaagattaaatgagatgtgccttcagcacagtgcctagcctatggtaagggtccaaaactgttagccatcagtgctattaccattgtcctcatcttcatcatcatgactatggtatgtgtatggaaaggggaaactgcctaaactgatgctttacttgtgtgtggctatgatacagctcaaaacttctctaataaggcacgagggcctattgggaaaaggctaccagcctttgacttgtatttcaaataaggtatttttgcttctcattttatttcttctacatatgtccatattttttttaaccttcctcttcacacttgatttttagcatttcctttttctccctaaactttgtatggagaaaaagaggcaatgagatgctatttttgcaacattagctgaacctgggatatgcgtagtcatgtttatttctgcatccagagatcacacacacctaactcaactgtgtaaaatatattcggaagaaattcagtcaaattaaaagcatgatataagcatgcttatagagtcaaaagaagaaaatgttttatcttgattatggtcaaaagagagaaaataaaggtcttttaaaaaagaatttatactagttaattaagcaaatctgcatgggcatgtctgaatagccattgatgctgcactttttcccataagattgatactttaaaataatacccgaaatgctcattattctgtggttttcttagaaattttgcatattatgactgatggaataaggggtttcacatttattaaacagaatagatgcaaactgaaaggatatgtatacacctaagtgagtactttcttttcaaactggtcatgtaggcaaataatgagttcactgactgagagatattccggtcttttgaatggatccttagcaataacgaatattgattctttgagggtggatttggtttttcagaaatttccactcagaaccaactcttgtgaatgagatgaataacaaatctaagtaatattttgggtgcaaattgagatgttatataaaacaatatggctgttttcctgatctggaaaggtttcttgtgtggaccgttttcttttttaacagatttctaaaaaatactgaaaatggcaacagccttgcaaggacagtttagcctctaaaagcagttcctttgaagagaaaatactcaattagatgtatacattctgttctgtttaaaactcagttttgtatttttctcattatacttaatgtaaaatgtatcctgttaacagtgaatactttaattggtttgggaatttgtttttattgagaatatatagtgaaaataactgtgaacacagtgttcaccaggggtttttagcatttaatgtgatgattattcagatttctctacttgaattttttaatgaatgaagatttttcaaagttaattattcatataattcctgattaataattgacagatcctaatttggggccacatgtaaaatatatgaaagctcacataacgtggcaattttttactctgagagactgcagcagttcccatctccccttaacctattgccaccaacaccattgatttgttttccagcgatggcaagccggcaggtggatattgcaactcagggctggttcattggtctgatgtgtgctgttgctctccttatcttaattttgctgattgtttgcttcatcagaagaaacaagggtggtaaatatccaggtaagaaagaaagattaaaattgctttataatgctacataataatccattaaactaaaaagatcatgggggaaatcatgtagattgtaatattttgtcttcccagagccatgagtttggactttctcttcaaatgacttttgatccctttttatataatggcaatctaaacattgtcaatgatcataaggcatttggaggagtaaatcaatcagttctctgaaaacattagtgagcctactttcttagactccacataggttatggatgctgaagtaacacctaaaaccaactggcaaggagagagttgcagggaaggttcatggagtttttcaaaggaagtaatgcatgaactaagtcttcatattgtgatgtgtaacattgctttccctataaggtaatggtttattcaatttagtgggcccattaaatttatattttctttacctgaccattttcccttcagtgacaagaaaaaaaaaatctgtgagagaatactcttacaaaaacaattttcaaccattaatatagttaacaaatagattggtaaaatagggggaaatcttagaaacttaaaaattatttatcaggtgagaaactagtcaactttatgtgttaaaaaatgtacattctattgggttgcctcaaaaataactaaaataccaaaatatatgcatggccaccatatatatggttatacaacatctacttgtgtatggaattatttttcactgctgtatatctcaaagaatgctttcatggactttgaataagaaagaacaggatcaacagataataataccattttggcattttttagttaaagaaaaggaagatgcccatgctgaccctgaaatccagcctatgaaggaagatgatgggacatttggagaatacaggtgagcccctgcttctctgctcttcatcttctctgcccacatgaacacagtcccgagaatagaactcagccagaatatgctctgcctggcatctcatattttcctcaaatagaagtttagggatacttccatgtatcagtgtttacatgtccctcatggtcaaacattttcatttttcattgaaaaactaaattttgattttagtcataattttggagatggaatgtctcccactttgtcatattttccatgggaccatgctgtattgatcaatctagcaaagccaatatgctactatgagcattaaaacaacaaaaaagaacctccaatgcctgcattgtaaagaaagctatacttgttatcttctaaacatgctgtaataaaaccagtgtaaacacactttttcatctagaatttgaaactagttttcctaaacaatacccatacccttgccctttaatcatgaaatggtgactagattgttttacaagctgttacttattaagaaatgtcgtagccctctaggcaatgtgttactcacagaactttgataatacattcttggcttgactccatcattaagggaaaatgttaatataacctatgtgctaaattttttaaaaatcttctctttaaacaaagataaatcttttcaagagaaggaaaagattactttagatttgtttaaattaaacagaaacaaagtacgtatttatttaaataaaatgtgggcattctgttattctaaaagtatacctttttaaaataccttttgtaccttgtttttttctttttagaagccccttgcttatataaaataccttttaaatatgcattaagcccattttgagacattgtttgcaagatgaagaggcttttaggtgaaataaaatatttcactattgggattaccaggcaacatttgtagagaagatatttatgttaagttttacctgtctctagagctcatttttggtttttccatgtcactatcatgtcaatatcatagaatttcatgtgacataatcctaaggataaaaaatgtagaactgattgagaaaaagacatatattttcaataaaatcattttcatatcattttccaggcagatacctgtgtttttcctttattatctcagcccctaagtttttatattgtgatctcttaaagagagataactatggtttcaaaaagttctcagaatttctgtatctcatggtacagaaaaatgcatagtgagggttgtcttgatgtcagaagttggttctggagctgaaggtgtatgaaaacctcatgcagcgtccacacccagttcacccaagagggttttgtaacacattagagcagcctacagaagcccgtagcctagggcatctggatgagtagaactttgctgaaataattcacccttctacatgtttctcctgtaaagcaggtaagcttacaattactaaataacttcttatttctaagagttcttgtggctgtaattatctacaggatatgcataccactcccttatgtattgtgatgaagcaaaatctttaatgtggccctgaaaaaaaatgtatttgcatgaattggaaataaagcattgtccttcatacattctccacatggtgatgggttcctgttctacattatcatgcctcagtgaatctagcaacatactactcaccacctgggtctcaaacatcagcttgctcttacagcgatgtgaaaccatgatctgaggtcatgtgactttcccagataactgctgcctactccattaaaacttgactaaaatcaaggttgatatttgggtgatggtatactggaagcccaaaccccaccactatacaatgtatccacgtaacaaacttgcacatgtaccccctggatctgttctaaaaaatggaggttgagttttatgaactagcttggaatcaaaagactgttagttttactttcaactcagccattgcctgtgattcatagttctatgatttctgttttcttctatgagccatctactaacaactttaatagaattttgtgtctggagcagtacgtggcaagtatttggttactggcctcataagcactgtgtttacatctatttggtcatatgtctttgtcttagtgttaatttatatgtgctatgttggtaaagtgttttcaaatagctgtctttaggccttagtttctcaggaaagaaagactttgcatttgggcttattgagtgcaaacccaattgacacgaagacaaaaacacttgtacatttgtcatacatgtaatgacataaatttgggaggtgctaagggaaataaggttctgatgggtgtcttcaacttgaaacataactcaatgatgtaattttttcaatgaaactaaaagttcataaggacaatcccacaagcaaaatcacttccccaaaattccaaccacattttttactttgatttacaaagatacggctttgtcctttgatttcctgacactacctcagaatgttttccctttggtttattttctatttgaagaaatccaaaaagtgtttattatcttagaggctgtaattaatgaaaacagttccaactgtttattaacagaatcttttatttttaatacatttaagtgtcattcacttcctgagatcaccaggttcctgtctctgttttgcactttctggaagttttgagctctgtattatttattgattcttattctctttcattccaaaaataaattattatgctgaccagacacatacaaaattaggactattgcctaggtgtaaattaattccatttctgatttgctcattctccagtttgatgatgaaaccgtttctacatggctggctctaagccagatgatatttcatagtgcaaagagggatagaacctcactggtggccaaatgtgattatatgctataaccctgtgcccctactctgacacccacccccaagcagttaccctctgttggaagcctgcagctttctttgtttgtttctttaattatacagacagtaggatctgcatccttactagcatatagaaaaatcagagaaacaatgcaaccaagagtgtaagtatttttttattctttagatccattttccttaaaaccagaataaacctaggtcataaaccatatgcccatgttacttgaactcataacttactacataattggtggctcttgccacatgaatcttgtcattcatgtgaacatgggcttgtggcaagcatgctaacccatgctcataaggcttgaatgatgccaagatgtgtcacattcgttatatacattagagttattttgctctcaaatgtgaactggcttgtgagtaaaataataatggacttttagcgagtgggtaggaaagagtatttgggtcatgaatgttacttgagctgcaatgtggtttggccatgggagggtggtaacaacaggaaaatcagacagaattatcacagatttacctgctgttgccgaattttactcagtaggatttaacagatgtgcacacttctgaacaaagtgctattgaaaaacaatttgaactccctaaaaatttattcttagggaaagagaaaggaaaggatatattccaatgatttgtctgccgtcataaaactgagggaatgaaatgttttatgttagaatttttaaaaaaattttctaaaatgcccactgtctcctctattattttacagtgaactcattctgccagtatttatgagtgcctactgtatgccaggccttgggaatattcaaaccaatagaatttggtcccacacagggagtttatagcctagtgatggatgcagggaagtaaaagaacaatgaccagagtgtgaaaagtgctatgaaagagatataactaaggtaccaagggaacagaagcaggaaggtaaagccaggtgggcagcataggaggaggatggtacagggagtcttcccaggggaagtcatgcagttttagcattgtgataggaacatttctttccactgcacaatgatcctgattcatgaatctaagtatcaagaatatacttgatattgtatcaatacttgtatactggatactttgtaggtgcatatatatatatgccagcactgtgaatatgatttatataatatgtatatattttattttgaaatccattcaacctttgacatccaaaactaataattaatgtctgatacacaccatccttaaactttctcattaaaatgtgaatgaatttttacctgttttgtaaagctttgaatactactgctgcctactccattaaaacttgattaaaatcaaggtctgctatatgtgtgtgtgtgtgtgtgtgtgtgtgtgtgtgtgtgtgtgtgtatatatatatatatgacttttaaatcatcttctatgacttcttgattcatatcatttgggaaactctcctttcatatttaaacttgacatggcaacttcactgaatacaatgtcaaaaagttatttactatttcattacaaaattcatcttggaattgaaaaaggcaagccctcatactgtgcttctcatagagtcataaccactcactacacctggaaagttccgcgtgtgtgttgcacaaggtatttcttaggaaaaaaaaatctctctgaagtagggacctggagtggagagaagagatgtgatgggagatggacatgtatgcttgttgaacacaaacccagcactgtgtgtatgacttatataattttttctcatttaaccggattctaattattgaagtatatgatattatatcacaccacttattaaagactggtcttcaaaagatctcactgcctttgaatggcttttcctggaaagactctgttggaggagggagaatcccacttccttctcttctttcaagcacagcccgtgttgctgttgattctctcctccaccacagccgttaagctggcgtgaatggatgttttgggggagccccttcttggctggtcattaatgataactgttatgattttgtatgtaaaaacccacatgaatcaacaagcaaatattataataagagagtttagtaatgttgctcgacacaaaattaacataaaagtcttatatttctatgtatcagcaagcaattggaaaataagactttaaaacttattctagttatgatagcataaaaatatgacataggaataaagctaacaaaaagatcttccaccagtttcaagaccctatattccattccattggtcaatctgtctatctctgcaccaagactataatgtcttaataatataggttttaataagtcttgatatctgctaggtccagttctctaactttagttgtcttcttcaagaaccttttaaatattcttagcccttttcatttatttgtacatcatagaatcagcctgccaagatccacataaaaacctgctgagctgttactggaaataaattgcagctaaagggcaatatggggaaggttaacatatttactatatttgagtcttctatccatggatgtagaacattcctccattcattcagatcttctttaataactctgaaagttttattttcttcggaggtcttacacatatttttgttggatttgtctttatatacttcatgtttatggtctcataaatggaataatattttgaattttatttcctaattttttgcaagaacataagtagaattgacttttatgctaatcttgtatcaagcaacattattaaaatctctttatattctaacatttacctgtagattcttctggattttttatatgcacaatcatatcagttatgaataatgatagcttcctttcatctatttctttttcttatcaagttgcttaggacttttaattcagttttgattagaagtggtgatagcagccatcattattattatttctgatttcaaacaaagttttcagtgttcaccattaaggatgatgtttactttaggtttcttgttgctacccttaatcaggttaatgaagatacattctattcctaatgttaggaataaaaatacattctattcctaatgtttttatcatgaatgggtgttgagttttttcatatacctctttctaaatttactgagattatcatatttttattttcttctgctaaaataatgaattatatgaattgatgttttaatgctaaaataagcctgcattcttggaataaacccaacctggatatgaaatattatctttttcatagattgctaaatttggtttggtcatggtttgtttggggttttttcatctatgttcatgaatgagattagcctgtagtttgactttcttaaagcattcttattggttttggatatcaatgttatactagcctcaaaaaatgattaaaggagtggttctcatgacatattcaaactttaatatctcaaaatggaaccattgattttcccctcccaacatgctccactccatagtaacagtacttccaagcttcctgttgctcaaaccaaaaatcctggcaccatctttttctctgttattccatgtctaacctatcagaaaatcctgttggctctaccttcaaaatatgttcataatctgagcattttataccacctccagtgttccactctggtccaagtcacagtcatctcactcctggattattgtaatattctcccctgactctatagagcagaggttggccaactaaatattttagactttacaggccgcgcggtctctgctgcaactctgcaattctgctattgtagtgctaaagcagccatagacattatgtgataaatgggcgtggcctaattttactgtagtttaccaaccccagccctctaaggtaggctattctcaacactgatggcagagtagtgcttttaaaatataagtcagagcatgtcacttattctttgaaaccctcccagggcttcctgtctcactcagagttaaaggcagcgtccttacaatgttccacaagccctgatttagccgtgccactccccttacttaactcctacttttctctctctctctctccctccccccagccacaccaagctccttagtgttcctagaacctgccaggcttcccctcaccccgagacatttatactgcttgttactcctgcaggaactgctctccctccaactattcaccttgctaactcaactcttttaaagttgttgaccagatattactgcttgatgaggtcttcctggacatcttattaaatgccagctctccatcccttctccaacaccttctgcagtctttactcagctctatactttgcatagtgctaatcctcttctgacataatatatatgtaattttttttattatgttgattgttaattgtattttcttccactagaaataaagccagtgaggtgagggttttagtctgttttgtttgctgctatattcccagtgccgagaacaatctatcttagagtagtcactcaataaacatttattggatgaaggcatgggtggatagatggctagaccaaagaaatgccacagatgacaaatttccagcagtgtattccttgggacactagttctacagagcagaataagactagtcattggaatccaggtgacaaattctgcctgttattgaactcttcagctgaattaactgtcacactgaaacatgaactatatttcacaagaaggatttaataattaaaccccagagatgttgtgtaggctattttcataacaggttagacactcaatgctatgtcctctgaaatgctcacaaacacagaccaccccaagatgatacctctccagttgtttattagcagtggtgaaaatatagtttattcagtttgcaataagaaattgtgtattactgaaacaggttgttttcagtggcatatgccagtgtcatattatgctagcattatttcccagtcttcagattttcttcttggagaaaaattgaaatccctagtaaaagttattgtcaaaagagccaggatacttgtgcatcttgaaatgtttgtatcttggcttgaaaaaaaaagtcactgtctgaaacagagggagcagtaaagtcttagcagaaattgctagattaaatactgcagccagtgataccttttgtatgttaaggctttttcatttttacattagtaaaaatgtatatgtttcctattttgccttgcatttttgttctttgaaagaaaacaaaatgttagatcctgtcattgcctttttctatttttttcccaaatgttacctattaaaaaataggtcaatatgcataactaggtatttgaccgtatgggtgaacattcaaaaacataatgattactctttgtcttccagaaattgtgcttacgggttcaacagagaaataagcaaaaattgtaataatggaatcttgtaaagtcgtattaaagtacactcctcagattcccatccagtatagtcaggctgcataacacacaaggaagaagggagctggggggttaacatgagtgtaggaagcatttgctattacatgtttggagtcattcacattctttagaatatattggcatgccattcatagtacaaatgtagagcttttaagttaaagtgcgtctctttccagattaataaatctttactcattaactaaaatttttaccaaaaaaacaaaaaaatactgtgtactatcagtataaggattttgcttttcttcttaggctgttttcatttgtttcttctgcatccttttaatggaattttgtaggtctcttgaaaggtaaggttgaagtttacagtctggcctgcattgataacaaaattatttgaaatgcaggattttgcttctccttctggctcagaaaaaaaaaatccacatttcacacttaaccaaaatcatgctccattcacaaccaaggaatcagagatattatgcagtttaacatactaacttctttacttgccataagcttttgcctttttgaattcaaaatagtgatgatttttctacttttctgaattctttcttatttaatgcttgtgattatttctggattgctttcaactcaggaatcagaatttgtcattgaaattaacaaacactattgggagccatccactctactgaagacttcatgattcaaccatttctgctcctgatttccattccaactcatcctcgtcattggagtcaacctgaaaattagatttggccagagaagcccaggactccaaatgctttctcataatttgcatgcatggtctttaaaaacagaaaatgttacctaaatgccaatcttgacaaaaatgttttctctttcttccagtgatgcagaagaccacaagcctttgaaaaaaggaagtcgaactccttcagacaggactgtgaaaaaagaagatagtgacgacagcctagttgactatggagaaggggttaatggccagttcaatgaggatggctcctttattggacaatacagtggtaagaaagagaaagagccggctgaaggaaacgaaagctcagaggcaccttctcctgtcaacgccatgaattcctttgtttaatttttaagctctttgccaatattccatttctctagaatgtttatcctaagcacttgtttgtcagccctctcatactatgaacatatgggtagagagtatattttctgctgtatgttagtattatgagaatagttacagcaaaaacataactcagtcaaatgatatgttaatatgaactggaatgcaaagtgcatactttttcattcaaaatgggtattcttgatttcctcagaactgataaaaaataatgcaacatcaccaacagatcctgttatttcctctgcaggatacagttcaatatgatgcatgaaaaatgctccacatttaaaggacatacccgtgtatgttatgaaaacatggtttgatactttgtttatactaccctcagctgaacccctatatatgaattccgttttcattgtcaagaatgttactgtagtattctctagaacttcaatgtctttgtggacattgttgtgaaattggtgactatgtatagctgtcgttagtctttttgggagactgttaggaacagtttgtacagtatatacttgctaaatgagttcattatgacagtcacattgctgatgcttactgagaactattacctactcttggctcctgttactccgtaggcttcttaatcttccaggcattacagcagcacagtgttctactttttacatcatttctatgttcggttgtttttaggcataaacaatgtgtattgcagtgcatttcggcatttgtgccatactgaaagaatcaaaaacaaatcatccaaattaaatttcaaacattatttcagagaacacagggcaagacacatacagtgccttcagatattaagcattccacaacatcgtgcattctgtatcagctggtccagtccattctgggtcctagattactgtcattgtctaaaagtaacttttaaaaagcagagttcatgaaaactgcaatgctgggaaaagaaggaaacatgaaaataaaaataagacagtttattagaaatagcatttcctcataagcataaaaagaaaatctttgttgccaactgaagcacatgatgattttgtggtcctttatggtttctattacattcagtaagaaagatgtcaacatgctagaaaattaattttaaaactaagttattccaacactaaaagcatacaacagcatgccaacagtaatatattattctccaagactttacctatgtaagtgttcaaaactctgcagcattaaacaacgtgtatgcaaattgttatggatacatttcagaatctaagaaatcaggcaagtgcttaaaaggccaacggtccaagggattacatctgcagtttaaaaagtaaatatatattctatcgtattcataaacaatatctatcaaatgggttacctccaaatatgaaaatctataacaacctatggttgaaggaatgctcagtttcatttgccaataaattggtttctcataacttgcatcaagtttaattttaagtaaagctttttatatgtagatattttgttgaatttgtaaatacacttaaaatgtagatgctatatgcttataggtgttacatacaaataaacatgcaatgtttatgttgtactgtataagaggtaagctaattaatgcagtgaatgggattggaaagcatctacttaaatatctattgggttcccccctccccccaccttttttgctgtgaaactgaaatagtgaacttttctacgtattgacagcagatttttcgatgaaatcttcagagctttgcctatggggcacagtaggcctagtaacctggcatgtttgatatatgtaggtaaagcataatttaaagtaatcccaggtaaagatggccctaaatactttcatgtctctatattcatttttcacagatccacctgtctcttgaaaatataaaaagacaaaacaggtttgccttggcatcagagagcacaaagattaaaagttactttaaatttgccaatattttgggagaacaataaaactacattttttcctcttccatactggtagatgcgaaatttatctgtgcatgaaagggtcacttctgtaatagtgcaacagatttggtattaaaaattaaatgtggttttaaaagttcctctctcttttgtaatttatgttcccaattgagtgtgaatgtccaagtaatggtgtatgtaatggtacaggcaaatgtgactggatttccctcaaaaaagtaactattaaacagtcttgatctctttgtgacttttaa

SEQ ID NO: 8316 - DNA, 32176 bp, Homo sapiens
ttcatcatcgaatatgaagatgcaatgcacaagccagggctgtggcaccaccaaactgaagtttctggaacacagaccacagcccagctgaagctgtctccttacgtgaactactccttccgcgtgatggcagtgaacagcattgggaagagcttgcccagcgaggcctctgagcagtatttgacgaaagcctcaggtaaagcgggaaagcgggacttctagggtacgaaatataataaaaaagttttccactcttcgcaaaaggccaaagcttacacatgtgtggctgcttaacttccagaaccagataaaaaccccacagctgtggaaggactgggatcagagcctgataatttggtgattacgtggaaggtgagctatgatgccttcaaatttattcgctattttttagagtgaaaaaaaagttgtttgaaaataatatctacattagaatctcatttcacctatttctggggaaaaaaaatatatatatatatatataaagatacatatatatctttacttaagaggcagtattatatagttgctaaaagcttgagctctggagtcaaaatgatttggtgcaaatcccagctctgccactaactctgtgatcttaggccagttgtttaacatgtctgttaggcagctgtatgatgggagtaataatagaaccaatttcacagtattaaaggagctaatacatataaagcacctagaacagtgcctagcatatacacatgctcaaaaaaatgctagctagtgttatcataaagaaccacctggggccagtagctcacgcctataatcccagcactttgggaggccgaggcgggcagatcatgaggtcaggagtttgagaccagcctgaccaacatggtgaaaccccgtctctactaaaaatacaaaaattagccgggtgtagtgctgcatgcctgtaatcccagctactcaggaggctgaggcaggagaatcgcttgaacccaggaggcagaggttgcagtgagccgagattacaccactgcactccagcctgggtgacagagcaagattccatctccaaaaaagaaaaaaaagaaccacctggaagacatgcaccaagccattcccagcagtcaacttctttagtggggaaagcttatctgtgttttctggatttggaaaattaacatatatttactcataattcaaaacctattttagatagagccatacatgcatacttagacatgtatacatatatgtacatacttatatttatacaaacatgtagaaacaacagaatgacaggctagcctttttttaataaagaggaaaacagtctgtaagtttccatctgcaaataaaatggacaatgatgtactattgcacaaacaggaatatataaaggattctatgtgaccgaaatgtctaaagaatcaccatccttgaaggtagagccagagtttgaaaggtttatgtgatatttattgcatcaagatagtagtttacaacctttgaaatgttgatcccaaacaagctttgaatctcattgcaaatgcacaattgatagaaggtccctggagaaaatggttaatagcttgtgttttagtatttcaatgatcactttctgtaggtctgggaattgaatttgctgttcctgtaaaagattgtgtagttgatttgtgttataagctctggttatttggctttccttgtagcccttgaatggtttcgaatctaatgggccaggccttcagtacaaagttagctggcgccagaaagatggtgatgatgaatggacatctgtggttgtggcaaatgtatccaaatatattgtctcaggcacgccaacctttgttccatacctgatcaaagttcaggccctgaatgacatggggtttgcccccgagccagctgtagtcatgggacattctggagaagaccgtaagtgatgccatttcctacttttccccagcaaaacagacttaccaaggtgcaagccaaggccatttctccttgctcaggttgcaagggagggaggtggcaattattttgcacgacttctctgaatttaaacagcctgctgtgtaagaaagagaagttcagaacgttcaaggtgattgcagtatagttgtcccttggtatccacaggggattggttccaggatgccctgccttggatacccaaatctgcaaatactcaagtcccacagatagccctatggaaccctcctatatgaaatatcagccctccatgtccgtgggttttgcacccaggaatactgtgttttccatcttctttggctgtagatgcagaacctgcagatgtagagggctgactgtattttggggggaaaaaaaaatccaagtgtaagtggacccatgcagttcaaacccgtgttgttcaagggtcaattgtactttttaaaaaatcgtgttttcctactcactgatggtgggaggatcccttgagtcaaggaatttgagtctagcctgggcaacatagcaagatgccatctcttaaaaaaaaaaaatctctcacaaagtcaaacagataccccaaaatctgtgttcaagccttaataatccatagaataggtctgcagtatgcttcaagccaaaattattagagagagtcatatttatggatgaaattaaaaataacattgatacttctaccacttccctgtccttttcctagtcccaatggtggctcctgggaacgtgcgtgtgaatgtggtgaacagtaccttagccgaggtgcactgggacccagtacctctgaaaagcatccgaggacacctacaaggctatcgggcaagtgaaaggggaccttttgtggctttatttagtaagggctgcagcgaatgccacttgtcatgcataccacaggaggtggggcttatttgtttcattgctttgtgaacttgtggactgaagagttcatttcgctcattgcctcaggtagccactgccagagttgacttgaaatctcactgcatccaaaattaaaaaaaaaaaaaaagttttctccatttttcccactgatgatctaacattctaccaactaagtatgtatacaaaatggggaaaattaattttttaaagacctagaatattaccaactctagctagctttaaagcaatatggaccacatgtgttgaacacacaaaattatcctgataatcatttaggcatttttaaaataattcagaatatactttaagaccatatactcttagctaggtcattcttataaatatccattatctttgttcttgagaagtactgaaagataaatatccattatctttgttcttgagaggcactgattttatattttttactgataggcagccaagcatacagtcactactttgatttgttaagcctgacccctagaggtcactttttgtactacatcacattcaacttttttttttttccccctagcattgccagattccatgtaaatgttgacttctcctgaaaatgcctttaaattcataagaatttaagaagacttagtaaacaacaattctggatttgtgaccaaaattaatcagtactttcttatccatctctccaaaacctgtgcctgcaatcgaatacaaaaaaaagtattttaaactaagtgatacagtttgatttagtggaaaaattctagactttcagtggaggatcccctgtggctcttgatacctctgtggctgtgaaagtcacttagtagcccacacgttcatctgcaccatatgaataacagtaataaaagcctcactgtggtgtttacaatcactacatgataggttgtacgtgaacatgtattaattctggaaaaatatgtaaacattgggcagtaatttttatttttagaatattttatacaagtaaaagacttaaatcctattgtcctccatttgcctcatgttctagagaaaaccacatgggtctcgtgctgttttcattttccttagactcctacgacaaagtagtgtagcccagctttgtcatgtggctgtaatttaatttccctcatgatctatgggcttctattcctcttgcctcagaatcaatatccatcagttttgctagtaattttcttctaaaatataccaacggaattttctggaaaaacaacagtttcaattttgtgagcataaggaatcttgtttgatcctttctgcattcctgactttcgttcttgctgtttcagatttactattggaagacccagagttcatctaaaagaaacagacgtcacattgagaaaaagatcctcaccttccaaggcagcaagactcatggcatgttgccggggctagagccctttagccactacacactgaatgtccgagtggtcaatgggaaaggggagggcccagccagccctgacagagtctttaatactccagaaggaggtatggaatggacgtgtctctaagatctcaggaacatatggcatggcctgagaggttttgcctgacagaagggctactgatcaaagtatattctggaagccaaatgtgattgaaatttctatagatgaatacagcacacacaaagctaccaaaatgtcagatcatatgtgggcctaagtgtacatagaaggcttcagaacccaaaatgctgctctgaaatgccctctcccgtgacttaaaatttttctccacacacactgtctgaaaccttgttactttgacattaatttggatcattaactttctgacctgaaagaggttccataacttctctgaatgtcagtagcctcatctgaaaagcatgagaaccaaattagataacctaacaaaaacacctggaaaggaaaatatttctataagttatagtttacttctatagtttctttcttagtgctcttttctaatttattagaaagttgaaccgagttagaaggttgcaagtcttgaccaagtggattgggaagaggagggaaaagtcattgcagatatgggcaactgcaagggagagagtaaggaaggaccaaatatatattgatccaggagtcaggggagaaggaatttggacacagggacaagggagccttgtgggtgagggaaagaggggcccatgtagtaaaaaggatgaggatttgaaaaggaaataaaatgggttttacctattttaaattttgcaacaatatgccactatgacaatggccagatagcttctgtagcttgcttagctctttttgataaaagaagttcacagaagatggaccccaccctggctgctgattgaaagattcatgatgcaggcagctgcccagcagcctctgagaaccaccctgcatcccagctcccatctcattgtaagtttttgtcgtcaatctcactgtcccttagagagtcagggctcttcctcctcgatgttttcacaacctggggactgtagtcccttagggagacaatgaatgggtttaatgagctccatgagcctcctaaaattgtatgcaagataaatgtatatttttccagggagtgtttatggctgtcatcagattctcaaaagggtctgtgatcccctaaagtaaagaaccacttattgggttggggaagcttagaagcctagaactatgtgccaggcatggttttaggaccagacaaagacatctaggggcctaaagcagggaaatgacaaagaagatggggataggaagaaatggatatgatttagattaaggaagtggagttagtgtctgaggagagggtggaaatgaggcagatagggaagttcaggttgactctggtttttggctagagtgacaatagggagagtggttccattagttagtttccaggggcagtggtaggggaggtaaccattgtgagagagagctgccaccagccatcatcctcatgaggaagtgaataaaagatgagcagacatgtttcctctggtgatttgccagcctttgccacagagaacctgagacccctcgggccttccccagggctgggggtgtgccaaggttgggcttttgtccattcaccaccagatcctgggcagctgtcagctctcaggataagaacgtttctgcacctgggcatgctggcccaaagcccagcaggcagggcattctgactgtttggagacacctggtttgttagagaaaacagtccttaatggtccagaacacagctgcttccactcagatccagttagaatagtttcacttggtagctagtttgcttctattaagacaccattcatgcgtcagacaagtactgcctctttttaaaatattaggtttgagtccatctaaaggcaaagtcattatgtgttttgagaggatggttttattaaatataaatgtaaatgacaagagagaaaaaggaagagaataactaaatgggtgcctgtcacaggtttgtactaatgtattttcagctgaatcaggaatgagttactgaaactcaaaaccttgaatcgtgcgagcacggtgaaatgtcaatttaatacatgttgaaacattcagaaatctttgtgttgactgtaagttctcactgtaagtccccagtgctccctcgtctttgaagattgtgaatccaacactggactctctcactttggaatgggatccaccgagccacccgaatggcattttgacagagtacaccttaaagtatcagccaagtaagctgttgggaggaagagaaggggaaatatgtttttttattttatttattattttaattgacaaataattatacctcctcatggggtacgtagtgatgtttcgatacatatagtgatcagatcaggggaattcgcatattcatcttctcaaatatttatcatttatttgtgttggaaacatttaatatcctccctctagctgtgtaaggaacaccagaacttagtctttgtatctagctatcattttgtatctcatatatatatatatacacgtatatatatatatacgtatatatatatatacacgtatatatatacacgtatatatatatatacgtatatatatatatacacgtatatatatacacgtatatacatatatatatatatatatatttgagatggagtctcgctctgtcacccaggctggagtgcagtggtgagatcttggctcactgcaagctccacctcccgagttcacaccattctcctccgtcagcctcccgagtagctgggactacagacgcccaccaccatgcccggcaaattttttgtatttttagtagagacggggtttcaccatgttagccaggatggtcttgatctcctgacctcgtgatctgcccacctcagcctcccaaagtgctgggattacaggcgtgagccactgcgcccagccttccctttaactgatatctccctatctcgtcttccctctgtccttcctttatttctgggatcctgtgttctactttttacttctgtgacatgaactttttttagctttcacctatgagtgagaacatgtggtgtttaacttaactgttatcaaaaaatacaagctagtttttctttatatctgtagaatatatacatataacttcaagtgttgtttcagaaagaacttcaaatcttactttttaaagaaaaatgatgtctatgttattaaaaattaagtaatctgtagaataatacagacctttaggagtggggtttaggtgagtcctgtcattaaatcacatatgcattttctacaaatagaaaatggttcctttggcaaaagtcctctgaagaaaaatgtttggggttatttaacaatacaactccacctgcaagaacacaggggaaaaaattctattgtgattcaaccacaacattcttctagtttattagccaatagagaacatactacccccttgtgatatatgatatgaaatgatatgatacgatatgatagaacatagcataggagctgttaaaaggttatcacttagttatgctggggaaagagtgagtgggattataaaagtcaatgtaagccaggttgaacatttttagttgacgtatttatttataatagtattcctatagcagttaatggagaatgcacttgttcattatttcttattgacagttaacagcacacatgaattaggccctctggtagatttgaaaattcctgccaacaagacacggtggactttaaaaaatttaaatttcagcactcgatataagttttatttctatgcacaaacatcagcaggatcaggaagtcaaattacagaggaagcagtaacaactgtggatgaaggtaagatgggtatgtataaaatccatataattataagcatcatgaaataaaaatctttaagtttatgctttttccttcttgctatggaacgtctgtcttacctgattaacgcaaacacttatttgtaatttctcattctgatatataatcagctatttagttcatattggactgatatttttcaactccatgtgaaactttcttaaacttacattaaaatcttggtgtgggagtgagtaagcataatatttgccacacttgaatttgaagttcaggggaatgttgtttcccgtttacaactttatatattatatatattcatgcacaaacatacatatgtacacatacacataatacacacatatgcatacacagacatacacatctatatacacacaaatatatgtaattcgagttctggtcctgatttactggaaaaaattttctagttcacatatcaatttacattttctagcaaggaaatcgaaacagttattaaagagtgcatttattttgtgtttgagcaaaagattttgcattttggtatgtacaaagaaagcaaaatagcccattatggtatttagaaaaggaattaacacttcttttcatactttaaaaagttattctgaaatcttgagattcaatgaaaattatcaaaaatattataaaaggttttctagttttgcatgtctctaaattgtagagttgcttaaggattattcatttgactatctttgatagcataaaaaattgacaatttctatccaaaaattggtttgaaatatcctaagccttcatacataatcaacaagtacgaataatgcaccttaagtaatgtgtttgaatactgggtattcaaactgggtatcctgataaaatgttggtactggatttgaatactagataagtttggggacaccaacatatctttgtcccctatacctgatgtggtacacttcattcttcttgcatgctttagcattttaataagtgtttttgtatcgctatacatgctcatgggtgtgttacatctaactatatagtgtcctatttctgtttcccttcattaaagctggtattcttccacctgatgtaggtgcaggcaaaggtaaaataattcatctgcatgactttatacatgtgtgaaatttgcaatgtgaaacatggggaagtgcagcatgggtaaaacagagaaaatatgctttgaaccaccaaaagaagagaagatctcatccaatcttggctttaaaattaatttctagtcctttctttacaagtagaaagccacatattgaattctcaaaaaattttttcttgagacttatccctggtacaaatcctaatcttagcttctaatactatgattttggctggatcagacaggaccaaaactgtgtatttgtcacagatcctctatatggccatgccacattatttggggttcagaaatattagccctgtgatgaaaacagcctggtagaaatcagatcaaccaagcttcctgttctattctgatttagctgctctccttgtagacacagtgtacactcggctgccattgcacaaaaccgtccatttggaattacagcgtagcaatgccctccaactggtttgggactaagtctccccgagcttagggtcccctgcaagtgagtcttccaggtgacccatatgctcttctcaaatgtgttatcccacccatcctgtcttcacccaactgcctaagtctcttcctcctgagtaatagccaacaatccacaatggattttgttctcctttatttctgacagctctctgggtcagaaagatttgttgggagaatggtgcttgaataagttgtaatatgtcttccattagtggcaatgccaaagatgccccagtctttgacccctggctgctggttgaccagtcagctttttagagagcagtggagtacctgccactgggcactgttttcacgtggcatgcccatggtcaggggctttcgcacatcaggtgagtataaacaggaatgaagaaaaggaagaccaagagaaaaatgtgctttgccctatgttattcaactcctgtgagcttagacttgatagatttattctatttgcttagaaatttgcttatattcagagctttggtaaattacaaaatatcgatcagatagattttggagttattgaataaggactgtagccattttcagtaatcttaagagtattatatttgtgtttttagccttgacgaagttgtaaaaattcaaaatttctatatcacagagcgatgtaaacttacttctatttatttgtatacttccttcctatgataattagatatcaattaaaatcattagtagttttacaataatatattgctttataacttcaattggagcatttcactaaaagcctggccttgtttcctatgcagtggacatgtcactgtggctgtgcctagagctgatagcagagaaattgtgcttcagcaggactgtctgtgaagcaagtctgaattctcagtggacttgtcacgttagaagtagatatgcactccactggaaaaacatcacccctctgtttttaataaattaaaactaaattctatatttaaagagttttggttttaccatttgatgttactaatttgaattgtgagctacttatgattagagagacaagcaaaaatggagtgtctgaaagttcattaagcccccagtattaaaatctgatggatcttagataagaaaagaatagcgtttaaataagggggaaaaaagctaactctgaccttaattttaatatggtttattttaatagtatagcagtagttaagtatggcttacataagaggatattttgccagtaagactttaaactgctcaagcataatttgtgatcctgggttttccttccttaaaaatacttctttttttcaatctgaaaatgaattctatcctcttcactatttcccttctccatatggaatttaactgctctgtgacaggagaaaaattgaagttctccactatcctcccaaattttaattttttaaatgtatcttttacatttttatttaaatcaggacaatagggaataaataagagatgaataaagaggaaacatgtgatatccttagctatagaagcatcaatatggccgggcgtggtggctcacacctgtaatcccaacagtttgggaggctgaggcgggcagatcacatgaggtcaggagttcaagaccagcctggccagcatgatgaaaccccatctctactaaaaatataaaaattagctgggcgtgttgttgggcgcctgtaatcccagctactcaggaggctgaggcaggaaaactgtttgaactcaggaggtagaggttgcagtgagctgagattgcaccattgcactccagcctgggcaacgagcaaaactccatctcaaaaaaaaaaaaaaaaatcaacatctcataagattttattatgaattatgatttcatgaaaagtggttttaattcatttctggtcaaagaggggaaaagaaatgcatctgagtttacatttttaaactttcttacagattttaagagatgttaatgaaacctaagttttcaaatgtataattacaaaaggattataaacctgaaggaaaacccaggataattcaattaactatatgatgccatactaacccttcttcttaccattctcctcaagataattacatacgcgagacctttgagtcatttatttttgtccttttctttgttggattaaagctctcaatatttgtgtaggaattatagttgattggcatattttttcaatttctatgtctctttaaatgaggctgggtgtggtggctcatgcctgtaatcccagcactttgggaagctgaggcaggcagatcacttgaggtcaggaattcgagaccagcctggccaacatggtgaaaccccatctctactaaaaataccaaaattagccaggcgtggtagtacacacctgtagtcctagctgcccgggaggcggaggcaggagaattgttttaacccaggaggcagaggctgcagtgagctggaggctgcactgagccaagattgcaccactgcaccccagcctgggcgacagaacgagactccatttcataaataaataaataaataaataaatgatttcagggtctggaattctaggaagtagactgtgaaggcatgtatagaaatgaaccaaaaatgtgcaggctcaaaaagatttatgttcccagtattgctgatgatccacaatgccatatccattgcatgtaatctggcgctctgaggaccaagcatcaaaatacttttatagggtaattagttggaatacagaaacagggataaactaactggcaaagcaggaatctgcattcttgacctaacttgcagcctactatggtcaaccaattaggagtgagcagagaagagcattgaggatcagctagtggtgaatcccttctgtgatctgactctcactacattattttactaaagaaccagtaaataaaaaataaaattccttttttggcctatacgaaaacaaaacaagacatctagaagcatagaagtttcaatcagttcaacagtgaatgtctctctggcacataaaatgcacccgtgtttgtttaagaagctgtgtataaagacagtaagacaaaccctggccttgacatgcttgaaatctggcaggtaagaccaacgtatagaaagagtaataaattgacgctaaactagaaattggagcaaaatgttatctgaatatagaggtgtgaaccattttttttgccaagcaggatcaggaaaagcttcacaaagaaaataatattgaactgggccttgaagcccagtttttgttttatttttgtcagatgagtcagggagttgcagtgtgtaaagtcttggtaggggtcataagcacatggcgtttgaaaacataccggatgtctgggttataccaagcggtccacttaggctgacttgtagagagtgtgtggaaaagagaagaccctgagatgggactggagcagtgggcggggccagatggtaacagctctgaagggccatgaatgctttgctaaggaatttgtatttacctgtaggcagagttttaaacagagaagtggctagataagagttgtagtttcagcagctaaaatgtaggtaactacactggcggtatctacagaggaagacttacagttgggcgaggcacaccggaagcagcccgttgggaaagcccagagaaaggggacactacagctcccttgtatggtacaacataggtgctctgtgagtgagaaggtggatgagtggggattaaaaggaaggagagttcgaattccctatggtaaaagtggctaaacagcatgccttaggaaattgtggtatcttttctgggtatctttaagaataagctaaatgcaaatttccagtgtataatactttattattaactataattagtaatataatgctgtacattagatctctagaacttgttcatcttataactgaaagtttgtaccctttgaccaacatctcccatttccccaacccccaccccacctctagcccctggcaaccactattctacactcgttctctaagtacgacttttttagattccacatgtgaaccccgaaaatctgagacaggtttcagttaatttagaaagtttatttgcccaggttgagaacatatgcccgtgacatacccatagctcaggagaccctgaagacatgtgcccaaggtggccagagcacagtttggttttatacactttagggagttatgacacatcaatcaacacatgtgagatgaacattggtttggtctggaaaggagggacaactcgaagcagggagtttctaggtcataggtaggtgagagacaaacggttgcattctttttgagtttctgatgagactctccgaaggaggcaatcagatacgcatttatctcagtgagcagagggatgactttgaaaagaatgggaggcaggtttgtcctaagcagttcccagattgacttttccctttagcttagtgattctggggcccaaagatttattttcctttcacacacatttaagtgagatcacgcaatatttgcctttctgtgtctggattattttacttagcatagtatcctccaggttcatccatgttgttgcaaatggcaggatttcctttttttttaaagtcggaataatattccattgtgtaaatatatatatatatggtaatttctttatccattcatctgtcaatggatatttaggttgttttcatgtcttgactattgtgaataatgctgcaatgaatttaggagagtcgatactcgtagagataatgatttcatttcaataaaactagaaacaaaataataataatgaacagtttagagaagaaactctgagaagggagcacccatagaaaccaatgtaaaatataagaagaaactaaatgcttttccgttagaagtattttgctcttctgttagtaaatgctcttgtgttagaagtattatgtttctgccttgaacatcttccatattactccaagattaaattcctgtttcaatattccaaaattttttaagaaaattaatgtttttcctgggttgccattgatgttttacacatgtgtgcatatttactgtcattgattgatcatattcctattattttacctataagaagaaaatctcggaaaactaaaattaattaggtccacagaaggactctgcataattcagtaatcagttttgccctctgctgtttccccatgcttagcacaaagagatacaaaatttgcatgtgttgttgaattatatttcagaagtcaaaagcattatttaactgctttaatatctttcttttcttaattctaagaaatgtaattttattacatttatttgaacaaaggtcttgagcgtctacattttataaacatatcttagaatataattttagtgtcttggtaaacctattgatgctgtctgattgactatcctagtaaattttatgtgagataataaattgatcttcttttttaactacccaaattaacacatctgtaaatgtttcatttttagtttaagctattgaggtaggactgatagaattgcctgcctcaggtattcaaataacattttttaatgactttagatgttgtctttacccagtagcaagcatgtagcatcatctggtctccataatttggatttttaagaagctatttaggttgcactatgatttttcagaaaatgctttgtaacaaacagttaacaggtaagattgtcttgctctctaggaaatgttacatgaaatagtttttactccttttatttattctttcttaacttctgatagaacacatctggaaattccttttgcagcttctcttccaacatacccttaccatccatcattctctaaagcagggatttcttacctggggtccctgagtttcccagtgatactcaaagaagtctgttttttaaaacagatcaaaaacgctgttcaaaggggcattctctgtcacaccaacacagattttttaaagacctgcattgagatgacaaataggtttgaaaagtagccacatagtattgggttttaccttggcgtctctgacattccatgatgacgtctgtccctgggattgttcagcaatccccctctccatcacactttagtaaatgaagacggtgacatttcccgggactgtatctaatggacaacagttaacattgttcagaacccatataatagaactcacaaattttaatattatgcgtcattatttctgattattaatttcctagtgctgaatttaagaaacaaaaacctttctgtaatgaaagcaaagcatgagtgaaccctaaattgtagcagtaaattctatttaattctatttgcacaatttcagagtatttaaacttattttatattcgtgtgtatggtgttgcaatatgattgtttgttttatttttctattgtatgtttagttcaagcagtaaatcccaggatcagcaatcttactgctgcagctgctgagacctatgccaatatcagttgggaatatgagggaccagagcatgtgaacttttatgttgaatatggtgtagcaggcagtaagaaacaatttcattacccgatttttaatttgggggatgcattttttaaaagattaaaaacattcttaagaatttactatggatcatcttgaaaaataacttgatccaattaaatgaatgagttatctaaaaaaattatagtgaaccatcagcctaccacatattatatgtacgactaggaattgcttttttatgttattaataacagagggcatatgttccattacgtatgttattttcatatcatagtacttgaaactagttctgtgcccacaacacataaacaagagtaagaaggaataattatatttgcaagtacaatagaaaagaagaaaaggtttttttttcaaattggatcttgaagtaacagaaatcaaactgacttgaaagtattcattttgccctgactagcccaacagaattttataagaaaccgcagaaaattaatactttgggagagcattcattatgttttaacgtttgatgtattctcaagtcaggcactcttcgtagatcctggccacatctactgggagatggggcagctttcactttcagcagtttatgaaaagccagtacccccctcctaagtgcagtgtgcttacatagaacaaatgaggtggccaataaatgtttgtgacaaaatgttgaacagagtccaactttctgtttaagcctttatcatgcaagtaaatgtttttagaaatgacgatccctttagaaaaaccggtacttgggaaaggttgaatcgattaattggatacgttggaaggcatttaagtttactaaaagattcatcttgtgaatcataaaaaaacaattcttcccatagttcacttaagctaattaatgtgtatcagttcttttgagaaacatctttagagaaactcaacagtttcataaggcaaggtgcagataaagaaccttcctttgtattaaagaggagaattaatacaatgggaatatatacaattaataaacaagctagatacccagtctatttttctttgaggatattttcctgtaggtcattttaattgatttgtttgacatgactacatttataataatctaaaatggtaaacctaagcatcctacatcttgtctttagcttataaagaattttcctttcttgaagcattaagtgacttctggtcccttaaaatattcaaatgtgttgtttttgcaaaatttccataggcaaagaagaatggagaaaagaaattgtaaatggttctcggagcttctttgggttaaagggtctaatgccaggaacagcatacaaagttcgagttggtgctgtgggggactctggttttgtgagttcagaggatgtgtttgagacaggcccaggtgaggctcacaccacacctgttctggctcccgctcagaggtggaggccgccaggtgctccagctggagatgggggctggtggagctgtgttatgggtagggcatgaatgtctttctatggggccctgttgggttgggagttttggtttttgtctttggttctttatatcaaatgaattacggaatttagcaaatcatctagccacattattaccaaaaaccatcagaaaaatagacttaaatatgattttaacttatattatttaaagaattcaattgttcatatcacatgtataaactttccctcagtgttaaactgaaattttttaagtgcttttgaagatgaaagaacttataagaaagtcacaattctggccgggcgcggtagctcacgcctgtaatcctagcacttagggaggccgaggcaggcggatcacctgaggtcaggagttcgagaccagcctggccaacatgatgaaaccccgtctctactaaaaatacaataattagctgggcatggtggtgggcgcctgtaatcccagctactcaggaggctgaggcaggagaatcacttgaacccgggaggcagaggttgcggtgagccaagattgcgccattgctctctagcctgggtgacagagtaagactccgtctcaaaaaaaaaaaaaaaaagaaaagaaagaaagtcacaattctttatttcaaaatggcctacaacccagcagaaccctgcagtcagcttagacaactgatacagatattattacatttgtatggaacaagaacttgtacaattcatatgctacattttttatcacaccaaattttactgcctgtatatatttacttatgtgaatattaacaaaatatgcaagtaaaaagtgaagtttctaaaataaagaaaaatgttcatgtgaaacatgagagcattcgtatttgctcgctagatggagaacaatccctgcttacttacatttcaacaagagttgtttgtggtacatgttcactctgtggttcatacccccatgttattttcattcactccatgcattcttaaagaaatgtgcatatcctgtagaatacattacacaatgtattttttgtgactttcattaacaaagcattatgatttttaaagtcagtttttacaatttagaaaaatataaatcataagtggtttttaaaaagaaacaacaataatgtattaaactatattttaaagatattcatttgctaaaatcataatgttttaagaaaaccacacattttattctgttctttgtatttcatatccatttatgtatatagtcctgggaaaccagtgtgttaagcttaaaaggggaatatctaatcaattcatagctagtttacaaggtttttgtttgttattgataacttttattttcaaaatactaaaagtcaagtagatattatcttcatatatagctggaatgctaataatagtaatgggactagcatttagtcagctctcctatacagcaggaagtggttttctcattcagtccttacaacaatcctatgatgtaggcaccattattactccacttacccctcaagtcagagaggtcgagtacctgccaggtcgcccagtaggaacgtgacagagctgggattagaagcttgtcgttccatctccagaagaaaggcctcactatacccccactgcagggtcacaaaggtccacaggccaaggaggacaggctgtctcagaaagggcagcttcggtcaacacttggtatatccaatcagtgattctggacccctgcaggctgcatgtggttactggctctggattatttatgaagaatctactatgtataaaaatgacctgttgttaaaattgttagaaatgtttaggaaaggaaaaagtgactttatccaaagttagattcaccctcaaaatcaagttgtagcatttgttgtccttctataggacaaaagacaactcctttagaaaattatttttcactcagcagtgtaatgcctacagttccagcagcaactgccagatagtttgaggtgaggaatcgtgataggtgggccttcttgtgtgccagtgatggagagacaggacaaggtcacaaccagttcttgtcactttttacatataaatgtattaaaaagaacaaatattgattcacctctagtgaccttagttaacacatcgcctgtaagagcaaatgctgccagcattctagaatgcctcagtttaccattacgctgcctcccttttcccagttcacaatgcttcatcctttggggctgctgggttaactccagtgtgaaagcaccgtcttccactgcccctgctcctgctcctgctcctcctctcctctcctctcctctcctctcctcccgctgggttccgcggtgtaaggatgtcaatatttggcatgaaagcctatcgttggctaatttttaaactctgcattcatgatctacttctctctctttctctgatttctgctaattttaggacactggactcaactttatctatagttatttcatcaatcttcctaccattacaccatctctcccttttataccctggatttctaaggtatatttcttaatttttttcctatggcacaaactgaaaaacagacgagataggcggtgtcctgatgctgcgcttcttccccgtactactggtatgacctctcattaccccaccccacctggtatgacctctcactaccccaccccacctggtatgacctctcattaccccaccccacccggtatgacctctcattaccgccaccccacccggtatgacctctcattaccccaccccacccggtatgacctctcactaccccaccccacctggtatgacctctcattaccgccaccccacccggtatgacctctcactaccccaccccacccggtatgacctctcattaccgccaccccacccggtatgacctctcattaccgccaccccacccggtatgacctctcattaccccaccccacccggtatgacctctcactaccccaccccacccggtatgacctctcattaccgccaccccacccggtatgacctctcattaccgccaccccacctggtatgacctctcattaccccaccccacctggtatgacctctcattaccccaccccacccggtatgacctctcattaccgccaccccacccggtatgacctctcattaccccaccccacccggtatgacctctcattaccgccaccccacccggtatgacctctcattaccgccaccccacccggtatgacctctcattaccccaccccacccggtatgacctctcattaccgccaccccacccggtatgacctctcattaccgccaccccacccggtatgacctctcattaccgccaccccacccggtatgacctctcattaccgccaccccacctggtatgactgctcattagcgccactccctgcccccgtttgacctctctttagtgccaccccatctggtatgaccagacgtgacctctcattaatgccatccacctccccttcctcttttacctctgtccctcaattacccagtctttcttatcatcacaaaggatttaaaacagatttgttttcacgaggcccaacagcttttttgtcagttgtctccaaactttggttaaggtcacattttgctcttcctaaacacatctaagcgtttgatgtctaagcatttgaacaggacattttcatccatagtgcattcttcataaatagtagagaacaaataaccatttccctcaccctgtctctcttctgtgttgattctatggttctgaggactcaagagcattttcctcagagacctcctaccacagagcacagatatccatgacagcaagcaacgccagagcagaagactgttgtaaagctgacttccagaaaacaaagcaaatctcattctcctgccatattttctgttttcatgttctttatatgtgtttaatttatcattttgtggattactcaaataatacatgaatataattttattgttaaaaaaaatcaagtaatgaagattctcttttactccgctacccagcccttcaatgggtgatatccacccactgaaactgattctagaaggaaaactcccataggtttaattctctctctgtggggtatatgtgtgtgtatgcgcatgtgtgtgtatgtgtgtgtgatgcatgatcatggttatggcttggatttgtatgtcccaggtgattttagattgtcctgaaaaggcttcatgcctattttaatcattctggaatttaaatcttttcttttatggatggaaagtcaatagaaatttttattccatttacacagtttctgttttatatcaatttctggtgtacttgtgtgtgtgtgaatgtgactgtgtgtgtgcacacatgcacctattaccatattgtgtctgcctattttaaataatagggcagtgaaatattcgatacttttttctttagacacagaggcagaaattcaaagtcagtgaatgtggatgtttgtgtaccacccatcaaacatccatccagtttttccatggttgcatagcagcaaactgccagtcagtagttcgattttggcagtcaccatccttgtagaacaatatctctgctagtacctgagtatcttgtttttccctttttagttgcatttaattagatgaaaaatgtaaatgctgaatgtatttatgacaaggctgtaaatcagcacactgaaaacaagaactatagtcaaatgcttaagagacttaatgccatttggtttttggttcagttttgaagaaaaagcacagaccaggcattaattgaaagaaatatgttgccaaagaggatgtaatgatggacttttaatacctttttgcctgtctcagaataggaagtgcctatagcattttattctttaacttaagatttttgcagatttggtatctggattgtttttaggaatgcattacagcagtataatataatggctagtagcatattttctggagtcagacacaggttgctccaactcttgggcaagttcttaaccttctctgggcatggatttatttctgatgcctacctcagagaattgttgtaaagattaaatgagatgtgccttcagcacagtgcctagcctatggtaagggtccaaaactgttagccatcagtgctattaccattgtcctcatcttcatcatcatgactatggtatgtgtatggaaaggggaaactgcctaaactgatgctttacttgtgtgtggctatgatacagctcaaaacttctctaactaataaggcacgagggcctattgggaaaaggctaccagcctttgacttgtatttcaaataaggtatttttgcttctcattttatttcttctacatatgtccatattttttttaaccttcctcttcacacttgatttttagcatttcctttttctccctaaactttgtatggagaaaaagaggcaatgagatgctatttttgcaacattagctgaacctgggatatgcgtagtcatgtttatttctgcatccagagatcacacacacctaactcaactgtgtaaaatatattcggaagaaattcagtcaaattaaaagcatgatataagcatgcttatagagtcaaaagaagaaaatgttttatcttgattatggtcaaaagagagaaaataaaggtcttttaaaaaagaatttatactagttaattaagcaaatctgcatgggcatgtctgaatagccattgatgctgcactttttcccataagattgatactttaaaataatacccgaaatgctcattattctgtggttttcttagaaattttgcatattatgactgatggaataaggggtttcacatttattaaacagaatagatgcaaactgaaaggatatgtatacacctaagtgagtactttcttttcaaactggtcatgtaggcaaataatgagttcactgactgagagatattccggtcttttgaatggatccttagcaataacgaatattgattctttgagggtggatttggtttttcagaaatttccactcagaaccaactcttgtgaatgagatgaataacaaatctaagtaatattttgggtgcaaattgagatgttatataaaacaatatggctgttttcctgatctggaaaggtttcttgtgtggaccgttttcttttttaacagatttctaaaaaatactgaaaatggcaacagccttgcaaggacagtttagcctctaaaagcagttcctttgaagagaaaatactcaattagatgtatacattctgttctgtttaaaactcagttttgtatttttctcattatacttaatgtaaaatgtatcctgttaacagtgaatactttaattggtttgggaatttgtttttattgagaatatatagtgaaaataactgtgaacacagtgttcaccaggggtttttagcatttaatgtgatgattattcagatttctctacttgaattttttaatgaatgaagatttttcaaagttaattattcatataattcctgattaataattgacagatcctaatttggggccacatgtaaaatatatgaaagctcacataacgtggcaattttttactctgagagactgcagcagttcccatctccccttaacctattgccaccaacaccattgatttgttttccagcgatggcaagccggcaggtggatattgcaactcagggctggttcattggtctgatgtgtgctgttgctctccttatcttaattttgctgattgtttgcttcatcagaagaaacaagggtggtaaatatccaggtaagaaagaaagattaaaattgctttataatgctacataataatccattaaactaaaaagatcatgggggaaatcatgtagattgtaatattttgtcttcccagagccatgagtttggactttctcttcaaatgacttttgatccctttttatataatggcaatctaaacattgtcaatgatcataaggcatttggaggagtaaatcaatcagttctctgaaaacattagtgagcctactttcttagactccacataagttatggatgctgaagtaacacctaaaaccaactggcaaggagagagttgcagggaaggttcatggagtttttcaaaggaagtaatgcatgaactaagtcttcatattgtgatgtgtaacattgctttccctataaggtaatggtttattcaatttagtgggcccattaaatttatattttctttacctgaccattttcccttcagtgacaagaaaaaaaaaatctgtgagagaatactcttacaaaaacaatttgcaaccattaatatagttaacaaatagattggtaaaatagggggaaatcttagaaacttaaaaattatttatcaggtgagaaactagtcaactttatgtgttaaaaaatgtacattctattgggttgcctcaaaaataactaaaataccaaaatatatgcatggccaccatatatatggttatacaacatctacttgtgtatggaattatttttcactgctgtatatctcaaagaatgctttcatggactttgaataagaaagaacaggatcaacagataataataccattttggcattttttagttaaagaaaaggaagatgcccatgctgaccctgaaatccagcctatgaaggaagatgatgggacatttggagaatacaggtgagcccctgcttctctgctcttcatcttctctgcccacatgaacacagtcccgagaatagaactcagccagaatatgctctgcctggcatctcatattttcctcaaatagaagtttagggatacttccatgtatcagtgtttacatgtccctcatggtcaaacattttcatttttcattgaaaaactaaattttgattttagtcataattttggagatggaatgtctcccactttgtcatattttccatgggaccatgctgtattgatcaatctagcaaagccaatatgctactatgagcattaaaacaacaaaaaagaacctccaatgcctgcattgtaaagaaagctatacttgttatcttctaaacatgctgtaataaaaccagtgtaaacacactttttcatctagaatttgaaactagttttcctaaacaatacccatacccttgccctttaatcatgaaatggtgactagattgttttacaagctgttacttattaagaaatgtcgtagccctctaggcaatgtgttactcacagaactttgataatacattcttggcttgactccatcattaagggaaaatgttaatataacctatgtgctaaattttttaaaaatcttctctttaaacaaagataaatcttttcaagagaaggaaaagattactttagatttgtttaaattaaacagaaacaaagtacgtatttatttaaataaaatgtgggcattctgttattctaaaagtatacctttttaaaataccttttgtaccttgtttttttctttttagaagccccttgcttatataaaataccttttaaatatgcattaagcccattttgagacattgtttgcaagatgaagaggcttttaggtgaaataaaatatttcactattgggattaccaggcaacatttgtagagaagatatttatgttaagttttacctgtctctagagctcatttttggtttttccatgtcactatcatgtcaatatcatagaatttcatgtgacataatcctaaggataaaaaatgtagaactgattgagaaaaagacatatattttcaataaaatcattttcatatcattttccaggcagatacctgtgtttttcctttattatctcagcccctaagtttttatattgtgatctcttaaagagagataactatggtttcaaaaagttctcagaatttctgtatctcatggtacagaaaaatgcatagtgagggttgtcttgatgtcagaagttggttctggagctgaaggtgtatgaaaacctcatgcagcgtccacacccagttcacccaagagggttttgtaacacattagagcagcctacagaagcccgtagcctagggcatctggatgagtagaactttgctgaaataattcacccttctacatgtttctcctgtaaagcaggtaagcttacaattactaaataacttcttatttctaagagttcttgtggctgtaattatctacaggatatgcataccactcccttatgtattgtgatgaagcaaaatctttaatgtggccctgaaaaaaaatgtatttgcatgaattggaaataaagcattgtccttcatacattctccacatggtgatgggttcctgttctacattatcatgcctcagtgaatctagcaacatactactcaccacctgggtctcaaacatcagcttgctcttacagcgatgtgaaaccatgatctgaggtcatgtgactttcccagataactgctgcctactccattaaaacttgactaaaatcaaggttgatatttgggtgatggtatactggaagcccaaaccccaccactatacaatgtatccacgtaacaaacttgcacatgtaccccctggatctgttctaaaaaatggaggttgagttttatgaactagcttggaatcaaaagactgttagttttactttcaactcagccattgcctgtgattcatagttctatgatttctgttttcttctatgagccatctactaacaactttaatagaattttgtgtctggagtagtacgtggcaagtatttggttactggcctcataagcactgtgtttacatctatttggtcatatgtctttgtcttagtgttaatttatatgtgctatgttggtaaagtgttttcaaatagctgtctttaggccttagtttctcaggaaagaaagactttgcatttgggcttcttgagtgcaaacccaattgacacgaagacaaaaacacttgtacatttgtcatacatgtaatgacataaacttgggaggtgctaagggaaataaggttctgatgggtgtcttcaacttgaaacataactcaatgatgtaattttttcaatgaaactaaaagttcataaggacaatcccacaagcaaaatcacttccccaaaattccaaccacattttttactttgatttacaaagatacggctttgtcctttgatttcctgacactacctcagaatgttttccctttggtttattttctatttgaagaaatccaaaaagtgtttattatcttagaggctgtaattaatgaaaacagttccaactgtttattaacagaatcttttatttttaatacatttaagtgtcattcacttcctgagatcaccaggttcctgtctctgttttgcactttctggaagttttgagctctgtattatttattgattcttattctctttcattccaaaaataaattattatgctgaccagacacatacaaaattaggactattgcctaggtgtaaattaattccatttctgatttgctcattctccagtttgatgatgaaaccgtttctacatggctggctctaagccagatgatatttcatagtgcaaagagggatagaacctcactggtggccaaatgtgattatatgctataaccctgtgcccctactctgacacccacccccaagcagttaccctctgttggaagcctgcagctttctttgtttgtttctttaattatacagacagtaggatctgcatccttactagcatatagaaaaatcagagaaacaatgcaaccaagagtgtaagtatttttttattctttagatccattttccttaaaaccagaataaacctaggtcataaaccatatgcccatgttacttgaactcataacttactacataattggtggctcttgccacatgaatcttgtcattcatgtgaacatgggcttgtggcaagcatgctaacccatgctcataaggcttgaatgatgccaagatgtgtcacattcgttatatacattagagttattttgctctcaaatgtgaactggcttgtgagtaaaataataatggacttttagcgagtgggtaggaaagagtatttgggtcatgaatgttacttgagctgcaatgtggtttggccatgggagggtggtaacaacaggaaaatcagacagaattatcacagatttacctgctgttgccgaattttactcagtaggatttaacagatgtgcacacttctgaacaaagtgctattgaaaaacaatttgaactccctaaaaatttattcttagggaaagagaaaggaaaggatatattccaatgatttgtctgccgtcataaaactgagggaatgaaatgttttatgttagaatttttaaaaaaattttctaaaatgcccactgtctcctctattattttacagtgaactcattctgccagtatttatgagtgcctactgtatgccaggccttgggaatattcaaaccaatagaatttggtcccacacagggagtttatagcctagtgatggatgcagggaagtaaaagaacaatgaccagagtgtgaaaagtgctatgaaagagatataactaaggtaccaagggaacagaagcaggaaggtaaagccaggtgggcagcataggaggaggatggtacagggagtcttcccaggggaagtcatgcagttttagcattgtgataggaacatttctttccactgcacaatgatcctgattcatgaatctaagtatcaagaatatacttgatattgtatcaatacttgtatactggatactttgtaggtgcatatatatatatgccagcactgtgaatatgatttatataatatgtatatattttattttgaaatccattcaacctttgacatccaaaactaataattaatgtctgatacacaccatccttaaactttctcattaaaatgtgaatgaatttttacctgttttgtaaagctttgaatactactgctgcctactccattaaaacttgattaaaatcaaggtctgctatatgtgtgtgtgtgtgtgtgtgtgtgtgtgtgtgtatatatatatatatatatatatatgacttttaaatcatcttctatgacttcttgattcatatcatttgggaaactctcctttcatatttaaacttgacatggcaacttcactgaatacaatgtcaaaaagttatttactatttcattacaaaattcatcttggaattgaaaaaggcaagccctcatactgtgcttctcatagagtcataaccactcactacacctggaaagttccgcgtgtgtgttgcacaaggtatttcttaggaaaaaaaaatctctctgaagtagggacctggagtggagagaagagatgtgatgggagatggacatgtatgcttgttgaacacaaacccagcactgtgtgtatgacttatataattttttctcatttaaccggattctaattattgaagtatatgatattatatcacaccacttattaaagactggtcttcaaaagatctcactgcctttgaatggcttttcctggaaagactctgttggaggagggagaatcccacttccttctcttctttcaagcacagcccgtgttgctgttgattctctcctccaccacagccgttaagctggcgtgaatggatgttttgggggagccccttcttggctggtcattaatgataactgttatgattttgtatgtaaaaacccacatgaatcaacaagcaaatattataataagagagtttagtaatgttgctcgacacaaaattaacataaaagtcttatatttctatgtatcagcaagcaattggaaaataagactttaaaacttattctagttatgatagcataaaaatatgacataggaataaagctaacaaaaagatcttccaccagtttcaagaccctatattccattccattggtcaatctgtctatctctgcaccaagactataatgtcttaataatataggttttaataagtcttgatatctgctaggtccagttctctaactttagttgtcttcttcaagaaccttttaaatattcttagcccttttcatttatttgtacatcatagaatcagcctgccaagatccacataaaaacctgctgagctgttactggaaataaattgcagctaaagggcaatatggggaaggttaacatatttactatatttgagtcttctatccatggatgtagaacattcctccattcattcagatcttctttaataactctgaaagttttattttcttcggaggtcttacacatatttttgttggatttgtctttatatacttcatgtttatggtctcataaatggaataatattttgaattttatttcctaattttttgcaagaacataagtagaattgacttttatgctaatcttgtatcaagcaacattattaaaatctctttatattctaacatttacctgtagattcttctggattttttatatgcacaatcatatcagttatgaataatgatagcttcctttcatctatttctttttcttatcaagttgcttaggacttttaattcagttttgattagaagtggtgatagcagccatcattattattatttctgatttcaaacaaagttttcagtgttcaccattaaggatgatgtttactttaggtttcttgttgctacccttaatcaggttaatgaagatacattctattcctaatgttaggaataaaaatacattctattcctaatgtttttatcatgaatgggtgttgagttttttcatatacctctttctaaatttactgagattatcatatttctattttcttctgctaaaataatgaattatatgaattgatgttttaatgctaaaataagcctgcattcttggaataaacccaacctggatatgaaatattatctttttcatagattgctaaatttggtttggtcatggtttgtttggggttttttcatctatgttcatgaatgagattagcctgtagtttgactttcttaaagcgttcttattggttttggatatcaatgttatactagcctcaaaaaatgattaaaggagtggttctcatgacatattcaaactttaatatctcaaaatggaaccattgattttcccctcccaacatgctccactccatagtaacagtacttccaagcttcctgttgctcaaaccaaaaatcctggcaccatctttttctctgttattccatatctaacctatcagaaaatcctgttggctctaccttcaaaatatgttcataatctgagcattttataccacctccagtgttccactctggtccaagtcacagtcatctcactcctggattattgtaatattctcccctgactctatagagcagaggtt

SEQ ID NO: 8317 - DNA, 427 bp, Homo sapiens
gaggaagattagaattagttttggtactatccagtttgagatgctgtcatggacaaccaagtggaattgtcgagcagacagttggacttcctgagtctgcagttcagggaagaggtctgggctacagatgtaaacatgaaagtcatccatttataggactggagatcatccaaagatgaatgtggattgaaaggagaactccaaggacttagttttgaaccactgcaagacatataatatttttagttcatctttgtgtttatagtgcatatcatggtacctggcacatagtaggcaatcagtgaatatccaaatacctattattttacaagggtaaagtgtgtacacaccacagaattttagtggacgcagagggtatgcactgaaaaatatgtcttcctcccgcccctgtctcccagctcctctg

SEQ ID NO: 8318 - DNA, 427 bp, Homo sapiens
gaggaagattagaattagttttggtactatccagtttgagatgctgtcatggacaaccaagtggaattgtcgagcagacagttggacttcctgagtctgcagttcagggaagaggtctgggctacagatgtaaacatgaaagtcatccatttataggactggagatcatccaaagatgaatgtggattgaaaggagaactccaaggacttagttttgaaccactgcaacacatataatatttttagttcatctttgtgtttatagtgcatatcatggtacctggcacatagtaggcaatcagtgaatatccaaatacctattattttacaagggtaaagtgtgtacacaccacagaattttagtggacgcagagggtatgcactgaaaaatatgtcttcctcccgcccctgtctcccagctcctctg

SEQ ID NO: 8319 - DNA, 32192 bp, Homo sapiens
ttgagatggagtcttgctctgtcgcccaggctggagtgcagtggcgcgatcttgggtcactgcaacctccgcctcccaggttcaagcaattctcctgcctcagccttctgagtagctgggactacaggcacgtgccaccacgcctggctaatttttgtatttttagtagagatggggtttcaccacgttggccaggctggtctcaaacttctgacctcatgatctgcctacctcggcctcacaaagtgctgggattacaggcatgtgccactgtgcccatccataattttctttaacttctctgctacttaaaaaaaaaaaaaaaaaaaaactagtatgtactttcataaaagcagcaaaactgcttgctttaaaaaaagtgtgggggggtccggtccatgtaaatctgggtcttggtatcgttggcagacctcttcagctcggatgcccggcagtgtcatacccccgcccctggtccgaggtgggcagcaggcgtcctcgaagctggggccacaggcgagctcacaggtcgtcatgcccccactcgtcaggggggctcaggtaagcagggctgtgcacatgggggagacctggcagcctcagcagtcgtctaccttgaaagtagggcccttcccagtccttgggggcaaggtgccctgtgccttccggtcccgctccattgttgatctcagtcagatttcttgttctccccaccctaccccaacagcaaatccacagcattaggcaacattccagcacagggccaccgcccctcctcctggccccccgggcgtcggtgcccagtgtgcagattcagggacagaggatcatccagcagggcctcatccgcgtcgccaatgttcccaacaccagcctgctcgtcaacatcccacaggtgagggctgcgccacactgtgccagggagagtgtgtgtcccacctgtgactgctccccttggacccaggttctggggcacagtagtgtttccctgggctgtgtggcatgacctgccttgctctttcagagccaggcaggggcttggacttgagctcctgggggccacagggctgtctgggtcgtgggcagaagttttgtgggcagacttgctatccagcacaggtgggcagctgacgagaggggcgatgcacggacctgagctgaaggtggggtctgcttaccagccccatggctgaggaaacagcatgtggcacacagcaggtttagggggatagtcgaggcccaggagaggccggtgatgggcccggagatgccttggggggcaccggagcccatgccgccctcccggcagtggcttcttccgattgcctcctcagcaaatgttctcatgtcaccaggtgcgcctattcttagccgcacgtcccttcacctctgtacagagcctctcagatggggagggtctgtccccacccactggaagtaggatgggaagagcagaaccaaggggcgggtgggctggaaacaggcgccttggctgacagataaaattaccaggtctgcaggggcttttgttggtgggcgtgttcgctctttcttccctctttggcacagtttgttcttgcccaccctcctcagacaagagcaaggctctgggcagtgtccctgcctgctttcgaaggtcaggttcgagtgcagagaagatggctagtcctggactgacccaggcaggtagtttcatacacctgttgactttttttcttttttggagacagtcttgctctgttgcccaggctggatggagtacagtggtgtgatcaaatatctttattttattatgagacaagagtctccctctgttacccaggctggagtgcagtggcatgatcttggctcactgcaacctccatctcccaggagatactcctgcgtcagcctcccaagtagctgggactacaggcgcctgccaccatgcccagctagttattgtatttttagtcaagacagtgttacaccatgttggccaggctggccctgaactcctgaccttaagtgatccgcccgacttggcctcccaaagtgctgggattacaggcgtgagccaccacatcctgcccacccgtgaacttttatccagtcctttctcttgtctttgtttcctgagggtgggcacaggcagtcagtggcagagaaggtggtctgctcctagcgtggctgggggaggctctgaggggaaggaggaggggaactggctggtcagaggtgagggaggcctgggtttggtcttggttgctgaggggacaacaaaccagcaggccggtctctgggaacctttcttggggggtgggaccctgggaaggcatcctgcacaccctgtgccccacagtgtggcatttgcaagtcattgggtgtgtccattttctgggggtggggtgcacagctttcatcatatttccagaggggtcctcagcccctaaaagcaataacattggcatgtgggcagttctgggtttcagggagagccctatccagcagttgtggggctggtggagacagtcaagggtctgctcctgggatccaggcaggactgtgaggtggcactggagcggtgaggactgggtggagggcaaggggaagaggttggcctaggagctgcttcccccatcgccccataaggactcggggactacctcaaacattagcatcccaggggagcacatgcagagaggctcatgggggtgctgcggtgagcaccctcttaccctgtgagaaggcagtaggccaggccacagccagaggacagtggccctgctgggcagtgtggtgaccaccagaacctggtgacagccacatgggtgccctcacattcacatggcggagcacagcaaactatagattttaagtgtgtgcggtttatctggtaaacctcggtgcacatgtgcagatgagcagccactacctagggtggtgtgtttctcgcgcctctccctgctgccctggcttctgagagcctgttatcatggctgggttcacttttgttaaggacgccatcgtcaagggtactggttagtgcagttgacaggacctcgggcttcggggcgctggggagccttcctctgggcaggcgcacggagcgccctgactgagtttttgtctcccaaagcccaccccagcatcactgaaggggacaacagccacctccgctcaggccaactccacccccactagtgtggcctctgtggtcacctctgccgagtctccagcaagccgacaggcggccgccaagctggcgctgcgcaaacagctggagaagacgctactcgagatccccccacccaagcccccagccccagagatgaacttcctgcccagcgccgccaacaacgagttcatctacctggtcggcctggaggaggtggtgcagaacctactggagacacaaggtgagtggcctggacccagccgggctgcttccgcctctggcctccaagggtgctgccccgtgggttctttccaacacacagcagaggctggggcagggctgcctagccaggatggtcctgggtgggcttggcagggacaccgtcagtgccactgtggagtctggacactgtcctccggttggggcctctgagagccaggccccgagaggctcagggtccagggggacgggcagtagtggcctccgtgacgttggcgtgtggtggggtagacgtgagggtgcacatctgtgggaggctgacagggttggcctccacgaagggctctcaggccaatgtggagttgtgacacacaggcagaaccttccagagcctcaagtgctcccagcttctgaggagggagagggacagcccaccccactgcccaggggcaggctcgcatgatcaccctcttcaggcagcgtgggagtgcactgtgtcctgggggatttaggaataaaaagacatctacggggtgatcacagcattggagacggctgggcgggtggatctgagtggccgagttggcccccagggagcccctgctccccagacatggagaccaaggacgtttctgcccacaggttgaggttggggtgacacgagtaggccaggaggctgagtcctctcctggtgactgcatcagactctcagagcagaggagtcggcaggactgtgaggggcccagggcaggggcagggcctggcagcctcagagccttcccagcacagacttgggagcagcggggtgggtgtgtgcagagaagcacctcccgcgcactgcccaggatacagagggaggagggcatgggggccaggtcgagctgtgcccccagcacctggggttgggaagatgctctccccactctcttagggtactttggtgcatcaactggtgcccccatgtggttgcacccagggtccccaagaggcagagctctccacacttgcgtggggctgggcctggcgcagcctcagagtggccctcaaatgtagagttgcttgtaacccactcccttgcccctcagtcgctctcgtaactcccggccacaggatggtaccgagactaactgcagcgtgccccaagggcatggcctccagctcccagctgcaggagggacctgggggagctatggggaggtgaggctctgacacagcccggctggtgcctttggtgcctccttttcgacaaggtgatgtcggcaaaagagccacctggggctgctgtaggaaatgaggattgggggccgagttgggaccagtgcctctccttgcccctgcctgtgcgggcatccgctctcccagaccagtctgtctctgccgttccctcatcagggctcagtctccctctcctgttgccaaggataggacctcactgtgggagagactttgagccctgctggaggcatctcctgacacctcccagagcccccagcctcgcaccatgtctggttctggcgccgctcacgctggccatgggttggacgtgtgcaaggagatgtgccgttgtcaccagagcatgtaagctgcaggtggcggtctcatgggtcaggggcttagaaggggccaggccagtccaggcaggagagggaaggccgagagtctcgccacatccatctccccaccccccagcccctgcagtcctctgacattgtctgtgatgaccaagagcaattaaggcccctaagtgctgaacacaaaaaaggtcggcacaaatacgcccagacctcacgcccgagcacatgcttcatgtacacttccccagctacctcttgcagcccccaaggagactatgcattctgtcccccagacaaggggaccaagcccttgctgcccctgtagcctgctgcccaccttgtgcagtgggtgcagcccaaggcctggggcctatcccgggtgtgagtcctgccctgccactgagtgacaatgtgatctacaggtcacttggtctctcttggcctcagtttcctcatcaggacatggcgcatttgggggttccccgtcctaagaatgaactgagtacctcagcacccacaaagcacttgctgggtgacttgcctgtcacccttattaactcgtacacaagcaagggtgcccaccacactgaggcagggcttggcatggtccctgctggtcctcagtggtgtcatgtccagcgatgggtgggacaggaggccgacgttttctgaagctgttcggcgttggccggccccatgtccacatgtcattggtgcccagtaggcatttgcagaacggacagactgtggcgactgagactccagcatcctgggctgggggcggccagggccctgactgtcgtcctggccctctgacgtgagccatgtgctgtctgcttgcagcaggcaggatgtcggccgccactgtgctgtcccgggagccctacatgtgtgcacagtgcaagacggacttcacgtgccgctggcgggaggagaagagcggcgccatcatgtgtgagaactgcatgacaaccaaccagaagaaggcgctcaaggtggagcacaccagccggctgaaggccgcctttgtgaaggcgctgcagcaggaacaggagattgagcagcggctcctgcagcagggcacggcccctgcacaggccaaggccgagcccaccgctgccccacaccccgtgctgaagcaggtgagcctggcctgctgccggcagtgccgtccctaggaggcagaggccgttccgcgatccaccccacgcctgcgctgcaccgcctgattgttaactgcacgtctaaattgcagttaatggtggtgttgggcggcaaaaacactaatttgcagtttctttagactttgtagctctcacttgcaggctgccggctgacaagtactgcttgtcttcaaggtcttttctgaaagccacgttgagataccaaaggggcgtttggaaaaatgttcttgctaaatttggagaggaacaagtttgaaatcaagttttttgttctcgtgttgttttattttaatgcttctccttcccaccctcttgtagactcgaagctcccttttggcaatttttgttttcttggaagttctttgcaattcactaaacgcattttctcaagatccccacttggcgcctaaagtccccaggggacgggcctgtcctgtggggctcaccctcggtcaccctgggccggccagcggaccgcactgactttgctttcaacccccgtttgtgtaggtcataaaaccccggcgtaagttggcgttccgctcaggagaggcccgcgactggagtaacggggctgtgctacaggtcagaaccgcactgggcgccgggagcctcgcgcccccaccgcagcccgtgaccacgtcagtcgccgactgtcacgctgcctcttctgtctgtctctccctgtttctgtttcactctctcccctcccccacccctctgtgtaacttacctggtctcctgattttggactttagggaccccatgtgggtgggaagaggtcagccagagcaaggagaggctgcgctgagtgtctcgcctgctgctgtcttttccctgcatgagccgtcacccccctttctccactgcaggcctccagccagctgtcccggggttcggccacgacgccccgaggtgtcctgcacacgttcagtccgtcacccaaactgcagaactcagcctcggccacagccctggtcagcaggaccggcagacattctgagagaaccgtgagcgccggcaagggcagcgccacctccaactggaagaagacgcccctcagcacaggtgggtgacctccacagggctccccaggggacctgcccattgtggggttcacccttccttaaccgaaacagaggcacatgtgcagcgggtgaacccccaggcccgcttcccaagctcagcctcctcggactctggctttccctcttgcccctaaccaggataccctgaagaagtgacagccccgagcagataggaaatagtaaccaccctcactctctgcacccaggctcagtctttgaccgacaaaacatgggccaggcctggctcagagggtgcccccacagccatccatgtggactcttgtcagcacacacccctatcttgcccactcagggtcccccttttctctttgtgccgcagcaaacatcttttttctgtcattgtgccatccatgctgcggtcacactgagtggtgcaaagtagaacagtaatgcggggcagggggtgtgcccagggcagcggctggctcacccggggcaggtagtggaggccttgccggagacggtgtttgaagaacaaccagtgggggtgaaggtcctccagtgggctctccggagtcaggtgcggccccaccgtccctggcatggtcccgatggcctgtttattttttcatgtatgtgttaacattagaacaaaagtgttatatttcttgtgtcaaaaatagggaaagaaaaggtggtcaggaagggccaagttaaggagatgggcaccctctgggagaggaagcaaagtgtcccacatgcaccctgaagcctgtggccctgcaggtaggagaggacaatcatgagacaggccccaggcagagtggtggggggagcctgagagcctgctgagcctgccgctgtcctaagtgaggggcgtgcccaggtgccaggctctgcaggggcacttcaggaaacagcagacgttcggctgcagaggaatccaggcagcctggacagttgagtgtgtttgtcatcaaaccagccagccagacgttctgctcagcaggtttaagacagctgaggactcacgggctggtcagaaattactcttgtgggaagtttgaaaggataagaaagaagtagaagtcgataagtgtgtgcatgtgggcacggtggtggaagtcatctggaagctgtgtgtgtgtgtgtgtgtgtgtgtgtgtttaaagtttgaaagggagcatgaaggcatcactagttgtgtgtctgatggtaggattagagggaaaataaatagttgaaagcaccatttcctaaaagagttaccacgggggttttgagagagcgcctggcaggacccagttgccaggtttctggagtgctgcccttgcacacagggttggttcctaagaacatttgacctgggaacgctttttccacaaaatgtattagccaccactaaaaatactcttagggccagacatgctggctctcacctgtaatcccagcactttgtgaggccgagatgggaggattgcttgagcctaggagtttgagaccagcctgggcaacatggtgagaccttgtgtctacaaaaaaataattagccaagcacatggcatgtgtctgtggtcccagctactcagccaggaggctgagggaggaggatcgcttgagcatgggaggttgaggctgcagtgagcactgattgtgccactgcactccagccttggcaagagtgagaccccatctcaaggggtctggggcagcccttacctccaactctggccaaaaattctgcgtgtgctgggtgggggcatttatttattttccaattataaaaatgatatttgtccatcatggaaatttggaaaatacagagagaaaagactgtggcaatggcttgtattttcctcccccaggtgaacaaatattacatttaagggttttccccagtgtctccccttcacttgagggtcctttgtggaaatgtgtgtcttgcgttggctactttgtgtgttaatgagagacccttactggacgcattaaaatttgagctgggcacagtggctcgtgcctataatcccagtgctttgacaggccgaggtaggaggattgcttgaggcctggagtttgagaccagtaaacaacaacaacaacacttgagggtaggagatagtttttttttcctttttttttttttttttcttcttttggagaagcttcttgctatgttgcccaggctggaatgcagtagcgcgatcatagctctcttgcagcctggatctcctaggcccaagcaatcctcccacctcagcctctggagtaactgggactacagggatgtgccaccatgtccagctgatattttttttagagatggggcctcactatgttgcccaggctggtctctatctcctggcctcaagcagtcttcccaccccccagcctctcaaagtgctgggattctaggctgagcctccgtgcccagctaagatagtttttcattgctgcatagtattccatcctgcattattgtcctgttgcacacatttgtttatggttttccactgttctaagcagcaccgtggtcagcaccttcatttctgtagaacgtaggtagctgctcaccctctgatgattgccccacacttgggattaccttggcagagcctggcaatgtcaaggccattgagttgctgcctaaatactcttcagctctgggggggcctgggatttgaaacgttgattgaggagtagtgtgggtgggtttgcaagggctcctgggtccttagtctgtattggggctggggtctaggcagctatggctgggctcctcccaggagccctcctgacgagggccttctcagctggtcgctctgttctgttgcaggcgggacccttgcgtttgtcagcccaagcctggcggtgcacaagagctcctcggccgtggaccgccagcgagagtacctcctggacatgatcccaccccgctccatcccccagtcagccacgtggaaatagtgcgagccaggccccgtggaagacgggctccctcctcccccacctggcccctggtctagaaggacccactgcaccaccctccgctggctcgggaagacaccgtgcccgccccaagagcaagcaccggccatgctgcagaggcaagacctcaattcttggctgcaaagtttcatcagggctagggggctggtgccgcctcataggcagacgaggatcatcgctgggggacctttcccgtgggctttcttcctttctctctttgcctttagtttgcccgacaccagcagaaaagtggaccttgggggctggttctgctcctggcccccttgttcagcccctgccggcacacgggcggctcaccctggacactgtgatgcgcatgggcaaggccagcgcccggggcttctgaaccgagcggggtgtttcatttttttgcttttccctgtcttaggctcccagtctttgactgccttcccatggcgatctataagttgaaagattttttttttttttaatcacctcatgatgatggagttaaaagtaaaccgtgcagaccctggggtccctgttgtacgctgcatcatcccgctggccctgtgccctggagggtgggcggctcatggtgccacagcccctggcagggacggccggcccgcccccgtgactgactgacagatgcagggatggccgaggcagccctcgctccagctgaacgcctccattgctgcttgttctggagacccccgcccccgcaccttccagacttagcagaagaacaaactgaagaacagacccagccagagaagcagggattccagaagctgcccattaagggagaaggagaggatccggtcggcagcagccctgagcagaaagctggaggggggactgtcgcggggtttttctgttgtggtttattttattaaattttttccttttttctattcatttcgatggacgcaatcttaagccaccctggccttgctcctgggaggtgagcgtgcacaggtgtgtgcaggtcaggaggtgccgtccaggtgtgcggcgagccgctgcgcacagatgtcaggatttccgtttgggtctagtttagaacctgtccttaaacctaggggttgctgtcaggatttgctttcagactttttttttttttgtaattccctttagagtctacaaaaatgtttttaaaaggatcaggtctgcttttagtttcatttttgtttctttcccgtcccactctttaaaaactggttccgtgaggaaaggcagaagccgttccgtgtctcttgcaggctgggccggcttcatgccagtgcgagggcgtcccgtgcccacgtacatacgtatgtctccatgagttctgggctccactggttccaattgagctccagccctggttttcctacccatgcagttagggactttaatttaattttttttttgtagggccaccgccttcaaacacaactgctacaacattctaataaaggctcatttaacccccaggctcctgtcgtgtgaatatcctcagtctgtaggaaactttttttgacacagcatagaagacctagttttggaaaacattatctaattttttgttgtgcaaatccccaaatttctcactaatttttgtttttttgtgcataacttggatgggctgaaggaggtgaggacagattggggaagggtggctttcattccaagatccagggatttggggaaaaggaaggaatttgatgttttttggggtgggaggggagggtgtgttttttacaccaaaaaaaaaaaaaaaaatcaagagtatgcaagcatttctattcctcgcatttttctgtgtgcctggcaaataaatacctgtctcctacgaccctgagctgttagccctctctgttccatgacaggggccagatcttccagctcctcccagaaggagcacccaggctggcttcttcccactgaaagccctccccagcgaaccaacctcagttctatgcagtggctggggatcaggcatccagaccgaagtcacctctgcctgctccagcttgggtcagctgggtctgaccagggggccagatccgagccgcacctgccggcccccagccccagctccagctcctgacctctcccagcctggcctggctgttcctccagggctgatggctgtcaacccatccttgtgagttcatatggactgctgcccctcgaaagggagagggtcggccccatgtccccagggagcattccatcagggacaacgtacatactgtgatgtaaactttttttttttccccccagggggcaaaagtgtgagatgccttaatctttccttcatttctgctgtctcgaacactctagcccattatttcctttcagttccttgcagcataacctctacgataagccccaagcgggttgttgtattatgacgtttatgatgttccaggtgaaggcattattaagtacctctctgggtgtggggtttggacgcaccaggatagctattgattaatgttaagggtgttctacccacagcaaagcacaccctcttaaaccaggcactgcctgggtcctggtcccgagagccctaccaggatcaggttcctgcaagccgtcagaatgtgggagcccccagcccaactgattgtaactgtcccctgttacctgtgacatgaacctccaacagcacctggaaacggttccctctgtcagctgctctgtagacagggctggggagatctcagagttcacacctcgcctgttgtaggggaggttgggggtagggtttggaatggccaagtgcccttggaacctcccacagctatggccgtcctgacctcatcccaggaactctacggtgaccaggaaccacccctctgacgaggtctgtagcggcccttctcagagtggaacagcccacagtgctagttgtgcctggtcttacctgtactccacggacctcggtgaagcaaaagcttcagggcagagggaatgaggcaacccagtggcagccccgctgggccccgtggctcctgctctcctattggacgtagaggcaggggagagacttctctatacaaatattctcatcacagaagggatgatccttgctgctctgccgtagggtttttgatgctgagctatgctgcacatgacgttaacctaaagaacttggactgagcttttaaaaaaggacagcaaacaattttataatccttaaagtgtaatagacggttacactagtgcagggtattggggaggctctttgggtgtggaggctgtcacttgtatttattgtgactctaaatctttgatagtaaaacaaatgtaaaaagaaatgtttgccaccagatgggaatagaagttccaataagcaggctggaatgggtggctatacgttgtatcacgaggaagttttagactctgaaggataataaatggatgatgtgtcaactggacttttcttttgtcccttctgccctggcttctctgtattgtttcgtcctagcttcccaggcaggttggagggagatggaggatgacccttagttaatgagagaagcaaagggcggggtgcatctgctgctggggcctcacttactgtggggatggagtccccacggcccctctcctctggagctttgtggcaaacttaccccatgggctgggagagaggaatgagaatctcagtgggggctgggtttggtggctcacatttgtaatcccagcactttgagaggctgaggtgggtggatcacctgaggtcaggagttcgataccagcctggccaacatggtgaaaccccatctctactaaaaatacaaaaattggccggatgtggtggtgggtgcctgtaccccagctacttgggaggctgaggcaggagaatcgcatgaacccgggaggcagaggttgcagtgagccaagattgcgccactgcactatagcctgggtaagagaccgtgactttctcaaaaaaaaaaaaaaattctcagtggaatttgcttgtgtttgctgcatcagccttcacgctagagtggtgggttttcctggagcaattttcaggctgggggcctcgatggtgtctttgctgcaggatgtgatattacagatgtgcaatctaagcacagagtcaccaacctggatccaaaatgaacgacgtcctggcaaaaatgttttcaagtgttgatagtttcaagttttattcttaaggtgagacctgggatcattttgctgaattttaatgtgcataaaacatgaccctgttttcctaggtgctatttatttgaggcagggtctcactctgttgcccaggctggaatgcagtggcttgatctcagctcactgcagcctcaacctccctaggctcaggtgatcctcacatctcagactcctcagtagctgggactatgggcatgcaccaccatgcccagctaattttcgtattttttgcaaagacacatttttgccatgttgcccatggctggtcttgaactcctggactcaagcagtcctctcaccttggcctcccaaagtgctgggattacaggtgtgagtcaccacgcttggccgtttcttgtctttgaagcatccttgcctccggcctgggagctcataccttccccacaactcccaagtgcctggtcttatgggcacagagctggtagagaacatggtagaaactgaacctcagcctgtccagtagcgcgatcttggctcattgcaacctccgcctcccaggttctagcgattcttctgcctcagcctcccgagtagctgggattacaggtgccgccaccagcacgcccagttaattttcagtagagatggggtttcacgtgttggccaggctggtctcaaactcctgatgtgatccaccggtctcagcctcccaaagtactgggatgacaggcgtgagccactgcacccagccacttttttttttttttttttttgagataggctctctgttgcccaagctagagtgcctagaggctctctgttgcccaggctcaggcgatcctcccacctcagcctaccgtgtagctggggccagaggcttgctacaggcatttcttgcttggcctgagaaacattcctatggggtgctgtctcctgggcttggctcttggttcctcgtgaggctctgcttccctggattgggcacaggcttgtcagtgcagttggggcagattcaaggggcgggtcctgggtcatggtctcaaatagcctctccagctgagaaaatgggacactcccctcgtccctgacatcttgtccccgacatctcatcctctctgaattgagccttgggtctgtggccacatggcaggcagagaccctgaccccatctgctcccacagattcgtcggtggacagatggcatgcactatgccctgggccccggagatgtggcaggagctatccagacagaaacatatagcaccttgagaggagggcatggggtgacattttaggcaaggcttgaagaggggaaaagtgccaggagtgtgcaaaggcttggagataggagccagcatggcaggtcaagaacaaaaagggcaatgtggtgggactgggtgggaagacggggcaagggcgtgggttttagctaagtgcagtgggagtctagggaaggtcctgggcccagtactcaagctacgcccactctgaagccatgcccactaccccaaggatggggttttgcccattttccaagtggggagtctgaggcatggccccagtcaggagcagcacccttcgaataaaccagaggggctaggggctaggttttattttatttatttattttttcttttgaggcagagtcttgctctgctgcccaggctggagtgcattggtgggatcttggctcactgcatcctccattttccgggttcaagtgattctcctgactcaggctccccagtagctaggactacaggtgcaagccacccatgcccgactaaattttgtatttttagtagagatggggttttaccatgttagccaggctggtctcaaacgcctgacctcaagtgatccgcctcccaaagtgctgggattacaggtgtgagccaccatgcccggccccaggagctgggttttctacctccactctgatgtggtccagccaagactggaggctaggcactgcccctcttttagcctcggtttcctcatctgcaaaactgaaggggacagggccatgtatctatttggagggatgaagatagagctggcactgcatcaccagggcaccagaaagccattgagactgagtgagcaggggctgggcatggggagacccaccagaggagcagctatgtagggctcatatgcaggtaggcacgattaggatttcctaatatacctaatacatttccccatataccccaaatgggaaccactcccaggctctgtggggtcctctctcaatttcctccttaccttgccatctcctttccctctctccctccttattccaggcaaataagcttactggccttactcaaacacgccagctcccctcttcctggggaacaacctggactgtttctcttaccttcagagtcccttgactttttttttttttttttttttctgagacagggtctcactctgtggtccaggctggagtgcagtggcacgatcatagctcactgcagccttgaactcccaggcccaagcgattctcccacctcaccctcccaagtaactgagacacaccaccatgcctggctaatttttaaattttttgtacagatggccgtctcgctgtgttgcccagattggtctttaactcctgggctcaagcgatccgcccacctcagcttcccaaagttctggaattataggcgtgagctgccacgccctgcccagagtccctccttgaacacctcccaactctacctggcatttagcacaacttacaattattttatttccatgtcattcttttattttacttgacttttcaattgtctcgttttcggcagggatgggcccaagtctcttcgccatgagctctggggcctggcagacagtaggtgctcaagaaatgcatgactacatgaaggaacagaggaaggaacgagctagtgagtccagctgaatctcgcccagccccgccctgactcccccaccccctcttcccgagaggaaagggacccacagcagggagggcttcccccacccccgcaacgtcactgttgctagatctgggttcaaattacagctgtgagccgggtgaagtggctcatgcctgtaactccagcactttggggaggtcgaggcaggtggatcgcctgaggtcaggagttcgagaccagcctggccaacatggtgaaaccccgtctctactaaaaatacaaaaattagccgggtggggggacacgcgcctgtagtcccagctacttgggaggctaaggcgggagaatcgcttgaacccgggaggcggaggttgcagtgagccgagatcgtgccactgcactccagcttgggcgacagagcgagactctgtctcaaaaaacaaacaaacaaacaaacaaacaaacaagagatgaggtctcggctgtgatgcccaggctgttttcgaactcctgacctcaagatatctgcccgcttcggactcgcagtgttggggttacaggcgtgagccaccgcgcctggcccttggctctgccttttggcaagtgacatccatgtgggcctcagtttccttatctataaactcctactttacgtggagacaggccaccctcgccccacccctggctgttccattcttaaaagatgtggacggcgaggcgctggggtccacttgcttcccagcccatcatcacagcgacatcacgacccggggacaacaaagctcctttgagtttgcccatactggggagctcaaaaggtccaggctcgaatcctcccgactcccttttgagtcttggagcaataacctcaacatgcgtgactctaaaatagggtacccgcgcctgccttccccggatggagcgatcgcttctccactagtccgcaaatgggggccaccgttagagccaggtgcgaggaacagcgagtttattgcaggttccaaccgggaacctggcacccacggctggttgggaagggacgccctccgcgcagaggctgagagttccgcgcaggcgcaatgcttccgtcccctctggtctcgccctctcggggcctggtcgcagggaatcgcggatgcgcatgcgcctccagctcccgggatcgcggggaacgtggattccgaacaagggcaactgcggactcccccgtgggaagaaagggagggaagcggaagggaaaaagcgcatgtgcagcagcacgcggcagcttcgcatattccctcgaagcgcgcctcttgcgcgtgcgccgccctggcccagtgcccttggctgcaggaatggctggaaccacccggcttctagccggagtccccggcgcgcagccagcagttgcgcgctacctggcccgcggagggcctggcggacgggctgaactgcagcagctcggcgatcagggccttgcagcgctcggacagctcgaggccttcgggatagagcacgccgcgtttctggcgccggggcaggccggcgatgtccgagtcgtcgaagggcatgcacccggtgaccatgacgtagagcacgacgcccatgctccacacatcgtacttcttggggtcgtaggggatgcccaggagcacctcgggtgacgcgtaggcggctgagccgcagtaggtggtgctcaggtctgggtagccatgggcctggcggccgaagccgaagtcggtgagcttgacgcggcgctcgtccgggctcagcagcacgttttcgcacttgaggtcgcggtgcaccaggtgatgatcgtgcaggtagcgcacggcgccggcgatctgcgcaaagaggtcgcgcgcctgaactccggggatgcgcccgttgcgctgcacggcttgcagcaggtcggtggcggccgcttccatcacgatgtacagtttcccgttgcacacctcgatgaactcgaagacgtgcacgatgtgcgggtgtcgcacgccccgcaggatggacagctctcgcggcaggaacttgttgacgaagtccgggggcgctcgccgccggtccaccaccttgatggccacggtacccttgtacttcttggatgtggccaccttcaccttggagtagctgccctctccaattgtgcggcccagcttataaccgagttcgctcagaagtttgtctcccgacatggtggcgcctagggcgcacggggggcaggaggcggctgctgtcggggggcggccggactccaatctcgggtctaagccatggcgcttggcacctacacccccgcacccccatgtgcccactgccagacattggccgctgttgtgccttttattgccccgtaacaatttttgccttgtgaagtgactgcgggcgtcactccgccttagggtgggggtccgggaccccgccccggggccaccctagcctccctgctttgtgactcataatcatcctgaatggtcagtttccgatgagaggccactagcaagggatacccatcaccaccagggagcagaatccgttccagggattggggtgagtccgacttcgagcagcagctgccccccaacatcatgtacccagcccgtgactacgtggagccctgggcttcgcgtagagtccctagacggggcgaaaacgggaaaaggggccttaactggggcacctggctcctttgagagctcggagtttctgactggcctgcgcaacaccccagaggcaaggtgaacgcgagggcctataatgcaagaaccaaggcgagtcacgccctgtctgggcaaaagaggagtaaagacccctcagctgcagcccggcagcgcattcctacccagggtccgccgccagagctttcccgcgcggtcggatagttacactactgtccgggacttcctagccgtgccgcggaccatctcaagtgcttccgccacactcatcatggcggtggcagtaagtcacttccgcccgggaccggaagtgtgggatactgcgagtatggcggcgtcaaaggtgaagcaggacatgcctccgccggggggctatgggcccatcgactacaaacggaacttgccgcgtcgaggactgtcgggtcagtatcactctgcgccggggtctcagagtctgggcactcggggctcgggggcggggttccggggacacaggcgggcctcagttttcccggcggtgtgaccggaggcggagcccggggatccatcatagcttctgtaataacgctaagtgctgcagtttgttgaggtctttcccagctcctcttccttctcgtaacagcccaggaaatcggtccctctagttatttacgttttacagtgggttaaactgagtcatagcctgtgctctggccctcagccacccttggatttctaagatggggaaactgaggcccaaagaaggccgcggctccccaaggcaaagctgaggccgcaacccggaacctggagggaatttacaagatgttctatgcagtggttccctgctggcagcccccgcctgcatggtgtcacaggaatccatattctttaaattttcaattttttttttttgagacggagttttgctcttgttgcccaggctggagtgcaatggcgccatctcggctcaccgcaacctccgcctcctgggttcaagcgattctcttgcctcagcctcctgagtagctgggattacaggcatgtgccacaacgcctggctaactttgtgtttttagtagagacggggtttctccatgttggtcagggtggtctcgaactcccaacctcggatgatccgcccacctcggcctcccaaagtgctgggattacaggcgtgagccaccatgcccggcgtaaagttttcaaatgtttaagtaacacgttaaattttgttatcgggctcagcacagaaaattgaaaaagagaacttaaaaggcgcccatactcagtccccaggttaacagacaaatagaaacttttaaacgtaatctaagagtgaatacatacatttctttttttttttttaagacggtatggttctgttgcctgggctggagtgatttcttggcaacctccgcctcctgggctcaagccatcctcccaccccagcctcctgagaagctgggattacaagcatgcgcccagctttctgtattttctatagagatgggatctcgccatcttgcccaggctggtctcgaagtcctgggctcaagtgatccacccacctcggcttcccaaagtgatgggactatcggcatgagctaccgtgctcggcagaatgcatgtctcttaacaaatcaaactttacatttaaattacatgttatgcacattattcctcaattttaacacacacacaaaaatgagcatggtaattaaaaacgtaataattcagacagtagaaaaatcagtgtgaggtgaaaagtcctccccagccccttcttggtttttttattttttatttctactttttgtagagacagggtgcagctatgttgaccaggctggtctcaaactcctgggctcaagtgatcctccagcctcagcctcccaaagtgctggaattacaggcatgagccaccgcggccaacctcctcttgtttttcttgtatcccagaactgagattggcagactttttctataaaagggacagatgacaagtattttgggtttggctggccagaaagtttcagttactgagacaaccatttacaaatggaaagtgttcttagcctgggggctctacaaaaacagattgcctgtgagccaggtggctcatgcctgtaatccccacactttgggaggctgaagcgggaggatggcttgagcccaggagtttgtgaccagcctgggcaacatagtgagacccccacctctaccaaaaattaaaaaaaaaaaaaagaggcttcaggctagatctggcccatgagtgctgtcccagaacacattggaggaatataatgcattctatttcctcatttttcttttttcttttctttctttcttttttattttttgagacagagtctcattctgtcacccaggctagagtgcagtggcccgatcttggctcactgcaacctccacctcctgggttcaagcaattctcctgtctcagcctcccgagtagctgggagtacagttggatgccaccacatccggctaatttttgtatttttagtagagatggggtttcaccatattggtcagactggtctcgaactcctgacctcaggttatccacccacctcggcctcccaaagtgctaatattgcaggcacgacccaccacgcctggcgttgtttgttttttggttgttgttttttgtgtgtgtgttttttttttttagaccaggtcttgctctgtcacccaggctggagtgcagtggcgtgatctcggctcactgcaacctgtgcctcccaggttcaagcgattctcctccctcggcctccctagtatctgggattacaggtgggcgccaccatgccctgcgatttttttttttttttttttttttttttttgagatggagttttcacttttattgcccaggctagagtgcaatggtgcaatcttggctcaccgcaacctctgcctcccaggtttaagcgattctcctgtctcagcctcccgaatagctaggattacaggcatgtgccaccatgcacagctaattttttgtatttttagtagagatggggtttctccatgttggtcaggctggtctcaaactcctgacctcagatgatctgcccgccttggtctcccaaagtggtgggattacaggtgtgagccactgggcccggcctatttttttttttttttttgtatttttagtagtgacagggtttcaccatgtaggccaggctggtctcgaactcctgacctcaggtggtccccctgcctcagccgcccaaagtgctggtattacaggcatgagccaccacgcctggccgagtctcattcttctccggtgtaacctgggctaccccaccccttcaggtgtgcagcacaaggtctgtttccaaatatgcacctgtgtgacctgcagccagaccaggccacagaaggacctcaggcctggaggctccctgagctccctgcttccagcatctcatttttgtataaataccctggtcctctcccagttcaccacagagcagtggccccccctgtgccagacagtgccctaaataccactgcctggggttgtgtctcctaatggtgtggacttttgttacagcacatacacacccaccccagcctttcccggtggaggagtgaggaggatacccctatgctggtgtgctctttgtttatggccctgctttcattgttgagtgagcacatggttccgggccctgtccccaagcgctcacagctgagctgaagagatacaacacatcatgccaggatttctagttgttggtgaggcctgggataacctgggcccacttaagccaggatgtgccaggaggacctctgagaagaagcctgctctgcagaaaaagagcaaacacacaggccctgcctcctctccctctgtcctcctctcctgcctctcctgagccatggtccacagtggccttcccaccagacctaccttctgtgctcctgtccaaggcctggtggccccaagcctggcacccactcccttctgtctgcctgggtcagccattcactcactgccagcgtcccaggacatgatgggctggctcaggctgctttttgttctctttttttttttttttttttttgagacagagtcttgttctgtcactcaggctggagtgcagtggcgcgatctcagctcactgcaaggatggtctcgatctcctgacctcatgatccacctacctcaacctcccaaagtgctgggattacaggcatgagccactgcgcccggctggctcaggccccttttaatccatgccgcttctgaagtgacttcaccccacctcctccactatctcccacacccagttctcctgtccccactccctcctgagcctagcaggcagccctttccttttcatcttgtgtctttaatatatttattgaggttccaataccataccacacaactcacccatttaaagtctgtccaatttaatggctgtgagcggtggctcatgcctgtaatctcagccctttgaggacaaagcggatggatcacctgagctcaggagttggagaccaacctggccaacatggcaaaaccctgtctctactaaaaatacaaaagttagtcgggtatggtggtgcacacctgtaatcccagctacttgggaggctcaagcaggagaatcgcttgaacctggaaggcggaggttgcagtgagccaagatcttgcctctgcactccagcctgggcaacagagtaagactccatctcaaaaaaaataataataatatagtgaagtgtgtccaatttattgattttttagtatattcacaaagttgtatggccattgccatgatcagaatttagaccactttcattacccaaaagaaaccccgtcttccctattagcaatcatcccacccctggcaaacactaatctgcttccttctctgtggatttgcctgttctggccatttcctatcagtgaagtcatagaccgtgtggccttttgtttctggcaaattaatatccagcaccaagtgttgtgttttcattttttgatgggcacttgggtcatccacctactctttggctgctgtgaataatgtgagtatggctgccatgaagattcatgctgtacaggtgtttgtatggatgtagattttcatttttcccttgtgaactttcccctaagagagaaaccactggatcatatggtaacttcgtgtttaacattttgaggaactgccaaattgttttccaaattggctgcaccattttgtgcttccacctgcaatgtatgagagtcccaatttctccacgtctcaacaacactgattattttccatttttttgatcatagccaccatcctagcgcatgtgaagcggtatttcattatggtggagttttttaaaattctttttgggtctttttttgctcagttttctggtcattgatcgttgatttgcatatcactgctggctgatgatgtcgaacattttttcatgtgttttattatttttattttttattatttttttcaagagatggggcctcagtgtttcccaggctggtgtcgaactcctgggctcaagctgtcctcccgcctcagcctctcaaagtgctgagattctaggagtgaaccaccacctttgcatgtgtttattggccatttgtatgtctgtctgtgagaaacgtctattcaaatcctttatatatttttagtagggttttttgtttgtttgttcgtttgtttgttttgagatggagtcttgctctgtcgcccgggctggagtgtagtggcacgatctctgctcactgcaagctccgcctcccgggttcacgccattctcctgcctcagcttcccgagtagctgggacttcaggcacctgccactgcgcccggctaattttttgcatttttagtagagacggggtttcactgtgttagccaggatcgtctcgatctcctgacctcgtgatccgcccgcctcggcctcccaaagtgctgggattacaggtgtgagccactgcgcccggcttagtagggttttttaaattattgaattattgagttgtaagattgtgtatacatatgttgtcttctcagctaattgatagtttcatttacagcacaaaagtttttaatttcaataaagtccgggctgggcacggtggctcatgcctgtaattccagcactttggggggcagaggcaggtggatcacttgaggtcaggagtttgagaccagcctggccaatatggcaaaaccccatctctactaaaaatacaaaaattagctgggcgcggtggcgggcacctgtagtcccagctactcaggaggctgaggcaggagaatggcgtgaacccgggaggcggagcttgcagtgagccgagattgtgccactgcacttcagcctgggccacagagtgagactccatctcaaaaatacatgtataataataatttcaatgaagtccaatttctgtatttttccttttgtcacttgtgcttctggtgtcatatctaagaaacctagtttgaggtcacagagagtgacttacattttcttctaagagtattatagtttcagctcttacgcttaggtctttgatcctttttttttttttttttttgagatggagccttgctctgtcacacaggctggagtgcagtggcgcgatctaggctcactgcaagctccgcctcccgggttcacgccattctcctgcctcagcctcctgagtagcggggactacaagtgccagccaccacgcccggctaattttttgtatttttagtagagacagggtttcaccgtgttagccaggatggtctcgatctcctgacctcgtgatccgcctgccttggcctcccaaagtgctagaattacaggcgtgagccactgcgcccggcaggtctttgatccttttgagttaatttttgtggatggtataaagaaggaacgcatcctcattctttagcatgtggctgtctggttatcccatttgttgaaaagactgttttctctcccattgaattatcttggcacctttgtccaaaatcaattgaccataaatgtgagggtttatttctggactctcagttctgttccattgatgaacatctctgtcctatgccagtgccacactgtcttgtacacacagctgtgggataagttttgaaatactgaagtgtgagtctttcaactttgttctttttcaaaattgttttggctgttctggtcccttgcatttccatatgaatttcccaacctgcttgtcagtttctgcaacaggaaaagaaatggttgggattctgatggggattgcgtttcaaatctgtatcagtttgcacagcgttgccatctgcacaatgctaagtgctccaattcttgaacacaggatgggtttttatttattttggtcttctcttaagaatggccaaggccgggctcagtggctcatactggtagtcccaacactctgggaggctgaggtgggaggattgcttgaggccaggagttcaagaccagcctgggcaacatagcaagaccctgtttctatgaaaaatatatttttcttttttttttgtttttgtttttggttttgttttctgaaacaaagttttctctgtcacctaggctggagtacagtggtgccatctcagcccactgcaaccttgacttcttgggcttaagtgatactcccacttcagccacccaagtaggtgggaccacagatacgtgccaccacatctagctaatttaaaaatatgtattttgggccgggcatggtggctcatgcctgtaatcctagcactttgggaggccgaggaagatggatttacctgaggttgggagttccagaccagcctggccaacatggtgaaacctcgtctctactaaaaaatacaaaaatttagctgggcacagtggcgtgcacctgtaattccagctattcaggaagctgaggcaggaaaatcacttgaacctgggaggcggaggttgcagtgggctgagatcgcaccactgcactttagcctgggctacagagcgagactttgtctcaaaaaataaaataaaatacgtattttgtaaatgtttcactgtgttgcacaggctagttgcaaactcctagtcaagtgatcctctcacctcagcctcccaaaatgctgggattacaagcgtgagccgaaaaaatttgatcccaccactgcactccagcctggacaacagagagaggcccggtctccaaaaccaaaaacaaaaagaatggtccacacacccttttgtgcgtgcccctcaccatgttccccaccagactagcagttcctaaggcacagactctgaggcctggggccttggcccccctgtggttggcgaggaggaagagccctgtgcaggctgcatgcaaatacaagaggccctgcattgtttctgtcatctcatacatctctgttctatgccagtgccacgctgtcttgtacacacagctgtgggataagttttggaatttatttcttctttggaatttatcttacagatgggcctgcgtatgagtgcgcaggtgtgagggtgcaggttctccccaagggcccattttctgcaccagaaggctgagggcagcccaggtctgtcccctgggttctctgtagccgtggaaaataatgagatatggccgggcacggtggctcacgcctgtaatgccagcacttgcaggtggatcatgaggtcaggaggtcgtaaccagcctggccaatatggtgaaaccctgtctctactaaaaatacaaaaattagcctggcgtggtggtgggcgcctgtagtcccaactactccggaggctgaggtggaagaatcgcttgaacccaggaggcagaggttgcagtgagccaagatcttgccactgcaccccagccagggcaacagagtgagattccgtctcaaaaataaattaattaaaaaaaagaaaagaacgagatatgaccagcctgggcaatatagcaagaccccatctgtacaaaaattagttaactggacatggcacacacctggggtcccagttactcgggaggctaaagtggaaggatcacttgaacccaggagttggaggctgcattgagccatgattgcgcccctgcactccagcctgggtagcagagtgagaccttgtctcaaaaccaaaaaccaaaaaaggaaaaaaaaatgaacaaggcagctgatgaaacctcccatgtgctagacaggaggctgagagctgggagctggccctgagcaccctgggcctctccagagatgtgcctctgagcccggacccagcacaccctcattacctgtagtatggaaatgtcttagccctgacttgggcttctaacaggttaaataaccaggtacaaatttgagccagtttctcatttatctccgggtctagcagaggtgcccccgtgagctccatgctggagcagagctgaaggcagaagagcatgacaggtgcagagcagggcccggcaggcacagagtagccccagcaggcatagagcagggccagtgccctggaggcctggagatggccttgccttccacctgctggtcatttcctgggtgttgactggagcctggcctacctgagcttttcattcatcccaccaagtgcaaagcctgtccagagaagagactggggctggaaggatctggagggtgcagggtgagcctgggagccagatcccagacagcccaggcctctctgaagatcccagtgggcccccagcctgtcagtcaggattagagcaaggccccactggtgctcagtaaatattcatgatggcctaggtccttcctggggtgcagggcagggggcttcaccctgcagagccaagaggtagcacggccacccctagagtccggggggtggctgggcagcccccacagggcactgcctgtccctggcagctgtgtgcagcccccgcagggcagcacgcggaactgtggcccaggtggccgggagccaccatggacactgtcagaactgcccttccacttcagggccagcctgccgcccagggtccaaacagccttctagaacacgatggacctggggcccccctagcaaccaccatctagaccctcaggcctcctgaggttgctgcctggcttgtacctttcagaaaacccctggcatgggggcagaggtgtcacagtccaagcagcctcactcctgagaagccgccagtgtcccctgattgcagagtgggcagcgcctggagctgtggaggagggtgtctgggggcgggctggcccgctgagcagcgcctctcttcacaggctacagcatgctggccatagggattggaaccctgatctacgggcactggagcataatgaagtggaaccgtgagcgcaggtagggcccctggtgggcgttgtctgaaagtgcccccccggcgagttgtcggggtcctgtagcattccgctgttgtctgtgctggcgaggggtgaacgggccccttggacttggctgtgcaatcccaggccccagaaagtgcagatccagacccagcacttccacttctaggctctgtcctcgagatgtctccatgtctgcaatcccagcactttgggaggccaaggtgggagcattgcttgagcccaggagttcaagaccagcctgggcaacagagggaaaccctgtcctcgccaccccaaaaaatgtgtctagtgaggagggttgggacccgtggatccagattaggacaggatatgagtggggggcctgcctcgggccctctaagcaggattttgtcagaggtgaccaggctcaaaccagaccacaccaggcagtggacacacagggccagatgaactagggccaggcgcccccctctccctgtgtcacaggctgggcactccttccccacccctcccccaaccccaacgcaggccaggcaggactgggagatgggggtcattgcagggaacttggaaactgccagaaagcagggagaagaaaggaaagattgtggccccgcctgccccagcctcacacactgattattttgagatgaaggggacgtggttttgtgaggcccagagccccgtgatgaagtcaccccctcttcgtcgcgatcatcaggcagagttatttttaggataaaaaaagtttttaattgaaaagaaagtagaaagccaacagtcttgtgggcagtcacccgtgcagctgcctgcacccgccctcctctcaggctcctggtgggctctgcccacagcccttgcccttcccgcgaccctcgccctgccccctgcctgcctccccgcccccctccgcctcttcccccagcagcaccctggcccctgaggtctgtgctgcctgtgctcccccgacctagcctggtctgacctgagtgtgggtttcgggctttcacaggcgcctacaaatcgaggacttcgaggctcgcatcgcgctgttgccactgttacaggcagaaaccgaccggaggtagcaccgcaggggccaaggttgggaggtcactggccggaaggccccaggctgcagggcctgacctgcatccccgaaggtggccagaatgcacgtgggggccatcgccctgtgccgtcagctgcatcctcaggcgtggagacttagtggagacccaagggggcgaaccggaaggcttcctggaggaggaggcagcactggggttggggcaagagaaaagctaggagttggctgggggaaaaggagacagggtcggagggaggcttgaaggggtgctactaggggccctaggcaggggcccctcagggcactgaggccccacccccaccatcggccccatccccacaggaccttgcagatgcttcgggagaacctggaggaggaggccatcatcatgaaggacgtgcccgactggaaggtgggtcccggctgggagggcagaggtgccagccacggcagagacagggcctggggttggggagctcccacagctttctatagaaaccccaggaccaagggggtggtgggtgccaggtcccacaagggaaggctgtagcgcctgccacgcacaggggccactgatcctgggggatgggtcctagcaggctgtatatgggtggctgtgcctctacccataccccactgtccccacaggtgggggagtctgtgttccacacaacccgctgggtgccccccttgatcggggagctgtacgggctgcgcaccacagaggaggctctccatgccagccacggcttcatgtggtacacgtaggccctgtgccctccggccacctggatccctgcccctccccactgggacggaataaatgctctgcagacctgg

SEQ ID NO: 8320 - DNA, 544 bp, Homo sapiens
aggcgcccgaagagcggcatttcctcaggtcagctggggagagggaagctggagacgggcatggttcccatggggccaggagcagcccgtaggaccggaggcagggtcatagctgggacagaatggggtccggggactggagacgggcacagccgggatggaggttcaacggcagaggcatgaccacggtggggaaccggaggcagggatatggccaagacgggcctgggaatcccgggaatccgagaccctcctggcatcttgctggagacactaagctgcgttgctggggaaactgcctccggggcagcccgcccctcatgaatgattcatcagcagcgctggtcgctcccccaccgaaccccaaccgtggcccacccccactctccatctctcccagggccttggagctgcagcccccacttgccgacatgggaagagcggagcttagctcaaatgctaccacctcccttgtccagaggaggaaacaggcctggggaaggcagtcatggctagagcagatttggaacgcagggcctgtttg

SEQ ID NO: 8321 - DNA, 293 bp, Homo sapiens
ctcggtggctcacgcctgtaatcctagcactttgggaggccgaggcgggcggatcacgaggtcaggagatcgagaccatcctggctaacacggtgaaaccctgtctctactaaaaaatacaaaaaattagccgggcgtggtgatgggcgcctgtagtcccagctgctggggaggctgaggcaggagaatggtgtgaacccgggaggcggagcttgcagtgagccgagatcatgccactgcactccagcctgggcaacagactgagactgtgtctcaaaaaaaaaaaaaaagat

SEQ ID NO: 8322 - DNA, 415 bp, Homo sapiens
gcctctcccacttcccccaattcctcaatagccattgctttggtccaccaggccacacaccttagttggagtaaggtcttgtcttatcccaaagaaaacaccaaagaaaaagagtgttttccttggggtaacattatctgtgtttcaccaagtctgggaccctactgcattctcttctttttcacataatttttatattatttcctcagttatgtgtaaatagaagtctatgttttctctttttcttagttttgctctataagtaacttatgggtggttttattaagatctcctgatgaatctgtatggtttggaaagttacgtgaaaagattattattactgtatatatacattattttcttagggaaattggaagtctcaaacaacgtgttaaaattttctttgaagttttaa

SEQ ID NO: 8323 - DNA, 1551 bp, Homo sapiens
taaaaagccaactgccaacataattttctttgaagttttaaagaccatggatcgatttttctctttatgtagcctaatctgatttttatattcatatctgttaaggcatacacaatagaaattatatgttgacactacctttagagtccaggctccttaacctatacatgcatttgtaactgtatcttacctgttatttgatgctaaaagatggaaaggttttcctctaagatacagtacaaggcaaggtacaaagatgcccaccctctgcacttctattcaacagttctattaaaattgctggaaatactagcaaggacaatcagataagaaaaataaatagaagccatccaaatgcaaaaggaagcaaaattatctttgtttgcagatgatatgatcctctgtgtagaaaatccttaaaatgtcacaaaaattgttagaactaatgatcgaattcagtaaagtagcaggacacaaaatcaacatcaaaaatcagttgcatttatttacatcaataatgatctatctgtaaaagaaatcaagatggtcagacagtttttataagataatctgtggaaaatatgtaaaacttcttctgatattataccattcttgtatttgaatgatatgacctatttgtatattattttttaaatgcattgctagattttgttggttacattttaagtatattgaatctatactcatatataacattgttagatgtattcacagtgaactgcaacttttatcattatgttcttactatttgttatatttttctttttattgaactatcaaagaagttttctacattattttcatttatgtataaaatcatttatatataacatttatacgtaaaatcatttttatataaaaatatacataatttatgaataaatgatcttacattatttctacattcaagttgttattgagattttctttgtgacttcatgtaagatcaattttcatgtcctattaagaagaaatgatattgctttcattggaatatatatttattatttatacatgttaagttcaattttacacttattatttaaaatatatatacatatatccaaatatgtatatatctgccagtgcttgttaaagattacagactttatatttgaatgttgcatcaacatttttctctgttgcatattttaggactattttcatcaaattaaacaattgagtttcactttctttttcttacactagttatacgtaaatgttgcctgactttctgtccattctaaagtgtcttggattttccaggattagcaacaacaagcattcctatggtgcattatgaggggtttcggcagcttgctaggttgcttagttcaagagcactctcttctgagggtgcatggaagtacactgcctttaataaatgatgccttttttacgagttgatgtgtcttccacttctattattttcttttttaactttctatgagatccttacttttcaccactttatttcttctttccattcactatcaagtctctttccaaaggatatctactttttttagg

SEQ ID NO: 8324 - DNA, 118 bp, Homo sapiens
ctcaagcctgtaatcccagcactttgggaggccgagggaggtggatcacgaggtcaggagatcgagaccatcctggctaacacggtgaaaccccttctctactaaaaatacaaaaaaa

SEQ ID NO: 8325 - DNA, 1383 bp, Homo sapiens
acctaagtctgtgccattatggagcttacattctggtatggagagttagacaattagtgaaatataatccttaaggaggttatagattctatagagaaaaatgaagtaggggccaggcacagtggctcatgcctgtaatcccagtgttttgggagactgaagcaggcagatcacttgaggccaggagttcaagatcagcctggccaacatagtgaaacccgtctctactaaaaatacgaaaatcagccgagtgtggtggtgctcacctgtaatcccagctacttagaaggctgaagcacaagaatcacttgaacctgggtggtggaggttgcagtgaggcggaggttgcagtgagccgagaccatgccactgcactccagtctgggagacagagtgagactgtttcaaaaagaaaaaaaaagaaaagaaaaacagaaaaataaagtagggtaagaaggataaagaatactggtgaagggaattatgatatattgatgtcttataaaaggagggaaagcctgtctgataaggtgatatttgagcaaagaactgaaggaattgagaaagtgagccatttatacatccagggaagagcatgccaagcttcaagtgcagtgacaaattcaaaggaacttgtcatgtttaaggaatagtaaggaaattagtaaggttacactagagtgaaggaaggggcatatgataagaaaagagctcacagagatagttatggagaacagaggccttaagaccatgtgggcagtagtgaggatttggcattttattcccagtgagagaggaagccattttcatgagagatttgacaggatctcacttaaaatttaaaagtaatcaggccaggcacgatggctcatgcccggtaatcccagcaccttgggaggccaaggtgggaggactgcttgaaccctggagttcaagactagcctgggcaacatagggagagtgtgtgtctgcaaaaaaaaaaaaattctaggcatggtggtgtgttgactgtagttccagctactccagaggctgaggtgggaggattggttgagcctgggtggatgaggctgcagtgacccatgatcatgcatgggagacagagcaagaccttgtctcaagaaaggaaagaaatcactggctcttctgtaaaaaatgatctgttaagagtaattgaaaaactaaatacaagtaataaaataatctttcatttaagaaatactaccaaaattaagatggagatctagcaaaaagtcaaaagcagctgggcgtggtggctcacacctgtaatccctacaccttggggaggctgaggcgggaggatcacctgaggtcaggagttcgagaccagcctggccaacagagccaaagtctctactgaaa

SEQ ID NO: 8326 - DNA, 192 bp, Homo sapiens
tactttgggaggccaaggtgggcagattatcaggtcaggagttcaagaccagcctgaccaacatggtgaaaccccatctctactaaaaatacaaaaaaattagccagacatggtgtcacgcgcctgtaatcccagctactcaggaggctgaggcgtgagaatcacttgaacccgggaggcagaggttgcagt

SEQ ID NO: 8327 - DNA, 478 bp, Homo sapiens
gttgactctgtattcagccttcctaagagaggacctgattggttttgcctagtgacaacttcatgtagtatgcccctttgggcagagctgccaggtcacatcatcagcttctggctattttgaaaatgtctaccttacctttgcatcagttgctgatttttaattctcttagctgtgctcagagtagtgaagtcatgtgctataaaagcatggcaacccatggttaagtaccatctgcagcaccttttccaaaggtcctgtgtatgtagtaggaactgttattatctacattttacaggagagaaaaggctgaggttgagtgatttgccccaacaagttgggtccagcctaatatgctcaaggtaagatttgaatccaggacatctttcgtccccgacactcctaatgctatggctccttgaaagatgtccaccaaaatgtttgcagtggttatctttgttagttcataggttatcaa

SEQ ID NO: 8328 - DNA, 478 bp, Homo sapiens; identical to SEQ ID NO: 8327

SEQ ID NO: 8329 - DNA, 1182 bp, Homo sapiens
cttttacctccttcacttctgcctctgaggtggcccctgagacagcaagaccaacccctcctcttcctcctcctcttccttagcctactcaatgtgaagatgacgaggaaaaaacctttactgggctccacttccacctaatgaacagtaaatatattttctcttccttatggttttcttaataacattttctttttctagctttaatataagagtatagtaaataatacacacaacatacagaatatatgttaatcaactgttattggtaaggctgctggtcagtagtagattattagtagttaagttttgggagagtcaaaaattatatacccaccggacatggtggctagaggttaggagtttgagaacagcctgggcaacatagtgagaccgtatcactacaaaaaacaaaaaattttaaaaaaaattagttgggcgtgttgacacatacctgtagtcccagttacttgggaggctgaggagggaggattgcttgagcccagcatcaaggctgcagtgagccatgattgtgccagtgcattccagcctgggtgacagatcaagaccctgtctgttaacaaaaaaaaagtatacacagatgtttgactgcgtgggagttggcaccctaccaacttgttcaaggatcaacattattcaaggatcaactgtagttatactatattgtttaggaaatacaagggaacaaagtcggtacgtgttcagtacagatacaatttttaaaaaaattcttgatctgcagttggttgaatccacagacgtgtagtgcacaaatacggagggccgactgtatttgtagtcaccctgatagtttgtgacacagccattgcttttttaaaaagtgtggttagttctctgtgacttcctcacttctatcctaatagtacttctgtgctactcctctggctcatgccacctgttgctttgccatagaaacagtccatcttcaggttggtgatatctgcttagatttccctgtatctttgctgccctccttcaagtttttgtacaagttagtatgtacagtgtcatacataaaataaaaattccacagcatgttttacttaattaaccttcattaaagaaagttgtaaaagaaaaaagaaaaatccagcaggtcatggacaacttaaaaagaaagtttggaaaaaaaaaaaaaaa

SEQ ID NO: 8330 - DNA, 1183 bp, Homo sapiens
cttttacctccttcacttctgcctctgaggtggcccctgagacagcaagaccaacccctcctcttcctcctcctcttccttagcctactcaatgtgaagatgacgaggaaaaaacctttactgggctccacttccacctaatgaacagtaaatatattttctcttccttatggttttcttaataacattttctttttctagctttaatataagagtatagtaaataatacacacaacatacagaatatatgttaatcaactgttattggtaaggctgctggtcagtagtagattattagtagttaagttttgggagagtcaaaaattatatacccaccggacatggtggctagaggttaggagtttgagaacagcctgggcaacatagtgagaccgtatcactacaaaaaacaaaaaattttaaaaaaaattagttgggcgtgttgacacatacctgtagtcccagttacttgggaggctgaggagggaggattgcttgagcccagcatcaaggctgcagtgagccatgattgtgccagtgcattccagcctgggtgacagatcaagaccctgtctgttaacaaaaaaaaagtatacacagatgtttgactgcgtgggagttggcaccctaccaacttgttcaaggatcaacattattcaaggatcaactgtagttatactatattgtttaggaaatacaagggaacaaagtcggtacgtgttcagtacagatacaatttttaaaaaaattcttgatctgcagttggttgaatccacagacgtgtagtgcacaaatacggagggccgactgtatttgtagtcaccctgatagtttgtgacacagccattgcttttttaaaaagtgtggttagttctctgtgacttcctcacttctatcctaatagtacttctgtgctactcctctggctcatgccacctgttgctttgccatagaaacagtccatcttcaggttggtgatatctgcttagatttccctgtatctttgctgccctccttcaagtttttgtacaagttagtatgtacagtgtcatacataaaataaaaattccacagcatgttttacttaattaaccttcattaaagaaagttgtaaaagaaaaaagaaaaatccagcaggtcatggacaacttaaaaagaaagtttggaaaaaaaaaaaaaaaa

SEQ ID NO: 8331 - DNA, 442 bp, Homo sapiens
agacagtgtcttgctatgttgccgagggtctcctagcttccagcccctcctccctcagcttcccaaagtgctgggattacaggtgtaggccgttgtacttggtccccattttttcttttttctttttttgagatggagtttcactgttgtcgcccatgctggagtgcacgatcttggctcactgcaacctccgcctcctgggttcaaatgattctcctgcctcagcctcccagatagctgggattataggtgtgcactaccatgcccggctagttttgtatttttagtagagatggggtttcaccatgttggtcaggctggtctcttaactcctcacctcaggtgatccacctgcctcggcctcccaaagtgctgggattacaggtgtgagccaccgcccctggtcccattttttcttgctcattgtcgaatctccagtgct

SEQ ID NO: 8332 - DNA, 443 bp, Homo sapiens
gagacagtgtcttgctatgttgccgagggtctcctagcttccagcccctcctccctcagcttcccaaagtgctgggattacaggtgtaggccgttgtacttggtccccattttttcttttttctttttttgagatggagtttcactgttgtcgcccatgctggagtgcacgatcttggctcactgcaacctccgcctcctgggttcaaatgattctcctgcctcagcctcccagatagctgggattataggtgtgcactaccatgcccggctagtttcgtatttttagtagagacggggtttcaccatgttggtcaggctggtctcttaactcctcacctcaggtgatccacctgcctcggcctcccaaagtgctgggattacaggtgtgagccaccgcccctggtcccattttttcttgctcattgtcgaatctccagtgct

SEQ ID NO: 8333 - DNA, 717 bp, Homo sapiens
atgagtcacagtcacaaacatataattacaagccagtgtaagtatatgaaaatagggttttgtgatcttgtcaacaagagaacctgacctatttggggacagtttgagttgagatctgaaagacaagtgggagttaaatagacaaaacctgggggttgtgtgtagaggaaggtattctaggcagaagggaatagaaaggctgtgagaggggaaagtttagtgctttagaaacattaaaaaggccaacatgaccaggatgtacaaagcaaatgcatgtatagagttggagaggtagccagactatgcaggtttttgtgaattataccaatgatgttggtctttatactaagatcaatagaagccgttaaaggggtttgagcagcagaatgatgtggtcagagttttataagatcacactttctgtaatggagaactgacagttggaaggcaaatgtggatatgaggtggaatggacaaatgaagaattaagctcattatgctctttatacctagttatgtgccatgaaacaccacagactcccagctcatctcttatcctcctcattctaattactcttagactccttgtatccttctccacctctcctttactctggcaactcttctacagcatccacagtgtaatttatggcccattattagtaaaatctcctgcgtctgcaacctagtttttaaatgtttctttctccttgctct

SEQ ID NO: 8334 - DNA, 717 bp, Homo sapiens; identical to SEQ ID NO: 8333

SEQ ID NO: 8335 - DNA, 356 bp, Homo sapiens
cctatgacttaaaatacctaacctcctggaaattcagcccagtgggtctcagcctcattttacccagccccccttcaagatgggagttgtgcttgttcaaaggcccctgacatgacgatgctaaaatctccactcagggaggagctatagctcatgaccatctcatgagaccttatactggcagaacggctcagtgcatgtgtgccactgaaactccctcctctacatgtggtgacgcaccctctcccctctccatggcctcagaaaaccctcctgtcactttgcctcagagagacactgctttggagaatactccccatggcctccttacttgagtcaagtagtaaaacctctac

SEQ ID NO: 8336 - DNA, 647 bp, Homo sapiens
ttggtctcactgacttcaagaatgaagccgcggaccctcgcggtgagtgttacagttcttaaggtggcgtgtctggagtttgttccttctgatgttcggatatgttcggagtttcttccttctggtgggttcatggtctcgctggctcaggaatgaagctgcagaccttcgcggtgagtgttacagctcataaaagcagcgtggacccaaagagtgagcagtagcaagatttattgcaaagagcaaaagaacaaaacttccacagtgtggaaggggacctgagtgggttgccactgctggctcgggcagcctgcttttattcttttatctggccccacccacatcctgctgattggtagagccaagtggtctgttttgacagggcgctgattggtgcgtttagaatccctgagctagatacaaaggttctccatgtccccatcagattagttagatacagagtatggacacacaggttctccaaggccccaccagagcagctagatacagagtgtccaatgggtgcactcacaaaccctgagctagacacagggtgctgattggtgtgtttacaaaccttgagctagatacagcgtgcccattggtgtatttacaatccctgcgctagacataaatgttctccacgt

SEQ ID NO: 8337 - DNA, 356 bp, Homo sapiens; identical to SEQ ID NO: 8335

SEQ ID NO: 8338 - DNA, 647 bp, Homo sapiens; identical to SEQ ID NO: 8336

SEQ ID NO: 8339 - DNA, 1379 bp, Homo sapiens
ccgggtcgggcgccgcggggcggaagacgagggcggcgaggtcgggttccgggcgcttggagaagatggtgctgcggcggctgctggccgccctgctgcacagcccgcagctggtggaacgtctgtcagagtcgcggcctatccgacgtgcggcgcagctcacggccttcgcactgctgcaggcccagctgcggggccaggacgcggcccgccgcctgcaggacctcgcggctgggcccgtgggctccctgtgccgccgcgctgagcgatttagagacgccttcacccaggagctacgccgcggcctccgaggccgctcggggccaccaccaggtagccagaggggccctggcgcaaacatttaatcctgggctgtgcggggccgaggccgcttgcttttccttccgggctctacagtggcatcaatgtggaggggtcattccgggcactgcgcgcggcttcgaatcccgactgggattgttggcctgcagacatcccacgcataagagcctaggccagaccgcccgctccgttgaagtcttgtgattggacaagacacagtgtggagacagccctaagcctaacagagatgaaggtaggctgggtccagacacggcacctacggagagccacggaccgaagccagagagcctttcctctgcaagtgggactgaaactcttgacagatgctgctcaatctgactggtatagcaggacagttaattccagggacgatatggatgaaaagacaaccctacagctgccaaattcctttgattaaatgtgtgagctggttgataggcatgagtgtgatacttctcaggcaagatgtgttaagaataccggggactgtaggcctatggtaataataaacacgtattttatgaaatgagtcttctgtgctgggacttgctcattgcactctatgtgttatctcactccttacaacgacattcacatgaggaagcagattactttttggatttttttgtagagatggggtggtctcgaactcttgggcgcaagtgatcctcccgcctcagcctcccaaagtgctgggattataggcaagagccactgcgatggaaacagaggctgctgcttaagttgcccaaagtcttgcagagtgggatgtgagcagaggcatttgactccagggcctaagtccttaacacagctctgcagcatttaccctgatactcaaccccttccttccccaaccccccaccatcaggcattaagactactgcctaggggcagggcctggtggcagttgtgtcttatcccagccactgcagaggcaggaggatcgcatgagcctgagatgagaccagcctgggtagcatagcgagaacctttctcaaaaaaaaaaaaaaaaa

SEQ ID NO: 8340 - DNA, 1381 bp, Homo sapiens
ccgggtcgggcgccgcggggcggaagacgagggcggcgaggtcgggttccgggcgcttggagaagatggtgctgcggcggctgctggccgccctgctgcacagcccgcagctggtggaacgtctgtcagagtcgcggcctatccgacgtgcggcgcagctcacggccttcgcactgctgcaggcccagctgcggggccaggacgcggcccgccgcctgcaggacctcgcggctgggcccgtgggctccctgtgccgccgcgctgagcgatttagagacgccttcacccaggagctacgccgcggcctccgaggccgctcggggccaccaccaggtagccagaggggccctggcgcaaacatttaatcctgggctgtgcggggccgaggctgcttgcttttccttccgggctctacagtggcatcaatgtggaggggtcattccgggcactgcgcgcggcttcgaatcccgactgggattgttggcctgcagacatcccacgcataagagcctaggccagaccgcccgctccgttgaagtcttgtgattggacaagacacagtgtggagaaagacccctaagcctaacagagatgaaggtaggctgggtccagacacggcacctacggagagccacggaccgaagccagagagcctttcctctgcaagtgggactgaaactcttgacagatgctgctcaatctgactggtatagcaggacagttaattccagggacgatatggatgaaaagacaaccctacagctgccaaattcctttgattaaatgtgtgagctggttgataggcatgagtgtgatacttctcaggcaagatgtgttaagaataccggggactgtaggcctatggtaataataaacacgtattttatgaaatgagtcttctgtgctgggacttgctcattgcactctatgtgttatctcactccttacaacgacattcacatgaggaagcagattactttttggatttttttgtagagatggggtggtctcgaactcttgggcgcaagtgatcctcccgcctcagcctcccaaagtgctgggattataggcaagagccactgcgatggaaacagaggctgctgcttaagttgcccaaagtcttgcagagtgggatgtgagcagaggcatttgactccagggcctaagtccttaacacagctctgcagcatttaccctgatactcaaccccttccttccccaaccccccaccatcaggcattaagactactgcctaggggcagggcctggtggcagttgtgtcttatcccagccactgcagaggcaggaggatcgcatgagcctgagatgagaccagcctgggtagcatagcgagaacctttctcaaaaaaaaaaaaaaaaa

SEQ ID NO: 8341 - DNA, 743 bp, Homo sapiens
caattctccgatctttacatccgaacaccctcaaagtgccgagcttggcgggtccacctccccactccgaagcttccccgagggcggagtgaggactccacttgtgtctcccacgcaccgcgtacagcttccgtaacaccatcctcccagagaaggggcccgaatcgccgaagggcactgcttcgccgatttaaaaaacaaagcaaaaagccccgcatctgcatcaggaaggcgcctctgcctactctgggagagagaagggcacccctcccccttgctacgtagtcgtctgcggaggcacaaccgtggaaacgggagccgccaccaccaccaccgctcaaacctctcggcactggctggggtacagggagcggctgcgagcgaatgggataagcgagcctccagttccccgtcttccagagcaagtggcttcagtgatatccaagcgcccttccagcacccattccctgcctcgccagcaggcaccggggccccacttggcgtttgcggatttcagctgaatgggaggcgacacaatgagacaagagcaaaccgtttctcagcgttcttgcccagggccttcccgtctcgcggcccggcctccctcacccggaagtgctggtcccggtactggctcagctccacgtaggagtcgctgcgcagcgccttcaggaggccacccgacatagtgcagagaagcggaccacaatgcggcgactcccggcacgaggctgcgtccgcga

SEQ ID NO: 8342 - DNA, 855 bp, Homo sapiens
aaagagagatcagattgttactgtgtctgtgtagaaagaagtagacataggagactccattttgttctgtactgagaaaaattcttctgccttgagatgctgttaatctgtaaccccacccccaaccccctgctctctgaaacatgtgctgtgtccactcagggttaaatggattaagggcggtgcaagatgtgctttgttaaacagatgcttgaaggcagcatgctcgttaagagtcatcaccactccctaatctcaagtaccgagggacacaaacactgcggaagcccacagggacctctgcctaggaaagccaggtattgtccaaggtttctccccatgtgatagtctgaaatatggcctcgtgggaagggaaagacctgaccgtccctcacagcgtgacacccgtaaagggtctgtgctgagaaggattagtgaaagaagaaggaacgcctctttgccgttgaaacaagaggaaggcatctgtctcctgcccgtccctgggcaatggtgtaaaacccgattgtatgttccatctactgagttaggggaaaaccgccttagggctggaggtgggacatgggggcagcaatactgctctgtaaggcattgagatgtttatgtgtatgcatatctaaagcacagcactcagttctttaccttgtctatgacacagagacctttgttcacgtgtttatctgctgaccttctctccactattatcttatgaccctgacacatccccctctccgagaaacacccaagaatgatgaataaatactaagggaactcagaggccggcgggatcctcgtctgctgaatgccggccccctgggctcccttttttctttctct

SEQ ID NO: 8343 - DNA, 855 bp, Homo sapiens
aaagagagatcagattgttactgtgtctgtgtagaaagaagtagacataggagactccattttgttctgtactgagaaaaattcttctgccttgagatgctgttaatctgtaaccccacccccaaccccctgctctctgaaacatgtgctgtgtccactcagggttaaatggattaagggcggtgcaagatgtgctttgttaaacagatgcttgaaggcagcatgctcgttaagagtcatcaccactccctaatctcaagtaccgagggacacaaacactgcggaagcccacagggacctctgcctaggaaagccaggtattgtccaaggtttctccccatgtgatagtctgaaatatggcctcgtgggaagggaaagacctgaccgtccctcacagcgtgacacccgtaaagggtctgtgctgagaaggattagtgaaagaagaaggaacgcctctttgccgttgaaacaagaggaaggcatctgtctcctgcccgtccctgggcaatggtgtaaaacccgattgtatgttccatctactgagttaggggaaaaccgccttagggctggaggtgggacatgggggcagcaatactgctctgtaaggcattgagatgtttatgtgtatgcatatctaaagcacagcacttagttctttaccttgtctatgacacagagacctttgttcacgtgtttatctgctgaccttctctccactattatcttatgaccctgacacatccccctctccgagaaacacccaagaatgatgaataaatactaagggaactcagaggccggcgggatcctcgtctgctgaatgccggccccctgggctcccttttttctttctct

SEQ ID NO: 8344 - DNA, 14759 bp, Homo sapiens
agaatataagaaagtatttgctgactgaagccagagaaaaaaatagacctgaatttcttcagggttggcagactgctgttacgaaggtaagtatgtgataacaatgaaacccaggcatgtccaggggatggaattatctaagggtgggtgcctttaagagcatttgaagactagtgacagagataccaaggagagcctggaggctccagggaggcagctgagaatgaacttcagttgactattcatcatcgctgctcagttgcccagtgcttcccgggagcaaatcacttcagtcatttcctccctgaggaagttgctaatgatgtgtttgctcttctggggaaaaaaaaaatcttttttgggtggcacttgcctcttgcatcatggctcttatttccagatgacccatatagacccagagaaatgctgaaatgactatttggatccactgagggggagaaagtgcattgagctacttggcaggcatgtggggaagatagtagcccaagcgcttcagtcccaccactgtctggatgcagcaccatgcttggcccatgacattcaaactgtggggcagagtgcccaggcacagccgctcattcctgtcgtaaataccagtgtcttcattgatggtgggctgtgttgtttccagtgtttttgtgtattggatctcatttgatccttataacctgtgaggtaggcaggtcatttagggataagcatcgtctttattttgtaaatgagaaaactgaagcccaggtgtgattttccccaaaggacatcaaaactattgatacagagtcaggtccttgaacacaggtctgtctggatcattgacaggatgttataggcaggatcttgaaacaaacctttaacccaaacccaaagagacaagatttattagttcacccttgaaccgaaccaaatgctaaattttaaaattaagcttaagttttgtgttttgaataacctagtataccagttcaaaccagaactagtaaatttcctgaatttacccaactaaaaaatctgggtattctaaatttagtcaggatcttctgtattaccgctttgagcagaatacagtaaccagttcttttaaaaacatactgttggccgggcacagtggctcacacctgtaatcccagcactttgggaggcaaaggtgcgtggattgcgtgagtctaggagttcaagaccagcctgggcaacatggtgagacctcatctctacaaataataaaattagccaggcgtagtcccagctacttgggatgctgaggtgggaggattgcttgaactcaggagactgagatcgtgccactgcactccagcctgggcgacagagtgagaccctgtcgcgaaaaacccaaaacaaaaaccatactgtttaccttcacgatttctttcaaagaataggacagggtcgtgtgatgtgagatcagaagtgaagactgctcagcggagttgtcgccatcctagcatccagaggctgggcctttgttctcccaggcacagttccattttgactccactgtcaatgaattgatagcagagctcagtatccaaatgcatgttttaaaacaggtttttacatttgatttcccatttctcatatttaggtaaaacattgtcctataaattggggttgccacctgatagctctttttatgtggccaggtgcctccataaaattagatgcttgagatatcagatataccagctgtcctggagagagaaaagtttcctatcttttgcgcatttttccataaaggagtttttcttatctgaagagaagtaatggatcttgttttaatgactattttgtttttcccttcagtgtattccacaacagaaaaacgacagtgactgtggagtctttgtgctccaggtaaagaaacacttgcttttcggaacttacaatgtgtgaattgagtctgttgggttgagaggggagagatggcagttcctgtatgtgtatatgatgctaggtacgagcaacggagtactttccctcccctttattgctgaggagcagtagtttctgcatgttcagatgttatcattaggaagaaccaccttccagggatcaagagtgaagtgtgggtatcatccatgtctcactggaggttattagtaagccacattggagactgacttgaatttgtccatatcataaccattggcatttgcagaaataaaaaaaaaaaaaaaaacattggcaagcaatctgcaggtctttgacacagtgattagattttaaataaggtccacgttgagaaactgccatcttgtgctgtagatctccttagagatcgaaaagggctatggaaaaaaattcagttatacatatatttatgttggaaattacagaatatgatgcatgaatttagagatttgcaaagatcttggaagaccggttcgtttgtatacctcatgcatgtttggggttttataaacaaattcaagttcccattaagggccatgatgggtctagctgcactccagcaggttgcactttgggaggaattgaggccttttcatcagttgctgcttttcacagtattgggtcaggagggagaggagatcccaagccatgcactagcttggtcagtcacctataatttgggtaaatgcttaaaacagtgtatttttacagtagtttaaacagacatgaaaatgctgccttagatcggggtcccaaacccctgggccacggacagatactgtccacattaggttctcttaggagtgtgaaccctgttgtgaactgcagatgcgagggatctaggttgctcaccccttatgagaatctaactaatgcctgataattcatcctgaaaccaaccccctctcccccaagtctgtggaaaaattgccttacatgtaaccagtccctggtgccaaaaaggttggggtcttctgccttagacactattaggtctgcatttagtaaaacagaatgggctggtccacaactccaagtgccactgaagtgtttctgggaccttttttttgcagtactgcaagtgcctcgccttagagcagcctttccagttttcacaagaagacatgccccgagtgcggaagaggatttacaaggagctatgtgagtgccggctcatggactgaaactcagcagggactctgggaagtctgaccaagttggagcagatggtttgttacttgaatctccaaacacttagttgaatttttacagatatttcagatcagtggtgttgggccactattgttacctcaaatttattttttgcccttattcatttctccagctaccatgtactattgtttaatgttcagtttggtttcatttttaattttatggttctgtgcgtcccccatatttaatatttattattcaaacgcatgcatatagacagagcatgcagtgaagagtattaaaaaaaaaagcttagtagatttggtgcagcttttgaaacttagttagacgtgaactgaatacaggtttcaaatttactcccagaacctaaaaatgcaagatgtttttgatacaacataactctgagaatagtaagtgttccctggggcattaagggtagctgggggtggttttgacaaatccagtcctgttttactttaccagcggcaactttcaccaacttccctctccaagtgagtcttagagagtgcagtccattccttttgaagggtgagatggaagtggtcgtaaactgactggtgtcttctgtttctggaggcacacttgtaagcacagtggctgctttgggaggagtaaggtgtgagaaaaagcaaccttggaggccagtaacaatgacagatttcaatcgtggttttaggaattataatacgtggcatacatctcataaaggcttttgctgggatattgaattccctgaatttttctgttttcgacctgttaaaaaaatcttaacatccatcaaactagtggtcaaacaaatgagaatgcagctgttctcagagtaatttttaagttgtcatttccctgtgttgcctcccaattggaagaagttaaggtttaccaaatgcatttctatttcaagggtatctgaaacgtaaacattcaaaactgaaggctgactgacttgagatgttttgcaggtggctggagagaagagggaaggtaatagagacaacttagtcccatgggagcgcagcaaccgtgtcaggttctttctcctgtcccattagtgacctcagtaacatgcagggtacgtctggcttctgcatggccagtgctgacactagcacagctgttcttctccttctgttgaacctcatcttctgaagaaaggccaagtggcccttgtccatacacttagctgcattaggatgaatatcacgcgtctcacatctttaatccagcctttcgtgacatgttggaaagatacatgtgaaacctacccagttaccctttctgaattgggaggaaaaccaaccaatgtatgtatgagaaactcagaagtctgaatagaaaaacaaagtaaatggcagaagattctcgagtttatgcccgcgtaggtttggagtgttgaaaaagctaaaatgtttagtttcacttggccctgaggtatggttgagaaggctgactgccagcagttgaggattgagtccgaccatgtttacatgcagggttcccaacaccagtggtgacactgggaagcagccccagcactttcctctcctgagtcctccagacccaaaatccttaatgtcaaaccaggtcagtgtttcttactgtgtttcaagtcgttaaaaagactgagagtagaggcactttatgctgctataggtggggttctgtcagcgttaggaaaaaatgacagtttagggtaaggaagatctcataatgagtttttcaaacataattatgcaaacatgagatttttcaaaacatgccagaaatttgcctctgatttttttttttttttgtgggggtgtggtataccaaagtagccagtcactgggctgtcagttcaaaatgtcttgtacttcagagtgaggaagtgtttcagttcctcagtgacagaacctggcatgcagaagagacagaattgttcctgtaagaaaatcaacgccgagagagagctgcccaaatccagtgactcttccacttccagtctcatgcttcatagggcaccttgaggtgtgctgcccagtgtggcttagactaaatgttgagtttgggtttttttttttttttttttttttttttgagtcagagtctcactgtccctcaggctggagtgcaatggcgcaatcttgcctcactgcaacctccacctcccaggttcaagcgattctcctgcctcagcctcccaagtagctgggattacaggtgtgtgccaccacgccccaccgatttttgtacttttagtagagacaggatttcaccatgttggccaggctggtcttgaactcctgacctcaagtgatctgcccgcctgggcctcccaaagtgctgggattacaggcgggagccaccgtgcctggccaatgttaagtattttaaaagtcattttaaaatatttgtcattgatgaaacttggtttcagcacacgtaattgctttccctctcttcttgtgattaggtgtaaacctctatttaactcaagtcctagattagaatgtcctttgtcctgatgtttgcagtaattgcttccttggttaataaagatatttttgaaatatactctggactgttggtgaaagaggcaggcatggctttactggtactagtttggcactgaactgtttgggtgcccatgaggtaggcagaccttatgctttttttttttgagacggagtcttgctctgttgcccaggctggagtgcagtgatgtgatctcggctcactgcaacctctgcctcccaggttcaagtgattctcctgcctcagcttccccaatagctgggactacaggtgtgcgccaccactcccagctaatttttgtatttttagtagagacagggttttgccatgttggtcaggctggtctcggaactcctgacctcaggtgatccacccgcctctgcctcacaaagtgctgggattacaggcatgagctaccgtgcctggcctaaaccttacgcttttgaggttgagtgcaggccttgtgataactaagcgctacttttgacgagccttcaacaagctgcccagtcctctcctcagcagacgcatcaggttgtagttgcatctttacagtggtctttccttttattaaatctatagcagtgaatatagatttgattcaacttttagttacgttctctcaagaatcctaatcaactttcagttagcctcttaagaaagggaaaaaaaggtgctgccagtcatccccaaattatgtttttggctgtgcattctattttctacatagcactgaatctgagtaacagtcatcctggatttatagttggaacagaacagtaacagacctaactgggactcagccagcactagcctcatcttagctgccccttttctctgctttgcagtttactgcttccctgggctagccataacggggttctgggcaggtcagactcttcagcaagacagtgtattaatagtgtgaattagatacactgatgacctgctctgcctagttaagaaactgaattaatcagcagttacaaagcacatactttgttacgtgctaggctttgcctcctggcctctagataattaagacggcccagggaataccagcagagaagtgctaattgtatttgggtgttacaaaagcagacctagacgagctgttcacttaactggtacctgttggtcagaaaaagaatttatttagagattatgatcatgtaaaattacagtactcaacccttctagcaaagtatttttttgaaaaataaactaaatgcctttataaacttgtgttctctcgtcttgagtaacatgtactgtttggcgaggagtaatttttttcttgtgacattccagtcacgacagaggtcatttcagaacagtgagcagtgcaggccctaaccagctcaccctcagagcagcagcaccatcactcgaattttctacaacggaaatgttctatatcttcatcttagcttgactgagaaactgaatgtttaattctcacacttcactaacatgtattaatagtgatgccttcatctgtacgtttgaattttcacttttctccgattaaagtgagaaacaggtcagatgctatccatgagaaataggaaagaatggtgcagtaaagagactcacatttagtgttctctagcccagcaaacataagatgttcttaatccacccacaatttcccttcccttgcaatcatccagagcatgttttttggaaaactaacctattcttccatcagtagaggttgcttggtgcctatttgatcactttcacaagaaaatctgtgcgctctcttcacacgcagcaatagttatttccaactgtcagtcaatcaaaatggacacgcgaattgtccacactattcatagaatccccctggaactcattcatgtgtatccagagtacaggaattccagaacacaaccctctttataggccaggaaacaggcagcaacaacgataagttcatccagctttattgaaacctattacagaagacaatccaaataaaaccactgtctcctgtagaaatctgagttatgttgttttactacaaaagaatataaaacacattaaattacagtgtgaaggaattttaaaaatgaacagtgtatcctcattaaatgtttgcaaagtttcttcctaagcacttacaactagttacagctcttttaaaaattcagatttctacactcagtttaacaggagagacattcacacttagtacttcagccccaactttcacggactattggaaattagaaggtactttgttgctaagtgaaaaaaatgcacattttttcatatcagggaaaattatactggacttaacagttttaaatgagcaataactcagatatattagagagaaatcacctcttgccttacaaataccaaataaattccctagactcccctcccctgtagagaccatcagctcactgtgaaggcttgagcctcagtaggtaaaatttgaggaaaaaaatgagaaatggctaaaagaggcatctgctgcaggaaccttctgtgactgtcaaacattccctcttcaagctcccttttaaaacccagtccattcccaacatcactgaaaatgaaaagaataaacttgctggtcctcatgtcaaggcagtgttttcattgtctcttgatattttatcccatttcctattgacaacatctcccctacccctgaaattatttagaggttccctctatgacaaacccttgcttttttttagctttaggtataacactgacatcttttgaaaaacgtgttagtaaatactcaagttctggcctcatttcctgatgtatgaagcatggaagcagtgctgtcctgtggagattgcttttgcaccaactacacaggaaggtccttgacctctaagcatgcctttagaggttagaattcacagaaaacaaattcaattgtcaaacacctgttcctaattttgtgcaaagcaatacaacatagcacaactccatttgttgtttttcgttttgctttgtagagacggggtcttgctatgttgcccagtctagtctcaaactcctggcctcaagctatccttcctcctcagcctcccaaagtgttgggattacacgtgtgagccaccatgcctggccccacctccatttattaggctatctcatgcaaacttaaaattaaaaaaataatcccaggccccaatgtagatcatgaacctacttaagactcattatggtaaaaacaaattcttacatttttctgtctttctaaaagtgtagtggttatggctaaagactaatcaacattacagatccaatctgttgtcaaagaacacaatttctgacctggtaacaaaattgttctgataatctgacacatggccaagattctcagacaagaattaaaggcattcttttggattctgtcctttaataactttcagaggcttccagctcagtaaagacactgatcaaatcttggtaaaaatgggctcgtgtgcagactttaggtgatgttcttcagcaaattcaacaggccaaaggagtgtttgtcactgacagagctctcaccactcactggttctgtgccagttttccatagcctcctctcccagcatcgtagtcctgccgatactcatcccgaacctttaatggaaagaatccagagttacagtatggaaaagaatggtgtaacaaatatgcctcccacaaacatgttagacaaacagtgaaacctgttcagatgccacaatgtgaacatttcaagcaggacatatgcacttcagctcacttcagtgcgttttgctttcattttagatgttcctgcaggtggaagatacctagccctagcagaagttcaagaatggttgcttgttagaaacgtacagaacataccatttcacggtttaaaaaaaaaattcacccaaaccgttgggtggttttcagatccacttcaagccaaggttatagacacaaagttatttacaaaagagtaaatacaaattgccaaaacacctgtcattgtgactggaatcccaggcaatggctgagcccagagacccttcttgcatacctggcccccagatcgcccacggccgtattgcctgccctccttaaagcctgcgtcccagtctgtgcgaatgattcggtcatccagacgcgtcccatttatgtaccgcatggcgttttccgcatctgcgcgtgagtaatatcttaagtattaaggaacactagcatttttccaaacatttctggaaataggggaacaacatgtaaatgaagctgagttgttaaaaagtacaagagctaatccaaccagatggagttcaaagacagtaattcagcttgcccaggcctgtttgcgattggtttggaagcacatagagtcaaatatgacacgtatccatggctacactgatcatatttcttggacattcctgttgataatttttggtcccatcatctctgtattttggtttgcaagtttagatcactgtacacttcttatccaagaaaccagtgctgtatattcaagttaggttctgtacattccaaggcaccctaatcaagagaaggtcaccgagcacgtggaattgtgctgcacttcactaaaggaaagactcaagctgtcaccaaggtagcagttcccaaacctacttcatcagagacctccctttaattaaaggggaagacatttaatctcagacaaataaaaataagacaacagtgttctgaataaaccatctggagaaactagtatctttgatgttagcaagccaaaataaaatctcttttcattctagcatttgggaaacccgtgtatccccgaggcaagcctgcaatctgggagagaagccctgcctgggtccagtgagtcagcattcttttccttaattatgagcagaaatccagggatcaccagacacttaaggaaaaatttcaaccgaaacaaacataattcagggcacaggaaaaaattcaaaagatacattaaattgggcctgcaaaatttctcagaatattaaattgaatgaccaaaacatacagtaaaaagaacataggataaatccaagaggtccaatacttaaaagagtctgagtaagggaattaaatgatcaaagtaaatagttttggtttgtacctatacagtcaggttatatacatctatataatgaaatactatacagctatttacttaaaagtttttttctttaaagatggggtcttaacccgtcacccccgctggaacacagtcacaactcagtgcagccttgaaatcttgggctcaactgatcctcctgcctcagcttcctgagcagctggcactacaaacaccagccaccatggccagctgtacagctattttaaaaaaagacctacatatgctgaaatggaacaataaaaaataaaaaaatgattttaaaaacagcacatgaaatacactaccgcacacccacagggttacttcttgaaagacgcccaagaaactgctaactgactgcctctggcaaagggcattaggggtttagaacagtacgagatttttgtattttcaccacattctttggaatttttttttttacgtgaagggcaaacatttcttgaaaaactttttgttaaagaaccataaagcatggatttcagaagagaatataaatagtatcagctttacagtataagggcagagacacactgggtggaaagtaggagggagatgaaggaaaacgtagggacgagtgcagggacgcttgtgagctaccactctcagctctaccctggttcagcagctacattagatccatgggaaggatactccacaaaacagaatccacatgctgttttcttcattttatccagacccataatgattttctttatgtcaccacttttgctgaagagttcatagatttgttcttcagttgtgtaaaaagaaagatttccaacatataacgtacagcttttcttcagtaatttttcttgttcttcattgtcaccctagaatttcaaatagagacaaaagttaagcaacttcagagccttgcttaaatagtatttctaagtacggtagagacattcattaattctggtttggaaatcaacttctctcatcccagcctaccagaaatcccttgcccaaaaagggggatgtcgaccttctgtgaagcacttatgcgaagtccagactcttagtagagacagggctcaaaagttataccacatacaacaaagtcacttctacgcccgactgccacgcaagtggcttcccttttccctgcacacaccatatcctcagcagtgcatcctttaaacccaagtgtagactctggaccttgacccaatatatgacaaagggcccttttatccttcgtagtgaaaaataagtgggttttcagagagagagagagttcctctttaataaccccctagagactgttgaaagccacaaccttgatgctttacgtgctcatagatctttctctgagtttaggggaaaatgtagtgatcactaaaaacaaaacagagctcactttcttaatgggcttccaaattgggatgacaggatgaagccagagacttaagcatataactgggcttcatccaacacacctgacagacaaagccctgggtccaaaatggctcatcggggtcaggcgcggtggctcatgcctgtaatcccagcactttgggaggctgaggcgagtggatcgcctgaggtcaagagtttgagaccagcctggctaacatagtgaatgaaaccctgtctctactaaaaatacaaaaattagctgggcatggtagcagcgggcgcctgtaatcccagctactcgggaggctgaagcaggagaatcgcttgaacctgggaggtggaggttgcagggagctgagattgcaccactgcacttgagcctggacaacaagagtgaaactctatctcaaaaaaaaaaaagtccacaggacaatagtcattgtatgttaaaaagaggttttcggaactttggagtgagacattagagaaagtaaattcctttcattttactgctgttactgatttgtgaacatggaaaggaggcatcttctttttctacttttctcacacatgtaagtaagatccaaataaatagcctacagtttaagataactgtggtgtaagtgcttaaagtatattaatatggattccattcacagaatgctagaaattccacatgacagtatggcattagcatctaaaaaaagctacaggtttagactgaggagatgaataatagacaaagtcagaaggttccagttttcatctcacaggatgctttaagttcaaaatggtcaggatgtggaactgtctaaagtagtaactaaaagtggtagaagtgcaaatcatgcctggcacttaggcatcccagcactttgggaagccccaggcaggtggatcgcttgagtcccagagttcgagactggcctgagcaacacagggagaccctgtctctacaaaaaattagctggatgtggtggcgcgagcctgtggtcccagcttctcaggaggctgaggtgggtaggatcacttaggctcaggaggttgaggctgcgtgagccgtgattgcgccactgcacttcagcctaggcaataaagcgagactctgtctcaaaaaataaaatacattaactgaataaattttttttttttgagaaggaatatcgctctgttgcccaggctggagtgcagtggcgcgatctcacagcaacctccacctccccggttcaagcgattctcctgcctcagcctcccgaatagctgggattacaagcgcctgccaccacgcccgcctaatttttgtatttttagtaagacggggtttcaccatcttggccaggctagtcttgaactcctaacctcgtgatccacccgcctcagcctcccaaagtgctgggattacaggcgtgagccaccgttcccagccttgactaaataaatgtaagagcttccctaatttagcgtcaaacaaaatttccctttccctactctagtaacacatttcacacattctccacacttaccttctgctatatgcgccccttcctttcccagtcacaaggggatttttcccttttctgaatcctcactacaggggattatgagctcgcagagcgcagaaactgtcttccctctccctctagggtttagcacaaggatttggcgacagcactcgataaacgtttactaaataattgggttaatgagtcccgccccgccaacccccaaccgtattccatccctacctccgctgatactgaaaagtctactttgaatatctgctgcctcccctttttccacaaaatatactgtgatatagtccggactaaaaatttccctcttctgaaatccagcaattctccgatctttacatccgaacaccctcaaagtgccgagcttggcgggtccacctccccactccgaagcttccccgagggcggagtgaggactccacttgtgtctcccacgcaccgcgtacagcttccgtaacaccatcctcccagagaaggggcccgaatcgccgaagggcactgcttcgccgatttaaaaaacaaagcaaaaagccccgcatctgcatcaggaaggcgcctctgcctactctgggagagagaagggcacccctcccccttgctacgtagtcgtctgcggaggcacaaccgtggaaacgggagccgccaccaccaccaccgctcaaacctctcggcactggctggggtacagggagcggctgcgagcgaatgggataagcgagcctccagttccccgtcttccagagcaagtggcttcagtgatatccaagcgcccttccagcacccattccctgcctcgccagcaggcaccggggccccacttggcgtttgcggatttcagctgaatgggaggcgacacaatgagacaagagcaaaccgtttctcagcgttcttgcccagggccttcccgtctcgcggcccggcctccctcacccggaagtgctggtcccggtactggctcagctccacgtaggagtcgctgcgcagcgccttcaggaggccacccgacatagtgcagagaagcggaccacaatgcggcgactcccggcacgaggctgcgtccgcga

SEQ ID NO: 8345 - DNA, 3940 bp, Homo sapiens
cttcacaactgcagcaatcacgaccacacacagtggaacagtatattccaagtgctgatgaaaataatcatcaaaatggaatctaccctgctgaacagtgttcaagagatagtataaaatgaatgctttttaaaattatttatttttagggcggggctgccaagggaggaggaagatggcggcgggggcgaggtgaggtgttggcagtggaaaggggttcgggcttagggggcggggggacgcggagcgatgcccgcgccggcgcaggggcggataaaaagccgtagcgccacgggagtgggcgggagggagagggggtacccgagggccacaagagtatgacggggctgtaagagctggtgtggcgggtgctgcccccctgctctgtctgcaccgcaagctcacctcctggctccgcgttcggttcggcacttggaactggatctggcgactgtgccggcgcgccgcctctgccgcggtcctagcgccgctcggcttcacgctccgcaagtcccaggcgtctgcaggaaccgccatcaccacccgcacccgcgccgggggtcgtgcctgcccgcagcccaccaccaggtgcgctggcgcgcggacggcccttccctggagaagctgcctgtgcacatgggcctggtgatcaccgaggtggagcaggaacccagcttctcggacatcgagagcctcgtggtgtggtgtatggccgtgggcatctcctacattagcgtctacgaccaccaaggtattttcaaaagaaataattccagattgatggatggaattttaaaacaacagcaagaacttctgggcctagattgttcaaaatgctcaccagagtttgcaaatagtaatgacaaagatgatcaagttttaaattgccatttggcagtgaaggtgctattgccggaagatggaaaagcagatattgtgagagccgctcaggacttttgccagtgagtagcccagaagcaaaggagacccacagatgtggatgtagatatgttagtttactcagttcaaatggttgtcctgatcctgatttagtactgaagttcggtcctgtggacagcacacgaggctttcttctctggcacatcagattgactgagattgtctctttgccttcccatgtaaacatcagttatggggactttttctctgcccttcgtcattatgcagcctgtgaacagcgtctgggaaagtggtggtcattggttgcataatttgatctgaggcttatggaggaaaggacccaagtgactctgatgtttagaaagcacctatgaaaccctgtacacacctagttcataatcctcataatttatcaacaaacacaaagaagtgtcttacttgagagtgagtgtgtgcgtgtgtgcgtgcacacatgtgcacgtttgtatgtgtggaaataaacataaatggggacgtgttggagaaggaaatacatagacctacaactttgagcatatagcagtgatgttttaggaactgaaatgtcacacttaataaagtcttcagcccagctacttccctgttttcgtggggagaagggggcctgattagaactgttctggttgtgtttggcgggaggggaataaattttgttcagtccttcttagtgaccaaactttaatttttaggaataacatattgacttactgaactgaagcattctgagttgaaaggagccccagaggaaaggagttctgtgttgctcacatgttaaaagcttgctcaccttcagagcagagggaatacctatcttcagatatccgcccattttcatctcttcattatagtcaaacagtgtgacttgagagtgttgctctggtgtctgtattctggcttatgaagattatttgaaaaagaactcttactacattgaaatgcagacttttaaaaatttaaatattggattaggcagtcaaaaaaccaaacaagcataaaaggtcagtaagttgtaatcttaaaagtaaaggtggaaaactcattataaatggaagaaaagttttgatttccttttttgtttgatgggcagtatgccatattatatccaaagttggtttaaaaaatacttccatcaactatttttatttaaaataaacatttgagggaagttaccaaggcagcttttttcctcaaaagtaacctgttcctctttggaacagcacattttaggggcatggttaatacctgagatttttactcagtaaacctgatggttaccgtgtgtaaaatatctttaagtaggattgaaggcctctgtggggaatataatgttaccaaagcctataaaaataaattttacatgttcttttttatgacagagagcagcactggttctgttattttttaaaatgaataactgatttcttgacaggtgtttagtatttcttccctcactgctgattcttggatagaaaccattctttgtatttgatagactgttttcagaaaactcttatcaacaagtgtacaatagttatctaaaactgtacatttagaatggagcagtttaatactagatctcagaaatttgaaaaatagcaaagaagagtggatttggaaagcatggtctacaattgcttgtcaattctgaagctatgaagaataaatgtttcagctttggattatgaaaccccgtttatgatttttaaaacacacttgaaataaaaatgattgaactaaattttggtccggtgacatcattttgcactgcatagcccattatacattgtaagtctttttgttttaatttattactgagagttttctgtgaagctacagcatatctaatcagagaatttctgatttgtttccttatactgtgattatgttatattaaggcatttgtagtgcagcttaagactgaatttatgctttttgtaaacatgatcggtgtaaatgtcttataaacattctggagtatgtataactttaatgaatgaaatttaatggacctgattaaaataaagggatttaatctttgttaaagtgaagttagtggaataaattacctactggaatatagtccaagtcactaaaggtttaatatttgcatttttgtgcttttattttctccttccattcataattatatacttgaaagtacatctgtagcctatgacttgagtctcttgaacttctaggaagaggcaaactacaaactactaggattctgatttcagatataggcattccagaatcttctctttacgagttcacctgctagtataatctccacaacttgaatggccttggttgttctgtaattgctgccaaaatcatcacaagctgtacgtcatcaaggctccctttgcactcccaagaagaactgttcattttaaacaaaagtgtatgtctttatttgtattggaaaatattgtctttaaattgtttcttgttgacacttcccacaatggaaaaattaccaaattaaacctgttttatggatggcagcttggagcatagcaagaagttggaggatttgaattccattcccagttctcattgcgttttgtttcttaaaactataataattggttactgttataaagtttaaaaggtggttttaatatgaatagcaaattctggtatattgtgactaacgcttaagaatgcctgtctttgagaggaaggtgttataatattaatcaacagtgccaaatacactgtgcatatctacaatttaatctttgaatgtttgttactggattagctccctcctccttctgtgtgatggtaccatgcatagagtcaatcaaatccttgtgatgttttgtatggactttgacaacatgtaactaatgtgtaaagcaagtttttatgattaaggaatcaaatttattgaattttattattgaaagttgaaacttaacatgtataaacaaaaaacaataaaataataaactattttcattgactataaaaa

SEQ ID NO: 8346 - DNA, 1900 bp, Homo sapiens
tgggcagtgtgccatattataccaaaagttcttttaaaaaatatttccatcaaccatttttatttaaaataaacatttgagggaagttaccaaggcagcttttttcctcaaaagtaacctgttcctctttggaatagcacattttaggggcatggttaatacctgagatttttactcagtaaatcctgatggttactgtgtgtaaaatatctttaagtaggattgaaggcctctgtgggggaataaaatattaccaaagtctataaaaataaattttacatgttctcttttatgacagagagcagcactggttctgttatttttaaaatgaataattgatttcttgataggtgtttaatatttcttccctcactgctgattcttagatagaaaccattctttatatttgatagactgctttcagaaaacccttatcaacaagtgtacaatacttatctaaaactatacatttagaatggagcagtttaatactagatctcagaagttttgaaaaatagcaaagaagactggatttggaaagcatggtctacaattggttgttaaattctgaagctatgaagaataaatgtttcaactttggattatgaaaccccatttatgattttttaaatacacttgaaataaaaatgattaaactaaattttggtccagtgacattactttgcactgcataatccattatacgttgtacgactttttttttttgttttaatttattactgagagttttgtgtgaagctacagcatatctaaccagagaatttctgattccttatactgtgattatattatattgaggcatttgtagtgcagctgaagactgaatttatgccttttgtaaacatgataggtataaatgtcttataaacattctggagtatgtatagctttaatgaatgaaatttaatggacctgattaaaatgaagggatttaatcgttgttaaagttaagttagtcaaataaattacctactggaatatagcccaagccagtaaaggtttaatatttgcattttcgtgcttttattttctccttccattcataagtatatacttgaaagtacatctgtagcctatgatttgagtctcttgaagttctaggaagaggcaaactacaaactactaggattctgatttcagatgtagtcattccagaaccttctctttatgagttcacctgctagtacaatctccacaacttgaatggcattggttgttctgtaattcctgccaaaagcatcacaagttgtacatcatcaaggctccctttgcactcccaagaagaactggtaattttaaacaaaagtatgtgtctttatttgtattggaaaatactgtctttaaattgtttcttgttgacactccccacaatggaaaaattaccgaattaaacctgttttatggatggcagcttggagcatagcaagaagttggaggatttgaattccattcccagttctcattgtgttttgtttcttaaaactataataatcggttactgttataaagtttaaaaggtggttttaatgtgaatagcaaattctggtatatcgtgactaacgcttaagaatgcctgtctttgagaggaaggtgttataatattaatgaacagtgccaaatacactgtgcatatctgcaatttaatctttgaatgtatgttactggattagctccctcctcctgtgtgatggtaccatgcatagagtcaatcaaatccttgtgatgttttgtatggactttgacaatatgtaaataatgtgtaaagccagtttttatgattaaggaatcaaatttattgaattttattattgaaagttgaaacttaacatgtatgaacaaaaaccaataaaagaatatactcttttcattgactatagta

SEQ ID NO: 8347 - DNA, 7123 bp, Homo sapiens
gttcaaatggttgtcctgatcctgatttagtattgaagttcggtcctgtggacagcacattaggctttcttccctggcacatcagattgactgagattgtgtaagtaattaaaagcgtactgactttgtttagattcagcaagtgtttcttgagttcagcactgtactagatctggtggggatttccaaagaattataatactggatcctttacctcagttatttcacagtaccactggtaaaataaagtcatacataaatgagttagacacaagagagtgtatagttgtgcagatgtttggtattgccactgattaccttaggagatcaggagtgagagataactgtaaagggtgtggcttgatccgcagatacataaaatgggtagttttcttatttagagaaaaggcgagaaggggggaaaaagaaaacctggggtgtgttttaaagaaataaggaactagccacaccagagcagacagtgttaggcagtagtatgagatgaaatcaaatagttcagaggtgtcaaggctcagaaatctttaaatgccagcataggaatgtgtgtagtggtaggcaggcaataggaaacgtgttgagcctgtgtattatgtgggaatggtgattttggaagatttgtttagcagcttatgcactagagtggattgaatttgggaagggatgagattaaaaagacaagtgaagaggccataactataatttaagggagaatacattgaagagaatgaaattgcttatttagaacagtttaggcaaactttttttgtaaagggccagatagtaaatattttaggcttttcaggccgtacagtcacttgcaactgctcctctctattgcatctatgcaactctgctgctatagctaaacaaccatggatgatatgtaaacaagcattgtgaccgtgttctgataaaactttgtttacaaaaacaagtatcaggctcctgggctgtatttgctgacccctaatttagaataaaggagagacatagtagccttaaaatatatgtaaatgctgggtcttggagaatactacaaattctctctctcatgacaggtatttaccatgtataattgcaggcatagcactttactaattgcgataaaattagagatgaaatgactcctaagtttttaagcttaagtgactaagtgattatgatattattgagaggaaaccagaaagtgaagggaatattcatttttgaagggaagatgcagatgattttgaggccatagtctatttggatggatacacttagtgtagaacagataaagatgtagaattgatgcttgagtgagaagtcaaggctaaagatacatgtttggggatcatcataacctgggaagtagttgaacctgtgagaatatagagtatctctccaagatgtatgaaggggtcttttaagcttgtgggcaggagggacaaagtatgaaaaagagaagagaacgtgtagcatgttagagttggaaaggactctaaatcatctggtcccaccttctcattttatagataaggaaaatagggaagagagacattgttcaagcttgtcacaaagtgaattagaacccagatctccagactcagagtttctttatggtgggagtatgtttctcttacctggttttctccaagggttttcaagtcatttcaggttgtctccaagtatggcagcagtgatgctgtgtacagttgggagtggtttggagggaagaacagaaggattttggtttgaatcttgactatacagctctataacttgactttggcaagttatttaaactctctatatttgtacaaagggcatgttaatgtggagttgagaatttaaatctgataatggacaagatatgaagcacgtaacaggctcttcctttgacctatgtacatgtctatgatagctatatcacattatactgaggtttgctttgtatttgtgtaccctctacgagactgagcactgtgatggcagggaaaatgttaatcataatacagagaagggaagggtggggttctgacagaacagactgagaaatagcaacagagcttctgaggcattgaggagtagtggcactatattgaagagtcgtaggagatgaggttgattgaaggggtaagatgaggaagacttagggaagttgagagtttgaggacatttgaagcaagctttagcaagaataatgcattaaatttgttctttgagcatattatttcagaggtgtgaataagacttaaggttgatagcagagattattaagagatgatgaggaattagaagtggatgacttattgcagaatttctggcagtctgaggaaggataaagaaaagtatagctaaagacaggcaggagtcctttcaaggtaggtttgttcactctttttttgtggtgcatgtgactgtaggactctgactgtgactcttctattctgaccaggtgtttgaccctgatactatttggaattcccacattataaagctacataaattacagatgtttttcatgttacttatttaaaattaatagttacttctaatacataaaagggaaccctctgattgtgtattcagtctatctttaaagtgcttattttcacactgtaattgcccttgagtaattggaaatggtggaggtaagtgttgatttctaggttgctcacaacatggctacaatatttcatcatgtttggatgctgtgtggctctgcccaacattaagcatggctttcctaaactaagtaatattggctttactctgaccaaggagaaattctttaatggatttaaatgagatcctttatacatagatctctagctttgcattaatctgagcttacgctttaacaagttatgaatctctcattactagttgcttttcttgtggaaaaagaggcatattaattttttagttgatgatgacattgtgtgtccttgtcatctcattgtccacaatgagctgaacaatcttagtagaattgtttggcatattctgcttataatttaccctcagagcagagggaatagctatcttcaatgaacactcgtcaataaacagtgagtgccactacccctcggtgcctcagaggctctctgctatttcccagtcagttctgtcagggccccaccctttcagtctacatattatgattaagacattttccgtgcctgtcatggtgctgtctggtggaggataatttggtgtattctattcttaacttctttttggtccttatcttctggttcccccctacattacagtgtatatctaattgcttttctccccccgtgttttcttttcagctctttgccttcccacctaaacatcagttatgaggactttttctctgcccttcgtcaatatgcagcctgtgaacagcgtctgggaaagtagtggtcattggttgcataatttgatttgaggcttgtggaggaaaggaaccaagtgactctgatgtttacaaagcacctatgaaaccctgtacacacctagttcataatcctcataatttatcaacaaacacaaaaaagtgtcttacttgagagtgagtgtgtgtgtgtgcgtgtgcacgtgcacacatgtgcacgtttgtatgtatggaaataaacttataaatggggacgtattggagaaggaaatacatagacctacaactttgagcaaatagcagtgatgttttaggaactgaaatgtcacacttaaagtcttcagcccagctacttccctatttttgtggggagaagagggcctgattagaactgttctggttgtgtttggcgggaggggaataatttttgttcagtccttcttagtgaccaaactttaatttttaagaataatatattgacttactgaactgaagcattctgagttgaaaggagctccagaggagtggagttctgtgttgctcacatgttaaaatcttgctcaccttcagagcagagggaatacctatcttcagatatccgtccattttcatctcttaattgtagtcaaaagtatgacttgagagtgttgctctggtattctgggttctgaagtctggtattctggtattctgggttcaaaagtatgacttgagagtgttgctctggtattctgagagttgctctgtattctgggttctgaagattatttgaaaaataactcctactacattgaaatgcagacttaaaaatttaaacattggattaggcagtcaaaaaaaccaagcaagcataaaaggtcaataagttgtaatcttgatagtaaaggtggaaaacttattataaatggaaagaaagttttatttccttttttgtttgatgggcagtatgccatattatacccaaagttcttttaaaaaatatttccatcaaccatttttatttaaaataaacatttgagggaagttaccaaggcagcttttttcctcaaaagtaacctgttcctctttggaatagcacattttaggggcatggttaatacctgagatttttactcagtaaatcctgatggttactgtgtgtaaaatatctttaagtaggattgaaggcctctgtgggggaataaaatattaccaaagtctataaaaataaattttacatgttctcttttatgacagagagcagcactggttctgttatttttaaaatgaataattgatttcttgataggtgtttaatatttcttccctcactgctgattcttagatagaaaccattctttatatttgatagactgctttcagaaaacccttatcaacaagtgtacaatacttatctaaaactatacatttagaatggagcagtttaatactagatctcagaagttttgaaaaatagcaaagaagactggatttggaaagcatggtctacaattggttgttaaattctgaagctatgaagaataaatgtttcaactttggattatgaaaccccatttatgattttttaaatacacttgaaataaaaatgattaaactaaattttggtccagtgacattactttgcactgcataatccattatacgttgtacgactttttttttttgttttaatttattactgagagttttgtgtgaagctacagcatatctaaccagagaatttctgattccttatactgtgattatattatattgaggcatttgtagtgcagctgaagactgaatttatgccttttgtaaacatgataggtataaatgtcttataaacattctggagtatgtatagctttaatgaatgaaatttaatggacctgattaaaatgaagggatttaatcgttgttaaagttaagttagtcaaataaattacctactggaatatagcccaagccagtaaaggtttaatatttgcattttcgtgcttttattttctccttccattcataagtatatacttgaaagtacatctgtagcctatgatttgagtctcttgaagttctaggaagaggcaaactacaaactactaggattctgatttcagatgtagtcattccagaaccttctctttatgagttcacctgctagtacaatctccacaacttgaatggcattggttgttctgtaattcctgccaaaagcatcacaagttgtacatcatcaaggctccctttgcactcccaagaagaactggtaattttaaacaaaagtatgtgtctttatttgtattggaaaatactgtctttaaattgtttcttgttgacactccccacaatggaaaaattaccgaattaaacctgttttatggatggcagcttggagcatagcaagaagttggaggatttgaattccattcccagttctcattgtgttttgtttcttaaaactataataatcggttactgttataaagtttaaaaggtggttttaatgtgaatagcaaattctggtatatcgtgactaacgcttaagaatgcctgtctttgagaggaaggtgttataatattaatgaacagtgccaaatacactgtgcatatctgcaatttaatctttgaatgtatgttactggattagctccctcctcctgtgtgatggtaccatgcatagagtcaatcaaatccttgtgatgttttgtatggactttgacaatatgtaaataatgtgtaaagccagtttttatgattaaggaatcaaatttattgaattttattattgaaagttgaaacttaacatgtatgaacaaaaaccaataaaagaatatactcttttcattgactatagtattatgtgaatgctacatttgttctgaacacttaggggctgcaaaaatgtaataagaaatgcatatgactagatagcaatagtgttttttttagatggtatgctcttgattgaaatatattctcacttttaccaggttaaacatttggaatcttataatgttacttgctttttgatagataatagtgaaataaattcagctttgccattgctggagttgtcaaaattccacagtaattaaaatttgaatttttaccgaatatgaaatttccaaattaaaaacgtatatgtgtactcttttaaaaaggaatttgatagttcttgtcaaatgagaaaatttaaaggtaagagttatggtttgtcttatgctgcatagactattcacctcctaacttgaaggtctaatcataagacaattgtttttttgtgcatagttttcatctaaaattaagtttaccaaaggcaaataactgcttactaggaacttcctttagcaaaaattactataaagttcaggacagtttgaaataaaacccaggaaacaagattaatgtgagcagttctccaagatcctaactggtgggacataaactatgatgcaatggataggaaaaggtagtgcaaaaagaatttcttaaggtttaaaaaatacacttttcattataggaaaaagaagattcagagaaacaaaggaatgtaaccttattgattacatttttggtgatcaccgagaattttttgtactatattttaaaaaatgtattctactgtaacaagttaataaagagattttttaaaaaactataaactagaaattgagagtcttgcattctcttttgtatttgattattgtgtctggatataaattacaatagcacatgaaaataaaatgttttaaaaaa

SEQ ID NO: 8348 - DNA, 476 bp, Homo sapiens
tcagtgctgctctaaaatcagctccatttttatgtttcattgtgctagagaccctagaagcagattgtgagataaaaagaaatctgttattgggtctaggaaggaaaaaaactaagctattactatgtgcagaacatttttgaagaggaaattaaagataatctagagacagctgttagaattaactagggagttcaatgaattgcaggatataaattcagcataaaaattactagcaaaaattagataagtatataagattccattaacagtgaagaaccccacaaggttcctagagatacatgtaataataatgtgcaagacgtttctaataggaggaaatgggtaaactttgttggaaggcatgaaagaagacctaagtgaatggagaaatatgccatattcatgaatagagagactcgttaatgatggaaactatcattacattgatctaaagataaaatgtatttccaaaa

SEQ ID NO: 8349 - DNA, 2787 bp, Homo sapiens
aatatttaaggaaacaataacaattctacgcaaatccttccagacaatagaaaaggaaaaggtctttcctttatttgatgaagatagcattactttcttactaaatcaaacagacatcataagaaacaacaacagagaccaataaccctcatgaacaatgatgaaaatattcttactaaaattttagcaaatctagttcatctatatcatgacaaagtgtactttattgcaggaagataaagttgatttaacattcaaaaatcaataaatgaactttaccatattagtggactaaaaagaaaaatgcatatgatcatcttaatagaaaaagcacttagtaaaacccaacattgagtcatgattaaaagccctcacaaaaccagggataaaatgaagagtcctcataggatgcaggccatctacacaaaaatctatgtcttcctaaaattgagaacaaggtaaagatatctactctcatcacttttattaaacattgtactggaggttctaactcatgaaataaggcaagaaaaagaaataaatcatctagattggaaagagtaacactttccttatcatttgtgtacaccagtccatggaatccatgaaataaaagctattagaactaataagtgagttagcaaggtggcagagttcaagattaatatacacaaatcaagggtatttttatataaaacaatcagaaattgaaattttaaaaatgttatttccaataccattaacaaatataaaattgttagccataaaccaaataaaacatgtggaagacttgtacattgaaaactgcaaaacattgctgagagaaattaaagaagacctaactaaatggaacatgtaccatgttcatggacaggaagacttgaagttgttaagatgtcaattctcccaagttgagttatagatcaattgaatatcaatcaaaattccagaaggcttttaaaagtgaaaatcaataattgaactttaagttttatatggaaaaaatgaaggacctagaatagtgaaaataactttgcaaaagaagaataaagttggaggacttacttatctgatttcaaggctaaatataaagctatattaaaacagtatggtattgccatacatatagacaaatagatcaatgaaacacaatagagattccagaaatagactcacatatatatggccaatagattcttgacaaagtacaaagacaattcaatggagaaagtattgtcttttcaacaaatgatgctgaatccccaaaaaagtgaactttgattcgtacctcacagcatatacaaactttaattcaaaggaattcatagaccttaaactataacatttttagaagaaaatagagcagaaatctttgtgaccttggatacaacataaaaagcataattcataagagaacaaattgataatatgcatttcatcaaaattaaaaacttccactcttcaaaatacactgttaagagaatgaaaagacatagatcaagaggacgtatttttaaatcacgtatctgtaaaggacttctatgcagaacatataaaacccttgaacctcaataataaaatgcaaacatgcaataaaaagaggaacgaaagatttgaacagacacttcaccaacagaaatattgatggcaaacaagatcaggaaaagatgcttaatatcattattcaataaagagatgcaaattgaaactacaagttgataccactacacacctgctagaaggtgtaaaattaaacagactgatataccaagtgatggcaaggatgtagagaaattagaaacctcctacactgctcatgggaaggtaaaaatggcacaaccactttggaaaacagtttggcagtttattaaatagctaaatacacctaccatatgatccagccattccactcctagagagagaaaagcatatgtctatataaaggtttgtatgcaaatgtttataacagctttatttgtaataaccaaaagctggaaccaatccaaatgttcatcaactcctgaatgcattaacaaattgcgtttactgataaaattgaagactcttcagccatagaaagaaatgggttgttgatactgccaaaaacatggatgaatcttaaaataacttcgctgaagcaaagaagccagagctcacaaaagtatgaggacatacactatgcttccaggtatataaaattatagaaaatgcaaactaacctatgataactgaaagtatgtcagtggttgcctggggacaggctgagggtggagaagtggagggaaggattacaaagggcacaaggagagactagggtgatgaatatgtttattatctttttttttttttttccccgagacggagtcttgctctgtcacgtaggctagagtgcagtggcgcaatctcggctcactgcaacctttgcctcccgggttcaagcgattctcctgcctcagcctcccgagtagctgggattacaggcgtgtgccaccacgcctggctaatttttgtatttttagtaaaggcggggtttcaccatgttggccaggctggtctccaactcctgacctcatgatccacccgccttcacctcccaaagtgctgggattacaggcgtgagccactgagcctggccgatctgtttattatcttaactgtagtgatggtttcacaagcataaacacacatcaaattttgcactttcaatatgcgcggtttagtgtatgtcaatcatccctcaataacactgttaaaaaaagaaacattaaaattaaattgtaaattatc

SEQ ID NO: 8350 - DNA, 865 bp, Homo sapiens
gggctgcaaaaatgtaataagaaatgcatatgactagatagcaatagtgttttttttagatggtatgctcttgattgaaatatattctcacttttaccaggttaaacatttggaatcttataatgttacttgctttttgatagataatagtgaaataaattcagctttgccattgctggagttgtcaaaattccacagtaattaaaatttgaatttttaccgaatatgaaatttccaaattaaaaacgtatatgtgtactcttttaaaaaggaatttgatagttcttgtcaaatgagaaaatttaaaggtaagagttatggtttgtcttatgctgcatagactattcacctcctaacttgaaggtctaatcataagacaattgttttttgtgcatagttttcatctaaaattaagtttaccaaaggcaaataactgcttactaggaacttcctttagcaaaaattactataaagttcaggacagtttgaaataaaacccaggaaacaagattaatgtgagcagttctccaagatcctaactggtgggacataaactatgatgcaatggataggaaaaggtagtgcaaaaagaatttcttaaggtttaaaaaatacacttttcattataggaaaaagaagattcagagaaacaaaggaatgtaaccttattgattacatttttggtgatcaccgagaattttttgtactatattttaaaaaatgtattctactgtaacaagttaataaagagattttttaaaaaactataaactagaaattgagagtcttgcattctcttttgtatttgattattgtgtctggatataaattacaatagcacatgaaaataaaatgttttaaaaaa

SEQ ID NO: 8351 - DNA, 2751 bp, Homo sapiens
  SITE (975): n equals a,t,g, or c
  SITE (1122): n equals a,t,g, or c
  SITE (1137): n equals a,t,g, or c
  SITE (1138): n equals a,t,g, or c
  SITE (1146): n equals a,t,g, or c
  SITE (1147): n equals a,t,g, or c
  SITE (1153): n equals a,t,g, or c
  SITE (1154): n equals a,t,g, or c
  SITE (1159): n equals a,t,g, or c
  SITE (1160): n equals a,t,g, or c
  SITE (1174): n equals a,t,g, or c
  SITE (1175): n equals a,t,g, or c
  SITE (1180): n equals a,t,g, or c
  SITE (1181): n equals a,t,g, or c
  SITE (1182): n equals a,t,g, or c
  SITE (1185): n equals a,t,g, or c
  SITE (1193): n equals a,t,g, or c
  SITE (1194): n equals a,t,g, or c
  SITE (1195): n equals a,t,g, or c
  SITE (1202): n equals a,t,g, or c
  SITE (1203): n equals a,t,g, or c
  SITE (1209): n equals a,t,g, or c
  SITE (1210): n equals a,t,g, or c
  SITE (1212): n equals a,t,g, or c
  SITE (1222): n equals a,t,g, or c
  SITE (1223): n equals a,t,g, or c
  SITE (1224): n equals a,t,g, or c
  SITE (1231): n equals a,t,g, or c
  SITE (1232): n equals a,t,g, or c
  SITE (1234): n equals a,t,g, or c
  SITE (1242): n equals a,t,g, or c
  SITE (1243): n equals a,t,g, or c
  SITE (1253): n equals a,t,g, or c
  SITE (1255): n equals a,t,g, or c
  SITE (1259): n equals a,t,g, or c
  SITE (1261): n equals a,t,g, or c
  SITE (1265): n equals a,t,g, or c
  SITE (1267): n equals a,t,g, or c
  SITE (1269): n equals a,t,g, or c
  SITE (1271): n equals a,t,g, or c
  SITE (1275): n equals a,t,g, or c
  SITE (1282): n equals a,t,g, or c
  SITE (1286): n equals a,t,g, or c
  SITE (1301): n equals a,t,g, or c
  SITE (1303): n equals a,t,g, or c
  SITE (1310): n equals a,t,g, or c
  SITE (1311): n equals a,t,g, or c
  SITE (1314): n equals a,t,g, or c
ggagaccagcatggaaacatggtccgagtagtagccaaaaattatggtgtctctatccggttgaatcaggtcacagccgacacactgacacttacaatgaaacaagtcatagaagacaagaggtatgtggctctctaagcatgtggtcactaaggctgaatgaagatagaaaacacaagggatactgtgtatgtatttttcacaataatagctgaaacttctgtgacatggaataacatgtgtgtgatgctaacagcccacctgttttctctggtaagtctctaggaagactaatttaggttagatgctgagaattactttcctaccttaaggctgtgatgggcgacaaatttatatacacatgatctctttggactggatcttatatttgggagtccctctagtggaattccaactgaagcggggggtttctttgtgtgtttccccagtgtgcctgctcttctcacctctggcttcttcgtctgtgctgctccctagaacacccttcccttctcttcacaggactggctccttcatgacatttgggtctcttctccaatgtttcttccatagacagggttgtgtctttgacaatcctaactagcctcctctcccactcagcctaatcataatatactatttccttcctaacacttttcaagatttgtaatgactccatttatttatgtttttattaattgtctggcccccaacacaaaagagtagagagtcagcttcataagtacagcaatgtctctctctttttttcaactctgttcccagtgcttactgcagagcctgccacaaaataagtttccatgaatttcagttaagtgaggaaataaaagcggcatagtgaccttcttggttactgcccatccagccaatgatcttataatcaagaaggactgaataccttattatggtttcagaaacacaaaccctgaatcaggtacatattctctcatatatggncatatatattttttcctttagtataccataagcatcctagggatatggactagttcttagagatttaatcactttcctacagtttaacacttttagaattaatcattggtctttgtatgtgggtgtttttattgaacttttcaaganggattcagtggagannccgatggnncaaggnnccatnngccgcgaacgaaanngtttnnnctnttgccagnnncccagcnnccttgnngntgccatgtgnnnttagaannanagtgtttnngttatgggcntntggntngctngntngntggnctccaantggncaaaataacaaaggntnctgtaanngancttgtgaggctacgtcagtaacacaccctctctgtctccaccaacaggtacaagtcggcagtggtggcagccagtgtcatcctgcactctcagcccctgagccccgcacagcggctggtgggctggatcgaccacatcctccagactgggggagcgacgcacctcaagccctatgccttccagcagccttggcatgagcagtacctcattgatgtctttgtgtttctgctggggctcactctgggcactatgtggctttgtgggaagctgctgggtgtggtggccaggtggctgcgtggggccaggaaggtgaagaagacatgaggctaggtgtagccttgggtgaggggagggcatccctggtcctttgaaggttctccccaccccagcacacgccacccctctgttctctcttcagctccacctgccactgatcctgcaacttgcttctttctattctctgcctctgtttagaaatcttcacgcaccactgaggcttcttgacttgccccttgtgacttgaaaccccagctcagatacaaattttcacctgccagccctgcctcctcctttctcccttttcctagacacaggactctgacaacttcatcctccttgtttagatgacttcccagtttccagtccccatttctccttctatcacttttcataaaaaaactcaggaaatatttgacatatcttccatttcaaattcttccattttatgcagatatcttgcccttcctataagctctcctcaaagctcaggaaacctggtctgctctcctgcatttagggaaggagaacccctgccaagacctttgctcactgcctgagaccccttccttagagagcacctcctttgctggtcagacatggagcctgcagttggtcacagatgatactgctttatttcagtttttacagttgccttcttaagattcccgtcttataaatggagtacagggaacctcaagtagtgaagtggaaatccatgtgtaaggctttgtggcttcaggtaccagtggctaaggtagttttaaagactttgttgattttagaaaaagtccatcttccatcccctacatggcagttaatacccttctatatggtaaaaccttagagattaccttaatctgctaggaacagaagcaagaaaaaccatggcgtaaacacccccagagtttttgttcatttgtttcatctttcttgataaagcccgaaggtagcccattcagggctgttgtggttggttgctccatcatgtcatcaatagcccatatcttttcttttttatcttccttagtataacaccaaactacctctctgatagctggtgttcatgaaatattttaccttcaaatgattgtacctttttatttgctttagagttctgaaataaaatgaaattccactgtaataaaactgtcaaatgca

SEQ ID NO: 8352 - DNA, 5973 bp, Homo sapiens
cgcccagactcttcttggactttagatgttctattatattcttctgtccataacttcttgacccaagccttcataggtctgcagtatcccttaagctttcatacgtcatggtacctaccactgctttctatgacttctgtcagcttgaaatctgagctatgtcaccattcccagtgtgagctctgaattaggtgagacaaaccagtcactaagtagccaacagacaggttagaatgttgtaaatagtttctattctgctccttctggctgagggaaagaatgcacaattgagcttttgcctgtggactgtggtctgccactccagggcaaaggtaaataaaatggattagaaatttatactgtttgaaagtggctttttcttgattgggcatttggttgcttgctgtgtatctttgactggttttcaaaactctacggagtcatttgagtcagtctccagttgattttcaaatgtttctctgaaagaacaagggcatgcggctgctgattaacattattgctctgcttcttttgattttatataatgattttataattacaagaacaacaaagctgttttcagtttgttaattgagatggtagttcaggcagtgttatgctggatggaatcaagttatcctacacaatgacccagtagaatgaggggctcaggactagagacagtcacaaaaatgctgagagaggaagagtctgaagaaatgtttggaagtaataattgatgaaacagtgctagagctaagttttagggcattagatcataatctttcttaagaattacctgaggacaaaaataggctaggtagctatgcaaatatcagacaaaatagactatatgtcaaaaatatttacaagagacaaagaaaggcattacacaatataaaattttatgtttgcattcacataattataatattataagtatcatttaaaaataatatatgaaatatcatcaacaatatataagagctataaatatatatgcaccaaacaacagagcaccaaaatatgtgaagcaataattgatggaattgaggatgaaatagacattactacagcaatagcttgggacttcgataccccatttttagtaatggaaagattatctacacaaatgatcaataaagaaagagttatcttgaacaccatcataaaccaactggacctaatagaaatttagagaatactccacccaacaacagcagactacaccttcttctcaaatgcacacagaatattccccaagatagtccgtatgttaggctacaatataaatctcaattcatttcagaagactgaactcatcaaagcgttttctgtgatcccaataggatgagctagacatcaataacaggaacaaaaacttaaaaaaatcacaaatttataatttatatgcaaaaacgtgtcctcaggtatcagaaaaatgacttctaggtcatccagacacaatatgagcacagtgcagaggtcactgagctgtgccaggagccataataatagcttcgggagagtgaagacaaggcactgatgggagggtatgtttagtaaatagactgggtttcatttcatggacacttaggcgttctcaattttgccacctcctttcttttgtcatctctctctaggacttggacaacttcattgccaactttggggatgcagggtttgtccttgtggcctttggctccatgttgaacacccatcagtcccaggaagtcctcaagaagatgcacaatgcctttgcccacctccctcaaggagtgatatggacatgtcagagttctcattggcccagagatgttcatttggccacaaatgtgaaaattgtggactggcttcctcagagtgacctcctgggtaaggactgcttaggtctgctcttctctttccattgacctgcctttggtgctcgtcagtgttctgacctctagctgggcatttgtatcagcctacgtagtagctactcataggtaaaggtaatgctcagaggacaggaaaagaacagccagctggaattctttgggaatcaggctgtacttcaaaaatggtgaaaacagccactttctctttttctttctaacccaagcgaggcctgaagtttccaaccagaggtgatatgtatgtggtcatgttgccttgaccctactacatttgacactgaacagagtcaccccaacacaatctaagataatatgtaaactccaagagcatatatctgggagtatgttgcccctgttctgtggccttctgaccacctgtttagtaatgtgccattacacaaacacacgtatacctatataaatacatctttttatctactaaggatgtgaaagactcatacattcacaacattgatgccaacattatctgaaggatgtgccacaatattagtgccaagctgagtaatcacatagccaggtattgagtcatttggtaacagagctccttacagttcaataggttttactgtccttgtgatactttttggagacctctcactgacatcctcagtgactggatcagagattcataactaagtttatggctcaaagtcagcttggtaaattaagatacaggtttctgtatatttaatttataagacatgggacaaggaaaaatattttcattttcaaaggaacacaagtagattcgaatccacatttctgttgagaaacacagatttaactcttcattatcaaaagtcactagcttgctctaaataagggtgggacaggcagacaggaactagaaatacggaagtagaagtgtatggtttattattccttgctttcacagcattcttcaaatggagaaaacagcacatacagtgtaggtactatgaagcaacagagagcaggaagtaaatggagagatgaggtgaagagagaaggatggctgcatggatggagaaatatgccttgcttatcattcttctctccagctttccctgcattcagagtcttagatggattggggctgaggtgaggaatctctacagaaagggaggcttgaatcttgtatcctggaatgttcacacttgtgtgtcccaagcaaaatcagtgaattcattttctcaacagaccttgatttcattggtgtttcatctgacttttctgctttacctggtattccaaaatttttcatcctgaagtgttccactctctttcttatttgccacagctcaccccagcatccgtctttttgtcactcatggtgggcagaacagcgtaatggaggccatccgtcatggtgtgcccatggtgggattaccagtcaatggagaccagcatggaaacatggtccgagtagtagccaaaaattatggtgtctctatccggttgaatcaggtcacagccgacacactgacacttacaatgaaacaagtcatagaagacaagaggtatgtggctctctaagcatgtggtcactaaggctgaatgaagatagaaaacacaagggatactgtgtatgtatttttcacaataatagctgaaacttctgtgacatggaataacatgtgtgtgatgctaacagcccacctgttttctctggtaagtctctaggaagactaatttaggttagatgctgagaattactttcctaccttaaggctgtgatggcgacaaattatatacacatgatctctttgactgatcttatatttgggagtccctctagtggaattccaactgaagcggggggtttctttgtgtgtttccccagtgtgcctgctcttctcacctctggcttcttcgtctgtgctgctccctagaacacccttcccttctcttcacaggactggctccttcatgacatttgggtctcttctccaatgtttcttccatagacagggttgtgtctttgacaatcctaactagcctcctctcccactcagcctaatcataatatactatttccttcctaacacttttcaagatttgtaatgactccatttatttatgtttttattaattgtctggcccccaacacaaaagagtagagagtcagcttcataagtacagcaatgtctctctctttttttcaactctgttcccagtgcttactgcagagcctgccacaaaataagtttccatgaatttcagttaagtgaggaaataaaagcggcatagtgaccttctggttactgcccatccagccaatgatcttataatcaagaaggactgaataccttattatggtttcagaaacacaaaccctgaatcaggtacatattctctcatatatggtcatatatattttttcctttagtataccataagcatcctagggatatggactagttcttagagatttaatcactttcctacagtttaacacttttagaattaatcattggtctttgtatgtgggtgtttttattgaacttttcaagaggattcagtgagaccgtggcaaggccatgccaacaaattttctttgcagcccagccttggtgcatgtgttagaaaagtgtttgtatgcttgtgtgtgtgctcatgcaatacaaagtctgtaagacttgtgaggctacgtcagtaacacaccctctctgtctccgccaacaggtacaagtcggcagtggtggcagccagtgtcatcctgcactctcagcccctgagccccgcacagcggctggtgggctggatcgaccacatcctccagactgggggagcgacgcacctcaagccctatgccttccagcagccttggcatgagcagtacctcattgatgtctttgtgtttctgctggggctcactctgggcactatgtggctttgtgggaagctgctgggtgtggtggccaggtggctgcgtggggccaggaaggtgaagaagacatgaggctaggtgtagccttgggtgaggggagggcatccctggtcctttgaaggttctccccaccccagcacacgccacccctctgttctctcttcagctccacctgccactgatcctgcaacttgcttctttctattctctgcctctgtttagaaatcttcacacaccactgaggcttcttgacttgccccttgtgacttgaaaccccagctcagatacaaattttcacctgccagccctgcctcctcctttctcccttttcctagacacaggactctgacaacttcatcctccttgtttagatgacttcccagtttccagtccccatttctccttctatcacttttcataaaaaaactcaggaaatatttgacatatcttccatttcaaattcttccattttatgcagatatcttgcccttcctataagctctcctcaaagctcaggaaacctggtctgctctcctgcatttagggaaggagaacccctgccaagacctttgctcactgcctgagaccccttccttagagagcacctcctttgctggtcagacatggagcctgcagttggtcacagatgatactgctttatttcagtttttacagttgccttcttaagattcccgtcttataaatggagtacagggaacctcaagtagtgaagtggaaatccatgtgtaaggctttgtggcttcaggtaccagtggctaaggtagttttaaagactttgttgattttagaaaaagtccatcttccatcccctacatggcagttaatacccttctatatggtaaaaccttagagattaccttaatctgctaggaacagaagcaagaaaaaccatggtgtaaacacccccagagtttttgttcatttgtttcatctttcttgataaagcccgaaggtagcccattcagggctgttgtggttggttgctccatcatgtcatcaatagcccatatcttttcttttttatcttccttagtataacaccaaactacctctctgatagctggtgttcatgaaatattttaccttcaaatgattgtacctttttatttgctttagagttctgaaataaaatgaaattccactgtaataaaactgtcaaatgca

SEQ ID NO: 8353 - DNA, 5974 bp, Homo sapiens
cgcccagactcttcttggactttagatgttctattatattcttctgtccataacttcttgacccaagccttcataggtctgcagtatcccttaagctttcatacgtcatggtacctaccactgctttctatgacttctgtcagcttgaaatctgagctatgtcaccattcccagtgtgagctctgaattaggtgagacaaaccagtcactaagtagccaacagacaggttagaatgttgtaaatagtttctattctgctccttctggctgagggaaagaatgcacaattgagcttttgcctgtggactgtggtctgccactccagggcaaaggtaaataaaatggattagaaatttatactgtttgaaagtggctttttcttgattgggcatttggttgcttgctgtgtatctttgactggttttcaaaactctacggagtcatttgagtcagtctccagttgattttcaaatgtttctctgaaagaacaagggcatgcggctgctgattaacattattgctctgcttcttttgattttatataatgattttataattacaagaaaaacaaagctgttttcagtttgttaattgagatggtagttcaggcagtgttatgctggatggaatcaagttatcctacacaatgacccagtagaatgaggggctcaggactagagacagtcacaaaaatgctgagagaggaagagtctgaagaaatgtttggaagtaataattgatgaaacagtgctagagctaagttttagggcattagatcataatctttcttaagaattacctgaggacaaaaataggctaggtagctatgcaaatatcagacaaaatagactatatgtcaaaaatatttacaagagacaaagaaaggcattacacaatataaaattttatgtttgcattcacataattataatattataagtatcatttaaaaataatatatgaaatatcatcaacaatatataagagctataaatatatatgcaccaaacaacagagcaccaaaatatgtgaagcaataattgatggaattgaggatgaaatagacattactacagcaatagcttgggacttcgataccccatttttagtaatggaaagattatctacacaaatgatcaataaagaaagagttatcttgaacaccatcataaaccaactggacctaatagaaatttagagaatactccacccaacaacagcagactacaccttcttctcaaatgcacacagaatattccccaagatagtccgtatgttaggctacaatataaatctcaattcatttcagaagactgaactcatcaaagcgttttctgtgatcccaataggatgagctagacatcaataacaggaacaaaaacttaaaaaaatcacaaatttataatttatatgcaaaaacgtgtcctcaggtatcagaaaaatgacttctaggtcatccagacacaatatgagcacagtgcagaggtcactgagctgtgccaggagccataataatagcttcgggagagtgaagacaaggcactgatgggagggtatgtttagtaaatagactgggtttcatttcatggacacttaggcgttctcaattttgccacctcctttcttttgtcatctctctctaggacttggacaacttcattgccaactttggggatgcagggtttgtccttgtggcctttggctccatgttgaacacccatcagtcccaggaagtcctcaagaagatgcacaatgcctttgcccacctccctcaaggagtgatatggacatgtcagagttctcattggcccagagatgttcatttggccacaaatgtgaaaattgtggactggcttcctcagagtgacctcctgggtaaggactgcttaggtctgctcttctctttccattgacctgcctttggtgctcgtcagtgttctgacctctagctgggcatttgtatcagcctacgtagtagctactcataggtaaaggtaatgctcagaggacaggaaaagaacagccagctggaattctttgggaatcaggctgtacttcaaaaatggtgaaaacagccactttctctttttctttctaacccaagcgaggcctgaagtttccaaccagaggtgatatgtatgtggtcatgttgccttgaccctactacatttgacactgaacagagtcaccccaacacaatctaagataatatgtaaactccaagagcatatatctgggagtatgttgcccctgttctgtggccttctgaccacctgtttagtaatgtgccattacacaaacacacgtatacctatataaatacatctttttatctactaaggatgtgaaagactcatacattcacaacattgatgccaacattatctgaaggatgtgccacaatattagtgccaagctgagtaatcacatagccaggtattgagtcatttggtaacagagctccttacagttcaataggttttactgtccttgtgatactttttggagacctctcactgacatcctcagtgactggatcagagattcataactaagtttatggctcaaagtcagcttggtaaattaagatacaggtttctgtatatttaatttataagacatgggacaaggaaaaatattttcattttcaaaggaacacaagtagattcgaatccacatttctgttgagaaacacagatttaactcttcattatcaaaagtcactagcttgctctaaataagggtgggacaggcagacaggaactagaaatacggaagtagaagtgtatggtttattattccttgctttcacagcattcttcaaatggagaaaacagcacatacagtgtaggtactatgaagcaacagagagcaggaagtaaatggagagatgaggtgaagagagaaggatggctgcatggatggagaaatatgccttgcttatcattcttctctccagctttccctgcattcagagtcttagatggattggggctgaggtgaggaatctctacagaaagggaggcttgaatcttgtatcctggaatgttcacacttgtgtgtcccaagcaaaatcagtgaattcattttctcaacagaccttgatttcattggtgtttcatctgacttttctgctttacctggtattccaaaatttttcatcctgaagtgttccactctctttcttatttgccacagctcaccccagcatccgtctttttgtcactcatggtgggcagaacagcgtaatggaggccatccgtcatggtgtgcccatggtgggattaccagtcaatggagaccagcatggaaacatggtccgagtagtagccaaaaattatggtgtctctatccggttgaatcaggtcacagccgacacactgacacttacaatgaaacaagtcatagaagacaagaggtatgtggctctctaagcatgtggtcactaaggctgaatgaagatagaaaacacaagggatactgtgtatgtatttttcacaataatagctgaaacttctgtgacatggaataacatgtgtgtgatgctaacagcccacctgttttctctggtaagtctctaggaagactaatttaggttagatgctgagaattactttcctaccttaaggctgtgatggcgacaaattatatacacatgatctctttgactgatcttatatttgggagtccctctagtggaattccaactgaagcggggggtttctttgtgtgtttccccagtgtgcctgctcttctcacctctggcttcttcgtctgtgctgctccctagaacacccttcccttctcttcacaggactggctccttcatgacatttgggtctcttctccaatgtttcttccatagacagggttgtgtctttgacaatcctaactagcctcctctcccactcagcctaatcataatatactatttccttcctaacacttttcaagatttgtaatgactccatttatttatgtttttattaattgtctggcccccaacacaaaagagtagagagtcagcttcataagtacagcaatgtctctctctttttttcaactctgttcccagtgcttactgcagagcctgccacaaaataagtttccatgaatttcagttaagtgaggaaataaaagcggcatagtgaccttcttggttactgcccatccagccaatgatcttataatcaagaaggactgaataccttattatggtttcagaaacacaaaccctgaatcaggtacatattctctcatatatggtcatatatattttttcctttagtataccataagcatcctagggatatggactagttcttagagatttaatcactttcctacagtttaacacttttagaattaatcattggtctttgtatgtgggtgtttttattgaacttttcaagaggattcagtgagaccgtggcaaggccatgccaacaaattttctttgcagcccagccttggtgcatgtgttagaaaagtgtttgtatgcttgtgtgtgtgctcatgcaatacaaagtctgtaagacttgtgaggctacgtcagtaacacaccctctctgtctccaccaacaggtacaagtcggcagtggtggcagccagtgtcatcctgcactctcagcccctgagccccgcacagcggctggtgggctggatcgaccacatcctccagactgggggagcgacgcacctcaagccctatgccttccagcagccttggcatgagcagtacctcattgatgtctttgtgtttctgctggggctcactctgggcactatgtggctttgtgggaagctgctgggtgtggtggccaggtggctgcgtggggccaggaaggtgaagaagacatgaggctaggtgtagccttgggtgaggggagggcatccctggtcctttgaaggttctccccaccccagcacacgccacccctctgttctctcttcagctccacctgccactgatcctgcaacttgcttctttctattctctgcctctgtttagaaatcttcacgcaccactgaggcttcttgacttgccccttgtgacttgaaaccccagctcagatacaaattttcacctgccagccctgcctcctcctttctcccttttcctagacacaggactctgacaacttcatcctccttgtttagatgacttcccagtttccagtccccatttctccttctatcacttttcataaaaaaactcaggaaatatttgacatatcttccatttcaaattcttccattttatgcagatatcttgcccttcctataagctctcctcaaagctcaggaaacctggtctgctctcctgcatttagggaaggagaacccctgccaagacctttgctcactgcctgagaccccttccttagagagcacctcctttgctggtcagacatggagcctgcagttggtcacagatgatactgctttatttcagtttttacagttgccttcttaagattcccgtcttataaatggagtacagggaacctcaagtagtgaagtggaaatccatgtgtaaggctttgtggcttcaggtaccagtggctaaggtagttttaaagactttgttgattttagaaaaagtccatcttccatcccctacatggcagttaatacccttctatatggtaaaaccttagagattaccttaatctgctaggaacagaagcaagaaaaaccatggcgtaaacacccccagagtttttgttcatttgtttcatctttcttgataaagcccgaaggtagcccattcagggctgttgtggttggttgctccatcatgtcatcaatagcccatatcttttcttttttatcttccttagtataacaccaaactacctctctgatagctggtgttcatgaaatattttaccttcaaatgattgtacctttttatttgctttagagttctgaaataaaatgaaattccactgtaataaaactgtcaaatgca

SEQ ID NO: 8354 - DNA, 489 bp, Homo sapiens
gcagaataagctaatatggagcaaattccaatatggttaagtaaaaaatagcaaagagtaagagtaactataggatgtatcctctttttttatatagaaaaaggaaagtatgtgtatgggggataatgaaaaaaatacatatctatgtgcaattgcccttgcaaaaacagtgcagagggaataaaccagagtgtgatagattatctatgagggtggtgtttgaatagggtggaaggatccatgtgtttatgtttttacatagtttggattttggaaacgttaatattttgcataccaagtatatgtttaaataaacaaggagagaaaagccaagaactgaaatacaaacggaaacaaatgaaatccattttttccaaatgaaaatgttactatactggagtgaaaaaaattagcctcattaccttttaaacacagtacttttactattattctggattccatccatccaaaggaaaaaaaaaagaatcc

SEQ ID NO: 8355 - DNA, 408 bp, Homo sapiens
gacagagaaatactgggtagaagagggcagttccctggcaaaggtcccaatttcaagcctggaaacctctggccctaactgagaacatgcattcctgttttcacacacaaaagttgccttttggctctccacacgcccctctcctgtactcatataaatctgagacctcaggttccagaagcagatgaaaaggagatgaacagaagagcagaagaatggcataatggtgtggcagagagaagagaaggagagtctgaacaccaagaggagttcagctgggggcgattggagaggagatcagccactggatggctgaactccaggaagaccatcttcccattccgtctcctttccagctccccatgcatcccatccccaccactcaataaaacccccacattcaccatc

SEQ ID NO: 8356 - DNA, 500 bp, Homo sapiens
ataaacaaaagcagaataagctaatatggagcaaattccaatatggttaagtaaaaaatagcaaagagtaagagtaactataggatgtatccttttttttataagaaaaaggaaagtatgtgtatgggggataatgaaaaaaatacatatctatgtgcattgccttgcaaaaacagtgcagagggaataaaccagagtgtgatagattatctatgagggtggtgtttgaatagggtggaaggatccatgtgtttatgtttttacatagtttggattttggaaacgttaatattttgcataccaagtatatgtttaaataaacaaggagagaaaagccaagaactgaaatacaaacggaaacaaatgaaatcaattttttccaaatgaaaatgtaactatactgtagtgaaaaaaattagcatcattaccttttaaacacagtacttttactatatactgtatacaatcaatcaaaagaaaaaaaaaagaactccaaacga

SEQ ID NO: 8357 - DNA, 408 bp, Homo sapiens; identical to SEQ ID NO: 8355

SEQ ID NO: 8358 - DNA, 500 bp, Homo sapiens; identical to SEQ ID NO: 8356

SEQ ID NO: 8359 - DNA, 242 bp, Homo sapiens
gaaagatactaaatcagtaaggaaacttgacagacaccaccttaatcaagtgatcaaggttaacattatcagtaataagacatctcaacactatgtaactccctgatatgacgcactgagaaggttataccatcacttctgtggtattcttgccagaaatgcataacttcaatctaatcataactaaaccagggattaactcaaattgagagacattctacaaaacaactgacctgtactca

SEQ ID NO: 8360 - DNA, 889 bp, Homo sapiens
ggacggtacaagagagaatgaaaaatgggggcaaaaaaaccagaaaattttctctactatctctgacccataaggaccctcttttccactctgtggaccaaattagaggactcctcttggagtactttctttctgcacccattgtgcggttccagatttcagactgcctttgagtccaggacaggagatactggaggagggataacagaaagcttaccaccagttcggcagtacttcaagttctggtttccttccctagtctgtcatgaccatacactttccagagtccttagataactgctctgtgcattctttccagagtttttagctgcattcagtgggagagagaggatgaagtacacttactttactgtgacactctgtttaatagctaatatctgctttttcttctcttaggcttccttttcctttctattattatttgagttagatttttaatctggcctatcatcaaagcttgtggaaccaaatggaatgattccataatttgttgtgttggtactatgttaacactacactgccatattgctgccaacagtgcttttatttttaattgcattcataagggttatttgacatagttttctctagtgaaacagcaaacaacaatgaaaataagaacttacctcttaatctgcaaaaccaaaccaagtaaaaattctcaaaagattcttggatctgtaaactatcagtgttcctgggtcttatttggaaacataaaataatgagactgcctagattaaaaagaaaattatattggatttttatggtttgaaatttgtgtccccgcccaaatctcatgtcaaattgtcatcctcagtgttggaggagggtcttggtgagaggtgattggatcatggggttggat

SEQ ID NO: 8361 - DNA, 889 bp, Homo sapiens
ggacggtacaagagagaatgaaaaatgggggcaaaaaaaccagaaaattttctctactatctctgacccataaggaccctcttttccactctgtggaccaaattagaggactcctcttggagtactttctttctgcacccattgtgcggttccagatttcagactgcctttgagtccaggacaggagatactggaggagggataacagaaagcttgccaccagttcggcagtacttcaagttctggtttccttccctagtctgtcatgaccatacactttccagagtccttagataactgctctgtgcattctttccagagtttttagctgcattcagtgggagagagaggatgaagtacacttactttactgtgacactctgtttaatagctaatatctgctttttcttctcttaggcttccttttcctttctattattatttgagttagatttttaatctggcctatcatcaaagcttgtggaaccaaatggaatgattccataatttgttgtgttggtactatgttaacactacactgccatattgctgccaacagtgcttttatttttaattgcattcataagggttatttgacatagttttctctagtgaaacagcaaacaacaatgaaaataagaacttacctcttaatctgcaaaaccaaaccaagtaaaaattctcaaaagattcttggatctgtaaactatcagtgttcctgggtcttatttggaaacataaaataatgagactgcctagattaaaaagaaaattatattggatttttatggtttgaaatttgtgtccccgcccaaatctcatgtcaaattgtcatcctcagtgttggaggagggtcttggtgagaggtgattggatcatggggttggat

SEQ ID NO: 8362 - DNA, 5965 bp, Homo sapiens
gctgctggggcctgcaggtgggatagagcctctgccttcaggaacccacagtctgatggaagagacagagccatgccctcagagagctcccagcctaatgagggagacccggccccacgctggggcaatgacctattttcacagaagcaaatctgagcctctcatctgagaagtctggtgaaatgcgagagacacggtggggaaataggaccttgcggggcccagaggtggggtgggtaagattcagggggatcctgtgggaacaggtgaagcaaggtgtcaggaaggggcagggctcaccccaaggataaaaaatgcctgccccatgcaaggcgaaggggctagcacaaagtcggtgctcagttaatggcaggagggcccttaccccttcccggtagtgcccagcgctttctcctaagctgctgagaagggacaggagcatcagccatgctgtggctggggctgggacagtgtgttgtgctgacaagaacatttgcatccagaaactgcctgggttcgaaccccagctttggcacatcctagccttgtgcacttgagcaggttgcctgagcctcagtttcccccggacagcaatggtttctattgcacaaagctgttgtgaggcttgaaggagctagcgggcccagagggctccacacgggcccagcgcacagtaggtgcttggccagtgttatgctcttcctagtcctgggctgcccagctgcctccttccccagaaatgcattgactggaaccgtaatgtgctgaagcgggagctgggcctggcagagagtgacatcgtggacattccccagctcttcttcctgaaaaacttctacgcggaagccttcttcccagacatggtgagagcccttgtgcagggtcctgctggggggtctgcggggctctgaaaagaagcactccctggcccagggcaggctggtgcagaggctggagggccctgcggacctctccagtgtctgtttttgtgaatatagagaacattcccatcagtggctctcaaccagggcaattttgcccccaggggatttttgttgccgcagtgaggtgcatgcccctggcatctggtgggtaaaagccagggatttcactaaacatcctacagagcataggatgccccgccacaaagcacttttttttttctcacccagatggaaaaagaaagcgtggtttggttccaagtgtttcaggcttctgtctctgggtctcagctgcctgctgtgttccccaccacagcccctcgcttgctgctccccagtgggggtcctgtgtcaggcggggcaggtggggtgggcggtggcctcgctgactctcattaacagggcagctgacaaggagatgagcagatgtgatctcaactgggaagggcctgagcgatgctatcggggtgggcctggcccaagtgcccattaacctcttgggaaaggatgttggggtgttggcagctggcagggatggtcccccgggatggggatagaccctctttcttcagactgcggtctttagcttgaatccctctcttgggacaagccgagggttggaagtgaatgtcggaatcgggatggaatcagggttggaagtgaatgtcggaatcgggatggaatcagggttggaagtgaaagtcggaatcgggatggaatcagggttggaagtgaatgtcagaatcgggatggaatcagggttggaagtgaatgtcggaatcgggatggaatcagggttggaagtgaatgtcggaatcgggatggaatcagggttggaagtgaatgtcggaatcgggatggaatcagggttggaagtgaatgtcggaatcgggatggaatcagggttgcaagtgaatgtcggaatcggcatggaatcagggttggaagtgaatgtcggaatcggcatggaatcagggttggaagtgaatgtcggaatcaggatgcaggttgcaggaggtggggagggtcagtgtgctttcctgactcctcatggggagattccagcctctaggtcctggcagagacccccaagcaggatttctcgactctgtagctctacttctgttttaggctggataagcctttgttgtagatgctgtacagtgcctcgcaggatgcttagcggcctccctggtctctacccactagatgccaatagcactctcccagatgtgacaaccaaaaatgccctagtggacaaaatggaccctgattgagaaccacggcttgaaggcagtgttgtctgttagaacattctgtgctgatgaaaatgttccatatcggtacaatacagtccagtagccactcagctaccacctgaaatgtggctagtgtcaatgaagaacagaaattgtaactttatgtaagtttaattttaatttaaacaactgcatgtggccagtggctactgtggtggacagcaaagctctaagggactgctgagctctggttctggctgaaggtgggggggagggcctaggctggagcgtgtgtgtctgtggtctggcctccatctgccggaagcccctgactgtgggtcatcctgtggggattccctagcttcgttccaggctctgctgaaggatcccagcttgtcttcactggagggtcccatagggaacacccagttaaccccttggtttgtcatatggggaaactgaggcttagaaggagagtgggtcatgtgtctgaggtcacacagtgagcgagtggcggagttgggaccaccccccaatcccatgactcctcctttaagaagaaacagaggcctggctggctctggccctggtcctggtcctggtcctggctcttttctcctctttctgccctttgccccctgcatgccccacccccactcccaccccagcatgttctggcccattagtgggcaaagaagtagttcagggccaaggccaggggactgacctcacgggaccctccagctttatgttggtccctgccatggatgagggtggggcagacttgagggtggggggcaaatcacggagagtttgagggcagagtccaggacaggctcacctcaaactcaagacagcccagagccgccctctagagagaaggtccggagtcccctttgaacaccaagggtcaccccttatgacctcttgccatcaacctgggctgagatttcctctaagaaacccccataccacagcatgggggagaattcccatccccagattagggccccaagccaggtccgcaaccaagggaaggagaggtgcccccagagttaaactcaagtgtccccaaaggctttcagccctttcccccaactcctcagtcccacaggtggccagataaaaagcatggattttggcaccagccagatccaagtccaaatgtcagtctcatcattctctggctgtatgattatgtgacttaacccgtctgagccacagcttcagagggaggctgtggcatttagtgatgatatatctggcacataaaagatgctcaataaatgctaacaatgatcagggctgccaaagacagttaagcaagctgtgcacagcaaaagcacaccacactttggaagacatccacaccacagaccttgtaggtgtgtatatttgttgtacaagtttctggcagatgacacgaaaatctcttgttctaacaaagttgctataatatgacaattttctcatagatgaaagaaagagtgggagaagtttttttttgttttttgtttttgttttttaatgtacaaaattcctggtagccctggctgttattcaacctcatttccaaccctgaatctttttctcctctgctttcataggccctaactcttgagcaaactccagtcctagagccctttctaggctgtggctatggccaacccattccccagggcctgtctcattctggcaaggaaggggtgccaaaagcacagcacttacagccagacagcctccctcttgccttttctcttttgcaggttaacatggtggtcttaggcaagtacctgggcatccccaagccctacgggcccatcatcaatggccgctgctgcctggaggagaaagtgcagtccctgctggagcctctgggcctgcactgcatcttcattgatgactacttgtcctaccacgagctgcagggggagatccactgtgggcaccaacgtgcgcaggaagccctttcccttcaaatggtggaacatggtgccctgagcctgcccccacccgccatcctctctgccctcttgctagggaaccctgccagggtgaaagcaaagaacaaccacctggcctccattctcttgggggagtcctggcactttgcaaacatcctggccaccatgggcaccaggacacagggatggataccacctaccctcgcctctggaatggcctacccaacccgagaagaatgcacctcattcttccctggcctctttcccacccacagcccccagaggctctagatcaacaatgttagcatgttccagaatggctgtgggaggcctaaggagatgggccccacttagaattgctcccccttcattctgatgcctccctggggaacaaggataatgactttgcatctgcacctggaacggggcctgggggacctggggtctggtgtgccaggcaccaggctgcctctgctcttggaaaactaggaaaggggatcagaaacatcctctccccgctctaggtttcttctcccaaaggggacccaaggctgtgacacttacctccacccccatccagcacccttcagctgtgtgtggacaaacaaggacagaaaaacccggtgtccaagggccaatttaaatagaaaaaaagacaacaaaattttaatagctgactccgacctcagaagagtgattgctacctttctggaaagactttaattaccagagctggcttctcccagctcagaaatgctgagaagccaacgtgaggcctgaggacacacaaaggatgacggggcaggaggggatgaggtcagggtagcaaagtgtgtgacgacggatttgggggcctagaggtgtccgtggttcctgggctgggattttggactctggatttgaagggagctggagcttccagatgtagcaggggtagggggccaaatgttagaagagggtgtgtgtgttgggaggaaattaggttatctctgaaggtggagtttaatttcctttaatagtctttaattattccccttcattctgcaggcagtgggaggggaaggcttgcccggtctctctcagcaacccagggaccctgcacatagcttaggtttcatccctgaataaaccgctgtgcaggcccatgtcccctcccacagtagggaagacagctgccacgggaggttaatagcccggagtgaggtcactgaaacatgcacaggcaggctggttcagctgggctgcagggcacgggcaggaagaaaccagcctaccctcttcccccactgccagtgaggccattgtagggcagttggccctagggcttcggtccatctaggttttcagtggcccctgctgagacctcacactgagccaactactgtcactgttttaaccaacaaaagctagcctggaactgctatggttaaagtgggtgagcgggaacctgaaaatccccttctggaaggttctacagaactctatttgcaagctcctgctttaacctgagcgtcctctgctcaggatcataccccagcctgcactgagtcaagaaggaaaaggaggctctgaaggggccgggggtgtgagctggggttgggactcccctgagaaagagctgtgggtaggaagggagtgagcattgcaaagatagggctgggggtcggggccacactgattgtgggaagctctggagttgctgctgggccatcgaggggccctggtgttggctctgagaatgttctgggtgaccagtcacctactttctgatcaataaaaatgtcgacatgcatttcttaca

SEQ ID NO: 8363 - DNA, 481 bp, Homo sapiens
ggctatgcagccagggagcagcagggctggggccttgagagaggaaggaggagaagccaggcttggtcagggcccctctgcagagcttcctgcaggagctaacagaccctccaagggcttggttggcccatctcccctccttatcacagcctcagtgttctcatctggggaatacctggggaatagagcattggaatggatgtggtgcagacatccacaaggatagccctgagttcaaatcctgatcttggcatttgctggctgtggtatcaagggtgtgttctgaacctctcagtgcctcagtttcctcttctctgagttgtagatgataattaatccctcctatagttgctttaaatattaataatacattaagtaggatgcccagagcatggcagacattcaataatggtagctgtgccataattattaggctccaagtccagagtcacttcctgaggggttccttatccatcaccag

SEQ ID NO: 8364 - DNA, 292 bp, Homo sapiens
ggtggctcacgcctgtaatcccagtactttgggaggccaagtcgggtggatcaagaggtcaggagatcgagaccatcctgactaacacggtgaaaccccgcctctattaaaaatacaaaaaattagccgggagccgtggcaggcgcctgtagtcccagctactcgggaggctgaggcaggagaatggcgtgaacccgggaagtggagcttgcagtgagccgagatcacgccactgcactctagcctgggtgacagagcgaaactctgtctcaaaaaaaaaaaaaaaaagaaa

SEQ ID NO: 8365 - DNA, 10040 bp, Homo sapiens
tctgagagtgaccaagaagataatgatgacatcaatgacaacgactggtcctatggctcggagaagaaaggtgcttggggatctggggaaacccggggggcattgggatgaggtgggaagcaggaattgggtatacagtggtcacaaattgttgccttgaatgatgaagagagagtgtagttacgcgatttccttttccttttttttttttttttttttttgagatggattctcgctctgtggcccaggctggggtgcagtggtgagatctcggctcactgcaacctccgtctcccgggttcaagcgattctcctgtgtcagcctcctgagtagctgggattacagtcgcgtgctaccatgcccagctaatttttgtatttttagtagagatggggtttcaccatattggccaggatggtctcgatcttctgacctcgtgatctgcccgcctgggcctcccaaagtgctgggattacaggcatgagccaccgtgcccagcctgttgtatggttttcttgagatgcttttagattgagaacttaacggaaaccctgctctttatgcttttgtttcccacagccaagaagagaaagtcagacaaggtgagagccgggccaggcattggggaaataatgggtaaaggacagataccctcccctttgggcagggagtcctcgagtgtcatgactcaaggctgaggtcattgggggcttgagggtgtctttggtgggtccggggcgggggagtgtgggtggggaaggggggtgggggagggcacatgggtagacaggcctcctactggggaggaagagtaggaatttgaggatgctgctttgtcaaatcttttttccttccctgggttctcggctcccccttttcgttaccctttccccaaagctatggtatctcccattccagaaccccaattcccctcgaagatccaagtcattaaaacacaaaaatggtaagtggagccggagcaatgggaatgcttctagctgtgtcttctgggactcattgccggggggtggaggtggggcccggggataggggaattgagggagggcctgtgatccttctgtcacccccacttcctctctggttattttcagggttctctgtctgtacctctgcatcaaacacccttccccttcttttttcttcttcaggggaacttagcaattcggatccttttaaggtgagtatgggccgcccctcatgcttgctctcattgtcctggttgtgaggtggtggggatttggacaagtagggatcagaatgctgacagccagaggcactgatgagctatttggatcttacatatttatgttctttctgagtcccaccccttatccattggcagatgggatgagagaaatcacttggaaaacggcagggtcgttctaaagcctcacttagaaagggaccagagggactgattctcacttccacccctgtccttctcttttctctgccccatctctaacctgtacctctggttgtcctgcagtataacaattcaactgggatcagctatgagaccctggggccggaggagcttcgcagcctgctaaccacggtgagggaggaccagcaagagagaaggtccctgggagtgggctggagccataggcagtggtcaaggcctgggaggaagctggtgacctagcagtcagggccgtatcgttctctctgtctggaattaggtttcccggcccatagtgtcctgggaccatctgctctggacacctttgggccatctctgcttgtgctatctagcatttatacagaaagaaacatctaacatctagagtaggttccttccatccctcctttcagcttatattcctcttccagcaatgtggggtgatttctgaacacaccaagaagatgtgcacaaggtgagcacagaacctagaaagggggccaggcgcttcctgcacactcaccatgggcatgggttgggagtacccctggacttgagcaatggggctcctgcccttccccttccctcctctaatgatgaggcctttggccacaatctggggatgaatctgcattcaccccttccctgtctgtgcctgtggctcctgccttgccgaggggaggggctttacctgagttcctcagaaccctccctgccttgcctcaccaccaggtccctgcgctgcccacagcacacagatgagcagaggcgaaccgtacggatttattttctcgggccctcggcgtaagtggccctacaggaagggtggggggttgtgaccagttagggcgatgatcactatctctaaagcccttctttggctcatcccctttccagtgtccttccagaggtcgagagctccctggataatgacagctttgacatgactgacagccaggccctgatcagccggcttcagtgggacggctcctctgacctctcaccctctgattcaggctcctccaagacgagtgaaaatcagggatggggtctaggtacgtgatgcagttgggccctaggggctctgtgcccaaagccatgggggtgccacctctcctgccataaccatactctcatcccttgtgtctctttctctacaggtaccaacagctctgagtcacggaaaaccaagaaaaagaaatcccatctgagcctggtagggactgcctccggcctaggttccaacaagaagaagaagccaaagccaccggcacccccgacgcccagcatctatgatgacatcaactgacttgggtgcaagggatagcctttggctgagcagagccctctctcctgacccccacccaggtggcatagcctggcaaatggacggctgctgggggttggggcttgggaagcttggtgggccaggcaggcagaggatccgattatgcgcccctggggggtgtcaaagtcctctgcaatggagcacgactcctcggcgtgcaggactcagacctggacatattatgccttggacataagtttggtggggaggcggttttcctatttattctgtgagttactggatgtccagctaggccaggggcctgacctgggcactgtgccagggcactgcctgccccccaccccaggaactggactaagccctgctgaggggcaatgtggcgacccgggaggctgtgggttggaagctgagcctggagggggcctgcctcggccgccctcagcaatgtgaatgggtccggtgcttggagctgaggggcaaggctgggcatgtcctgtctgtgtgcagaatcttatcaaatgcccccagtcccaggggtaggcaggcacagagtgctgtctgctgaggtgggcgtccagaactgccgccaccttccctgcccctcacaggggcagccctttcccctcagtccccatgggcctccttggcagcaggagctgtccttttgttgggtgccaggaaagggcctccagcctctacagcttcaaggaatgggaaagggagggtaggaagagggagaagtgtcagaattcctccccctgcctctcctccctgacccagggctggtgaggagtggggccccaaggtgagagggaacggtgctgctttatttgaaatgttttcttacctcattccctgccccaggaagggacccagcctcaccctcctggggtggccccgtgttcctcctgcccaccctgccccactgccctaccggggcagcccaggttcccaactgctgcttccacccccttcaccttgactggcttcagttcctctcagcgctcctgcctccaaagcgtgccctgtttcccttccttagcgcttttaagttatttattctgtacttgtggtttggggctctgaggaaaatcctaatcttgtgcctctccccctttgctaggagttgggtgggaagagagggtggcctctgtgccccaggttgtcagtggaggggaaggggtgtcactgcccctctgtgggactgtcatgccagtgtgcccacctgcctggtctacatcctaaagagatgtaccgtcccccctccatgcgggcaccaccactcccaggagccaagctggaggaccgcgacctgggctgggagcagagctgactgacatgggtggaggtgaccctgagccaagttctctggcacttgctggacatgtcccctaccctcttcccaagaggagccatcccacatttgggtagttagtacccaggactggttggactgatcgggttagggaccctagagggttaagggaacaacagagatggggctgcaatgccctgtctggaactccgctctcccgctggggtggttctgattgtggctcatgcctggttgcaaattggtttttaacccacaaattgtgattattttttaaaaagccaaacagattttggcaggagttagaataaatcccggggcctgggcttctctattcttggccctccgtagtctccctccgagaggaggccagagggagaggaggatctcagcaggcctctagccgcttccagatgcagtctggggagtgggctgaaggtgaagggaggaaggctgtgggccactctcccttctgagaggcagctgcagctcaggccctaatacactctttgccctgtggcctctcccttttccccccttctggttggaggagggagaagtgggaagtagcttgggaactggtttgtccacataaacttccccattgttccttggcccgccctcagggcagagccccctgcccaggctgggtaagagatgggcttggtccagcagggaccctgagggaacaaacccttttccttctggggagagagtgccccccctaccatgtagttgaacaggggctaggagctccccactcccctccctctaacagcaggctgtgtgggtttcaattcccatccttcccaccccggctaggtgtcgtccaccctgtatcctgtgtctgagtgtgtgtgggggggttctgtactaatttccatggccggtggcttttccttccatgcatcactcccccccgcatgcccaggggccacccgcctggcattaccgcatgctggggtcattgggggaggggggtggggctcacgctgtcctgtggtcttgagatttttatttttgcatatgtaatccattctgtacaggtagctaactttgtaaacgctgtgtattccctctgcccccatggctgctggtgtaaataaactgcatctcccgttggtagccccggcctacctactctcattaccattttcctgggggcagcgcaaagccattctctgtcacagaaagaggctgcaggaccacaaaatggaactttattcagtcacagacactgaccctccaatagccccagaagcaagagcctagggcccagcaatccatacccagtccttggagttgggcagggtaggacgctggccaagggccagtgctgtctcttgcttacagcctgaggactacgggagcagcagctgtggcctggccgctcccaatgctgggggcttggcttggtgccccatccccttcctgactgagctctatgaaggactcttaaaaaaataaaataaaatgcaagcaaagtgctttgaaagaagggaggacaccctattcctgctaaggggtagaggaagaaggtgaaggcggctaggtgcccataagagaaggctggcacaatcttcattcccgccagtgtgatttcagtctcaaaagatgagtatttggctgagaaatggaaggatactccaggctccctacggagttgtgctggggccatgctgagctgcccttgcaggcagccctgggtgctgggggcagacatgcaggacactgggaagagtcagaaccacaggtgggagggaatctcagagcccaggctccccactgagcttggccagcagctttgaactccttcagaggaccctaaaagtgaaggaagatgacatcctcatttctacctgagttgtgctcgcacgggagggacatctgtactcctgtggatgagaaggggaggccgcatacttgcctcctgtgtcctatggaggagatttccatcacatcctttccacccctccctccccggcccttgggcccagctctggccaggaaaagtggggaggccgtaaaggagaaagaccatgcctttcattttcttcctatgtccttatcgtccatacatcccaaatactaggaagctgaagaagacggtgactcccaccagggagacagtggcaggtgctgtgaagaattggcggtaattgattcggaagtaccagaccacacccaacagcaccacaaagacaggcaccatgaggctgcccacattgacaccaaggctgggtggctcagtggccgagggggccaaggaggctgaggggcctggaacagctgaccctgggggtgagcggtggcagtgaatcacacagttgtcggtaatgttcagagaacgcagtgtgcgggctgggtcttgtagcaggcggccctggtagatcagtttcatctggctttcttgtccagggaagtatttgctgtaaggatgaaagacatggaagaaaagatagagggtgaggaatgagaaggcaaacaggcctggaccaacaaagcaggggagtggggaaaaactggagggtggatttttttttccctcatctttatccttttttttttttttttttttttgagacggagtctcactctgttgccaggctggagtgcagtggcgcgatctcggctcactgcaacctctgcctcccgggttcaagcaattctcctgcctcaccctcccgagtagctgggactacaggagtgcgccaccatgcccagctaatttttgtatttttttttttagtagagacagggtttcaccatgctggccaggatggtcttgatatcttgaccttgtgatctgcccgccttggcctcccaaagtgctgggattacaggcgtgagccaccgcgacaggcccccctcatctttatccttaactaatgaggggtgtatttgtttgttttgtttttttagatggagtctcactctgtcgcccaggctggagtgcagtggcgcaatctcggctcactgcaacctccacctcctgggttcaagcgattctcctgcctcagcctcctgagtagctgggattgcaggcgtgcgccaccacgcccggctgatttttgtatgtttagtagagatggggtttcaccatgttggtcaggctggtctcgaactcctaacctcgtgatgcacccgcctcggcctcccaaagtcccgggagccactgcacccggcctgaagggtgtatttctaagaaagtatctacctgcccttggtaggggctggatcttacactttgctgcagctcccatgtctgcaccagcctccttagaggcaaccaagggctgggggatgagcacaagcagcttcccacttcccaggccactcacctcttcagggcacccacggtatcctctggcctagccacagccagctcctcggtatcattgaggaatttgagccgcacagtgatgaggccagggctgggagggaggcaggtgctatcctcagatctcaggggggcctctggactgctgctgcctgcacctgcttgtcttttgggcaggccttggatgtcaaggagatgctcaaggctgggctcaacaccacccccagctccagcctccccagtggagtctccccgaccttcacccgcctcttcagccttctcatcattaccctctgatggatgggggagttcagttggctcggggttgccttggcctgccaccaggtggtccacatgccccaggtggaggacggatgtgtcgcctgctgacacaatagcgcccaggagctggttgctaccgctgtctgctacgtaggtagagagccaagctaggaccaaggctagaatcagcaccaccacacctgccaccaccatcacctcattacccacaccctcaatgagggtgacatcagagagctccatggcctggctgctggcagggtccacgctgcaggaacaaagggggacagcatcagcagagcctgaggggttgcaaccaggtctctagtttgtttaggttctaactgacccagccctgaaaaaaaaaaaaaaggagttcagtgttgtgtagaagggggcacaaaccttcctaattccggcaccccaacctaaacctaaagacctaccctaccctttgcctctattgtgaaactcttgctttcacgttctgtgaccttcctctctcaaactccaacttcccaatgagtgtggatcagcaggaaaagcccacagccttgctgctgctgctactgttgttgcttttttggtgaatgaggaaaaatctttgctgaggcctgagtttctctaggatttctatcgcttggtcaagcaaatatgcctcctaagcagcctccaaagtggcttcagagagacccaaaagcctggaatattttactgtggggcccccctggaagcactgtttagccatccctgccagattgtctcatttgagcctatttcattcctggtcacagatccaggctgccagatgtcaagagccaaagaaaactgacctaccatcaaaagcagagtcagacaaatctaaaacgataactctgtagggaccgcgggcagatactatgcagcagacattatgtgccgcctctgaaacttctggcaagccctggggagcaacttgggacagacaccagaagcaccaccttcctgggtcaccatgggcccactcctgcaatgaccactccccaagtggagtgatttgaaaaagattccataacagctctcacaatccatatctcagtctctcttctttcactgtgaaggttctgctgctgcagtttcttagaaaggcaggaagggtccctgcttgctccttggagtacctactatttcccttggagaatctgctgctttcacagctgtccctgggcaaatccagtctggtgattaccattatcagactattctcacagcacctataaaacttcattatacttatgtacctgtccatctttctattagactcctggtagacaaggatcgtatgtatttctcttggtactgaagtgtccaatataatgccccagtagttgctcaaagaattatctgtggaacacatcaacatccttatttaatataccggccctggagttagaaaaacaactaattataaccccagtcttgcgtcttactagctataacacctcagacaactttctcagagcctcagctttctcatcagtaaaatggggttaaaaacagtacctacctcatgaggttgttttgaagatgacgtgaaatcatcgaagcaaaatacttggcacagtgcctggcacactgcaaattgcaattgcttaataacggtagtaattatttatcacaaccacaactaacccctgatggtaagaaggttaatgttattaaccatgatttacaggaaaagaaactgcggcaaagaaagacgaaaacgattggcacagacacagggaactctcgtggggaggggcccggcaggaccccaggtgtccggcctcaggggtctttgctctgtccctcagcctgtgatctaccctgtccgtaccgtgaccgcacggtgaggaggggtcccgcaccctttttctgaggcgaaggttccgcttttggatggtcctattccctcggcgttggactggggtccatgggcccacccgaaccgaagggctgcctggccccagcctccgtgataagaccagttgtcccggccagtgaggagtagggtcggctaagggggtcacaaaccgtccacacccctcaaacttcggggcggggctggggaactgggggcggggcttcaggacgcgaggagtcatgggaaattaaagggggattggaccggcactgtgcctggatggggaagtcctcacctgaaaagaccagactaaatgttttgacctcgccaggacggcccctggactcgtctttccgtaggggtcgggaaaagggctggcaatctgcgattctgttcagggtccggtctcttccggcttctcccggaagctgttataccagggacag

SEQ ID NO: 8366 - DNA, 386 bp, Homo sapiens
ccgggctggtcctgagggagggcgggtggttatttaaaggaagaacaggtaaggggagtgcccgctcctggcgtgccaccctaccaggctcttcccccccaccccccgccgttcctgctcatggtggctagaaatgtcccttagctctaggctcctgtgggctctgctcccctcgtggagtggcaggctgatttcaagggaagacagagtggggtgaaggttgtagggtcctagggccatttctacttctggtagcagtacccccccaagtggacatcctggctgaaagcagaggtgactctgaggagagtctttagggaaggcggggggtgtatttaggagtctgtgcagttctttgccacaccctgtgggtttgctttgaggcc

SEQ ID NO: 8367 - DNA, 10680 bp, Homo sapiens
gcgacgtttccctttccagctttgttcttccggccctgctgtctgcctccccggctgattggattcgttactgctttgcaacgcgcacctaactccaggttagcggggattagtaagaactcagctctgggccagtcgggaagacagataaggagaccagttagtcagcatccagtgcttgaagagtgcggccccaggtagtgtgggacccggagaaagaaggcgggaaagcatttcaaagaaggcacagattcggcgcaggcttaggacacaaaaagggggaaaagtccagctttcaagaacttatccagatttttgcagttaaaattttttcttttttgagacgggagttccgctcttgttgcccaggctggagtgcaatggcgcgatctcggctcactgcaacctccgcccccccgggttcaagcgattcttttgcctcagcctgccgagtagctgggattacaggcatgcgccaccacgccccgctaattttgtattttagtagagacagggtttctccatgttggtcaggctggtctcgaactcccgacctcaggtgatccgcccccgtctcggcctcccaaagtgctggcattacaggcgtgagctaccgcgctcggccgcaattaaaattttttctaaaaacttactgtggccggggggagtggcttactcttgtaatcccaccgctttgggaggcagaggtgggaggatcgcttgagctcaggagttcgaggctgcagtgagctatgatctgagccactgcattgcacccgacagggaggccttgtctccaaaaaaaaaaaaaaaagcgctggagtttggggttttggagaactactgattaaaggataaataatccagacaggggcaaacataagcaaaaagctcggtggcttctaccaactgaacactggcagaagtagcacttagatcaagaaatagataattaggactggcgcggtggctcacgcctgtaatcccaacacgttaggaggctaaggcaggcggatcacaaggtcaggagttcaagaccagcctgggtaacatggtgaaatcccgtctctactaaaaatacaaaaattagccgggcgtggtggcgcacgcctgtaatcctggctactcagaaggctgaggcaggagaatggcttgaacctgggaggcggaggttgcagtgagctgagatggagccactgcacgccagctggggtgacagagcgagactctgtctcaggaaaaaaaaaaaaaagaaagaattaccccagaatctcccccttcatgtcttcttctagccattaacctccaaagagtaatcactattctgacgtctgtcaccatacattagtttttcctgtttttgtacttgctataaatggaatccaactgtgtatcctcttcggtgtctagcttcttttttgtaagtcctttcattgtggtaaaataaacatagctaggcacagtggcatgcacctgtagtcccagctactctgaaggctgactcagcagtgtcacttgagcccaggagttaaaggccagcctgggcaacacagggagacctctatctctaaagataaatatatacatatacgtaacataaaacttaaaaccattttaactatttttaagtttgcaattcagtggcattaagtacattcacaaagccgggcacagtggctcatacttgtaatcccagcactttgggaggctgaggcaggaggatcccttgagccaggagttcaagaccagcctgggcaatatggtgagacccccatctctaaaaaaaaattaattagctgggcatggtggcgtgtgcctgtggtcccagctactcaggaggctgaagtgggatgattgaccctaggaggttaaggctgcagtgagccatgagccagctactcaggaggctgaggtgggatgattgcttgaccctagggtcaagattgcagagagctgtgatcgcgccactatgctccaacctgggagacagagtgagactccgtctcaaaataaaaaaaaatgtaaaggaaaataattgtcttcagctgagcatggtggctctagagtgtaattgcagcacttggggaggctaaggtgggaggatcacttgagtccaggagtttgaaaccagcatgggcaacattgcgagaccctgtcgctacaaaaaatttaaaaattagccaggcctggcggtgtgtgcctgtagtcccagctacttgggaggctgaggtgggagaatcattggagcctaggaggtcaaggctacagtgagctgtgattgcgtcactgcactccagcctggcatacagaaagaccccgtttcaatcaatcaataaaaaccactctgggagatcttcccaaggcagtacacatgctggtcacttggaatccctccctagttctttcctgccatgggtaatatggatttgtctaaccactccaacatgagttgttgcaagcaacgctgagaggaatattcctgtatgtagcctgccttttgtgtaactgggaacagtgtttaaggaagtggccaaattgcccccaaagaggcgatttgtccaccaacaggatttgcacacctggccttgtatcctgatttttttttttttttttttggagacgagttttgctgtcacccaggctggagtgcagtgggagatctcagctcactgcaacttccgcctcccaggttcaagtgattctcctgcctcaacctactgaatagctgggagtatatgtgtgtgccaccacacctggctaatttttgtatttttagtagggaagggtttcaccatgttggccaggctggtctcgaactcctggcctcaggtgatctgcctgcctcggcctccgaaagtgctgggattataggcgtgagctatcgcgcctggcctactttttgtatttttagtagagaaagggtttcacaatgtcagccaggctggtcttgaactcctgacctcaggcgatccacccgcctcggcctccccaagtgctgggattacaggcgtaagccactgcacccaggtatttttcttttttaacggtatcttttgtagttgtaaatatatcagaaaaggctgagctggctgtggtcggcgtgctgtaaaggggtagaaagttcagcattgcccctgagagtgaggctcccagcctccctctctagggaggagttctttttcttctgtcaggccttttggctctgtaaaactaaagcacaaattttcatccagaaagggggtgttgcattctgcataacaaggtgaaaaaactgtctttgtgttgatgaaatggaatcccaaagatataactctcctggaggagggaaagttgggcagctgcagcaggaggcagaccccaggactttggatccctgtctccactgtataactccaactggtattgggactggagaccctaggatccctcagcaaaaagactgctgactcaggagaagactgctgggagctcctccccagttccctcctgtgataggtactataggttctgggtctatgagaggctttgtgtttctgttatttttattcatttttttatttttttttgagacggggtctcactctgtcgcccaggctggagtgcagtggcacaatctcagcttgctgtgacctcagctctctgcgacctctgcttgctggactcaagcgatcctcccaccacctcagcctcctgagtagctggaaccatcatatgcaccagcacgcctggctaagtattttgtgttttctttttttttaatttctagagacaggatcttgttatgttgcccaggctggtctcaaactctaggactcaagtgatctgccccccttggcctcccaaagtgctgggattacaggcatgagccaccgtgcctggcctttttttttccccagcctcagcaacatagtgagacccgttgtggtgcatgcctgtagtaccacctacttgggaggagtattgcttgagtgtggaaggttgaggctgctatgagcagtgatcgcgccaccacactccaacctaggcaacacagagagcccctgtctcaaaaaaaaattgttttagggacagtgtctcactcttgcccagactggtctcaaactcctggggtccagtgatcctcctgcctcagcctcccttgtaggtgggactacacggcacctggcccttgtgttgttcttgtaacagttgctcaatgcagaaaacttggaaaccacagaacagcaccagggggtggggaatgaacatggaatgatggggacctctgtcccatttaagtcaaacaacatccatactttggttccatggactaatcatttatttgcactcataaaaactggcttgctttgaaaagcttcctccaaaagctgtattgtggtacttttgactctgggacaagaggaagaagttggggaattcgggcagttggtggctgggccctcagagactgtatgtggtgaccactgtttaagacaccattcatcacttggggacggagggagcacatagatggaccccaggctcatggatgttcctccttccgcagtcatttactaaaatacctgttcaaggaatatagttccagtctcagcctagttgagacaaccacaggcacttaaataagtaccaaggaagcctctgcagagatagtgctattggaactgagtcctgagggccagatcagccttgaccaggccaaaaaatgtggaagagtattccaagcggtaggaataacacatgcaaacacctgaaagcaaagaggagcaggtcacatccagcaactggtgacttgtttactaaggctggagatgaaccttggaaggaagaagggaagtcaagaggccagataatttggcagaggctagaggctctgttctactgagttgttttctcgtttgttttgttttgttttttgagacagagttttgctcttgtcacccaggctggaatgcaatagcgtggtcttggctcactgcaacctccgcctcccgggttcaagcaattctcctgcctcagcctcctaagtagctgggactacaggtatgcgccaccacgcttgcttggcttttttttttttttttttttttttaaccctgagtggacacagcacatgtttcagagagcacagggttgggggtaaggtcacagatcaacaggatcccaaggcagaggaatttttcttagtgcagaacaaaatgaaaagtctcccatgtctacttctttctacacagacacggcaaccatccgatttctcaatcttttccccacctttcccgcctttctattccacaaagccgccattgtcatcctggcccgttctcaatgagctgttgggcacacctcccagacggggtggtggccgggcagaggggctcctcacttcccagtaggggcggccgggcagaggcgcccctcacctcccggacggggcggctggccaggcaggggggccgacccccccccacctccctcccggacagggcggctggccgggcggggggctgaccccccacctccctcccggacagggcggctggccgggcggggggctgacccccccacctccctcccggacagggcggctggccgggcggggggctgaccccccacctccctcccggacagggcggctggccgggcagaggggctcctcacttcccagtaggggcggctgggcagaggcgcccctcacctcccagacggggcggctggccgggcggagggctgaccccccacacctccctcccggacggggcggctggccaggcggggggctgacccccctacctccctcccggacggggcggctggccgggtgggggggctgacccccccatctccctcgcggacggggtggctggccgggctgaggggctcctcacttcccagtaggggcggccgggcagaggcgcccctcacctcccggacggggcggctggccgggcggggggctgacccccccacctccctcccggacggcacggctggccaggcggggggctgacccccccacctccctcccggatggcacggctggccgggcgggggggctgaccccccacctccctcccggatggggcggctggccgggcggggggctgaccccccccccacctccctcccggatggggtggctgcccggcggagacgctcctcacttcccagatggggtggctgccgggcggagaggctcctcacttctcagacggggtggttgccaggcagagggtctcctcacttctcagacggggcggccgtgcagagacgctcctcacctcccagacggggtctcggccgggcagaggcgctcctcacatcccagatggggcggcggggcagaggcgctccccacatctcagacgatgggcggccgggcagagacgctcctcacttcctagatgtgatggcggctgggaagaggcgctcctcacttcctagatgggatggcggccgggcggagacgctcctcactttccagactgggcagccaggcagaggggctcctcacatcccagacgatgggcggccaggcagagacgctcctcacttcccagacggggtggcagccgggcagaggctgcaatctcggcactttgggaggccaaggcaggcggctgctccttgccctcgggccccgcggggcccgtccgctcctccagccgctgcctcccgggcggcgctcgccggcgcggcggcaaagactgagacagctccgctgcccgctgaactccatcctcccggcggtcgggcggcggcggctgcggtcggtcgcggcagcggctccgcttcatatctgcagctggggcccgcgggcgtcagcgccgcgactgtcccagtccgcactgccccgggccgcagcgcagccgcgccaaccaccacccgcggccaccatggccagacgggctccctaagccaccgaccccagcccgcggtgccttcgagccttctggggcctccggcgccgcgacctcctctgcgctcctcacggaagacttttttttttttttttttttaagacggagtcccgctctgttgcccaggctggagtacagcggtgcgcgatcttggctcattgcaacctccacctcccaggttcaagtgattctcctgcttcaacctcctgagtagctgagattacaggcatccgccactatgcccggctaatttttgtatttttagtagagacagggtttcaccatgttggccaggctggtctagaactcctgacctcgtgatccgcccacctcggcctcccaaagtgctgggattacaggcatgaaccactgcgcctggcctaattttttgtatttttagtagagacagggttttaccatgttggtcaggttggtctcaaactcctgacctcaggtgatcctcccgcctcagtctcccaaagtgctgggattacaggtgtaagccactgcactcagcttgttttaaagagttttgattttagtgtgagaggagccactggagggcatgatcagagtttgactcccaaagaccattccagcaccaattcagggcatgggtctcaagatctcccttggagtgacaaaggcagggcaggcaagccagtgcacgcagagacagagtttgtccctctttaggaggctgaacaggtataagggtggcaggagagggaggtggtgggccactagaatcactggttcttggcatgggacctggatggatagaggggccatccacttaaacacaggaggagaagggaggtgaaggccgagtctgggaacaggccgagtctgcagcccttcctgctggagagagggtctgaagctcaggtccggctagaggtcagcaggtgtctcaagaagcccatggaggagtgaggtggaccaggacagcacgtggagtacagaaaagaggggcaggcaaccaggcgcagtggctcatgcctgtaatcccaacactttgggaggccaaggcgggtggatcacctgaggtcagtgtgagaccagcctggccaacatggtgagaccctgtctctactaaaaatacaaaatcagccaggtgtggtgactcatgcctgtagtcccagctactcggaagtttggggcacaagaatcgcttgaacctaggtggtagaagttgcagtgagccgagatagcgccactgcactccagcctgggcaacagagtgagactaggtctcaaaaagaaaagaaaagagggccaggaactggtcctccgcagttggaggcggggacaggtgggaggggcagaacacaccatgggacagcctgacatggggttcactggatgcacccctccacacgcagcagcaggtagtccctgaggagcgggggcagtggcagccgggtggcaccctgccggcagcggcttcccaaccgagcgcgcacagctagtcgggccaggtgctgcagctgccttggctggttcaccatgcacagggccgagctgtagaaggcttcgtgctcctaggccaggagtgaaagaaggtcagatgacccttgccctaccatctgggggcaacccagcggtgggggtcctgggattttgcagcatgcacccacctgggtgtttcatgtgtctcaaaggactcagattcagaaccatagaggccctgcagtgataatgcgggctggggctccacttcagggaagggtctccactatgtctataccactcccaccccagagagcctagcacagtgcccaccaagttaagagatgccagataaatgtctgtgctgatgcaagtgagggaggcaggagaggtgtgtggagttaggggtcagcctggggtaccgggggagggggtaccctgaaacccaggggtgccactctacccatcctctctacccaggggccctcctgctgctccctccatgaggctggtcctgaaggaataggcctgtggctcgtccctcctccccatctcggccctgaggcaaacataccttccacagctctgggagcaccgcctccacccaggtctcacaggatgggacacaaggataggcattaagcaggacttccagggcccgagggaagttggcgcagtgtttcagcatctaggggtcaaaagagggtcttgggcacatgcctcccccacccgagggcagacccaagtcttgcctcacccacatggccaatcctagcctaatctggggggctaaggtctgagtctctcttcccttttttgtgcctctgtctaccccaccctcaagtatgctccaaccttttggccccagttttcctctggggctcttccctcccttggactctctctcccagaatcctctctccccctcccaagctggggacagccccctggccactgagggcaggctttcagtctcttggaccctctgtcttccccagaagcggagcagttccagccgcgggctcccccacacaggagcctcctatgtcagggcctcccagcgcacctcagggcgcactggctgcgccccgtagtccagcagtgcggcgaaaaggacttcaggctcccagttgggggagtcctggacggcctgcagcgcacagtccatgggcgtgtggcccgccccattggggacctcagcgcgggccccgtaacgcagcagcagctcggccaggcccccgcagccgttggcacaagcgttgtgcagcggcgtgtggcgcttgcgcccggccgcccgggcatcagctccagcctccaggagccggcgcgccgcagcctggtgtcgcctgcagctacctgggccctcggccccagcgcacgccgtgttcagcgcagtctcgccctggctggtgcgcaggcccacgtcggcgccatgctccaggtacagagccacatgttgctccaggccgcgcgccgccgccacgtgcaggggcgtctcctggctctcgcctgctgccaggttcaccgtcgctcctgcttccagcagcaacttggcgcacctggggacaagagagcaaggtcctgaggaaaatcctgaaggcttgggaccccttcagcttgctgtgacactcccttgcctttccacccctctcagcttgaggtcctacctggtgtcctccatgagaatcatacaagccccgctacagacaacagaattggaaggtcctgagagctaccagaagcatcttcagttttcatatgaaaaacttaagcccaggagtgatttgtgcagccaaggacacacagcaagttagtggctgcaccagaaatagtactcactgcctcagacagtccctcccacagtctactctgtctccaccccaaggtctggttctgaatcattcagttgtcagttgtctccttttttttttttttttttggagacagggtctctctctgtggcccaggctgaagtgcagtggtgtgattacagctcatgtagcctggacctcccaagctcaagcaatcctcctgcctctgcctcccaagtagctgggaccacaggtgggcagcaccacacctggctaattttttaaatttttttttatagagacagggtcttaccatttgccccagctggtctcaaacccctgggctcaagcaagcctcctgccttggcctcccaaagtgctgggattacaggtgtgagccaccacacccggccttatctcctaacattttgatagcacaaaattttgaaaacccacttctgtgtacgttatgaagcatagaaaattaaacagtatgcaccaaa

SEQ ID NO: 8368 - DNA, 5890 bp, Homo sapiens
tttttttttttttttttggaacttaatgtcagtaactcactctctctctcacacacacacattgtattatttttcctcagggttcttaagtgcctatagtacgtaacaatttttgttctttgtagaattataaacagtatcaagaatttagaccacaaagtcaattataaaaaactcttgctttaatcattaaatcttaaaggaccattagaaaaggccagtcacattctgttctccagtcttgcaggttacataagccatttccataaattctatagccttcttcttagagtaacacacactcttgtttaggaatgttcatgttggttttgttcacggactgagattgttagtgggcaggagtttatttcttctcaattttctgggagataaagggggaaagcagtcttcaaaaatttaagaccaaaaatcttaaagacatttcacaaataatagtactccatgtaaagtggaatcaaaggcatcacaaaattgccatacttactgtttgtgaggagtcaatatttgacttggaccaggacacaaactatgtccttcatatggtagatcactaggatcagaccatctagatcccactttctctgctacttcagctgtgtagacttgagctaattgaacctgtctaaacccgtctcccctattccataggatggagataagtatttcacaagttatcaatgatgatgaaatgagctgacgtaaaactaagtaataagcatgttgaaaacgacattatacttgaaaaccaccttttgctttgagaaatacatgatggacaaaataaatttctcaggtaggtaggtacactgggtgtcagcaaaatggcaattaatactgaagcccacatttctcaaatcgcctttttgcgatgacagctcatttattcacaagtcaaaaatctttagtggtattccagcaatcctaacttgacaagcaaagcttttatgcaattttttttaagcaatacctaacagtgactcctgcagtttaaagaaaaataagtattttaagttcccctgtattgctgaagtcaagtcttaattaaatctacttcatatctgcctttggcatttaaaaacctacataaagcaactgtctggccgatgattggagcttgaaaaaaactaccatgccagatctccaccccagaccaattaggtcagtatctctgggggtgctattcaagcaacaattttcttttatgttcctaagctcatcatgagttaaggtactgctatagttgaatatcactactacaaaagttatctgaataacttcctatatactctctttcaagatgggtgttatacatagcaacaactggaaaacaagaaactgagttttaaaacaagaaatgtggcaacaggaggatatgcataactagaagggaattgtcaagaggccaggccaatcaaatgttacattataaaatgtccataaccttaagaaagttaactataaaaacaaagcaaaatgcttttagtcacatttatacttggttttcaataaaccacagaaattaagctggaaaaaaataggatacaacttataattagtgattatgcttaaagaacattaatattacagggaaatgaatgaaatgttcctagcaattgatgctgctgaaaggcagaatttggaattttttatattttccaaaaattgcctgaagtgcacacactgtgtcagaagggcaagacaaactttctttttccttagtgatatatgtttatacttctttgcaccaacccacgagcggctgggcattcattcccaagatgccactgcttacgcgaagcagcgtggtggtagtctaccaaaagtggggctatgaaacgtggcatgaaaatcagctgttctcacttcctactaaaaaatagttaactccatctcactaagcaagagactatctgccatcagaattcaagtcccagtgattagctattaatgcttaacaggatataaatgcacaaaccacacaatctgttgaaattttttttgtattgtgaaaaggaaaaggacacttcacatttttaaagtttattcatgaatggtttaatttccctttaaagctagaaaataaagatcatttaccttctgatcttcgtttttccaaatggtaataagcattgatccttccctctaataaaggtgaaatttttaaaatctcagtgaataggaatgtgcaaagctctaagaaaactattacttgaatgtctctaaagtggtagaagatcacaagttgggaataccctcaaaaactatatttttaccctactgttaaaacttgttttcaaagtggtgtaatctgaaagattacagttcaaaagtaattcccataccaaataatatcaactttaggtgaacatctaagtatttaagagtattatttttcttggctgggtgcggcagctcacacctgtaatcccagcactttgggaggccgaggcaggcggattcaggagtttgagcccagcctgaccaacatggtgaaaccttgtctctactaaaaatacaaaaattagccgggcttgttggctcacacctgtaatcccagctactcaggcggctgagccatgagaatcacttgaacccaggaggcggaagctgcagtgaggtgagatcacaccactgccctccagcctgggcaacaaagcaagactctgtctcaaaaaaaaaagaaagaattacttttctttgatcggaatttctgaatttcatacatttttcttccaagtgtcatttttttttaagggaacataccacacactcagaacataatgacttagcttcttgtaaatataagaatgggggaagttaaggtacattagttatagaacgaaggaagctagtgcattcagtgtcacatatgaactcaaggccttagttacttgattgtaatttcagtattagcaacagtgtatttccctcatgcttacatatacaagtaagcaggcagacaaagcaaaaacttctaaacatataaggaatgaagacaaacaatttaatctctatattatcatattatcagtcaattaatacagttggactttcaaactataactgttggtagtaaaataatctgatcacatttcatacagcaattaaaaataacagaaacagagtctcacctatacaatcagagcatctcctgatatgaacaacagttaagcccacatacattttaaagatgctacccagactacaatctatctcaaaagcaaccatggcataatgcattttataaaatgcctacctaaaaatacattgtattttgtaatgtttattaccaatgtgggaggcatttctagcctaaacactataaccaaactattcaacagtaagccggtagtagtcttacaataagaaatttcacatatacttgttattataaatagcattttatgttcattatttcagccatctctcaaactaagacaattttcaacagttaccagaagacactgagctagagtcaacagaccagatatctagttccagctctgcctctacctacctgtgagacacggggaaagttctcttaaccttcgtaaggcctcagatttctcaaccatagaacaaaggggctgaacaaaatgaattctaaagagcattcccataaaacgggatttggctaaattttcaagaacttaatttctttaaaaaaagatagctatgagataccaaacttggtatttaccaccaataatattgattatataagagctttaagccaaggaattactgattctgcacttatggggtgaaaatataagactatttttagcatgcttttccagttaccagaaaaggggagagggggatttttacaaagacagtaaagcatacagcaatggcagtaaagcatgcagcatagcatgctagtaatggataggcattacttgtgtttccttttaggaacttttgcacacaagcaagaggttttataaaagataccacagcgcccaataacacaatatatgtgtgatctgacaaattcaaaacacagttgaaatgaaaaggcaaccaaaatacttcagagtacttcattcttctataaaatgtgtacacagacctgggcctaaaatacttcactgcaccacatccagttctaaaatccaatttccttttcaggtagagcgcatcttttaaaaaaagagccaacacacctatgtttaagaataaaaattcacttgtactagattgtatgtagctaaacactggatctattttctgattccaaaattttctatcctagtatgaataaatgaagaataggacaaacctaagtgcaggaaagtatcaaaccctgtaacgcatacttatactgaaaatgtgtttcacatggttaacatttgcaaaggctaaaatcatttttcataaagaaaattccacaggcttgctcagtattaccaaacttccataatgaacattattttgagtgccaaattgagcacgaaaaaaacacctacttttaactattatgaaatattatgaaaagtagtaagacttatttattaggctggttaaaaagtaatttaaaaccaaagagagttaaatcttccttgagaacatactctcagaacttaagaatggggtaaatcagatggagcacagccatgctgtacacatcaactcactgaaatcacataacttctattctcatggaccttattttctattatcttgaaaacaaactgattataatctcccaaaataccagtggtaccttaaaatttaatcaactcctttccttaacagaattaggactttcaattaaaaatactgtaatatccaagagggtttcaatgcaagagaaacctttgcatcataatttcaagtgaccatatatagtggagttccctctaataacacgacagacacaaacaagctatcgagcaagaatctgttaacagttttatttttttttatgttaaataccatgggacaggattgtaaggatgaaaaactcagtcaacaactgcctcacaagggataagaaaaattctgccatgatattagcaaaggtaaaggaggaaaaatttacactgtaagaggcaccatttccccaaggaatacctcttggcatttcctgaatgagtgggattagcaatctaaataaatcatatttcaagaggtaacagcaacagataaaatttaaagggattattaaaataacatttacaagactctgaacaattcttgaactcttattaaaaccacaaagaaagaacaattctttatttatgaatttcataaaggactcaatgtgcaactgacatctgctagtgatgatctggtaatatacaacctgtccagtagccgaacagtttgtttttattgtgttttctaaccgtaagagatcattaaaggccaagcctatatgacgctgtacacacaaaaaaatggtcaccgtgggccatactaccaatgaaatggtaggtaaacaaatctttttctggtcaagagaaaaaaaaaaaaagaaacagcactctgcatgcttcactctacaagatgaatttccctagaaagaatccaatgaaaatggctgcaattacaacaagaagtgaaggaagaggactggtgacattatctctgaaggatgcagttgaggttgatccaggtttatccgaatgtgctacctttctgagccttaaaccttcatcctagaaaaaaaacacacacacaaaaggtttttaaaaacaagcatactaacgagactactggagctaaaaatctatagggacggaaagtagattagtggttgcctatggctggggacggaaaaggggattaactgctaaccacataaggaaactttccgggggtgatagacattctaaaactgaactatagtgatggttacaaa

SEQ ID NO: 8369 - DNA, 9805 bp, Homo sapiens
tactttgcaaaactttattttgattctcgtttgtatttgttttcatgtgaaatatatccttaaatttaattcaaagtagcttaataccctcatatatttatctacatattatatacaattaaggatatacattttgaattaaaacagcacaaaaaagaaagtttgctccccacaactgtaattcctaacaaacctctatttgaaacaagaataggaattcttattgctcgaaaatacaaaagattccaattccttaccatttcaaccctccacattttttttttttttttttttttttttggaacaatgtcagtaactcactctctctctcacacacacacattgtattatttttcctcagggttcttaagtgcctatagtacataacaatttttgttctttgtagaattataaacagtatcaagaatttagaccacaaagtcaattataaaaaactcttgctttaatcattaaatcttaaaggaccattagaaaaggccagtcacattctgttctccagtcttgtaggttacataagccatttccataaattctatagccttcttcttagagtaacacacactcttgtttaggaatgttcatgttggttttgttcacggactgagattgttagtgggcaggagtttacttcttctcaattttctgggagataaagggggaaagcagtcttcaaaaatttaagaccaaaaatcttaaagacatttcacaaataatagtactccatgtaaagtggaatcaaaggcatcacaaaattgccatacttactgtttgtgaggagtcaatatttgacttggaccaggacacaaactatgtccttcatatggtagatcactaggatcagaccatctagatcccactttctctgctacttcagctgtgtagacttgagctaattgaacctgtctaaacccgtctcccctattccataggatggagataagtatttcacaagttatcaatgatgatgaaatgagctgacgtaaaactaagtaataagcatgttgaaaacgacattatacttgaaaaccaccttttgctttgagaaatacatgatggacaaaataaatttctcaggtaggtaggtacactgggtgtcagcaaaatggcaattaatactgaagcccacatttctcaaatcgcctttttgcgatgacagctcatttattcacaagtcaaaaatctttagtggtattccagcaatcctaacttgacaagcaaagcttttatgcaattttttttaagcaatacctaacagtgactcctgcagtttaaagaaaaataagtattttaagttcccctgtattgctgaagtcaagtcttaattaaatctacttcatatctgcctttggcatttaaaaacctacataaagcaactgtctggccgatgattggagcttgaaaaaaactaccatgccagatctccaccccagaccaattaggtcagtatctctgggggtgctattcaagcaacaattatcttttatgttcctaagctcatcatgagttaaggtactgctatagttgaatatcactactacaaaagttatctgaataacttcctatatactctctttcaagatgggtgttatacatagcaacaactggaaaacaagaaactgagttttaaaacaagaaatgtggcaacaggaggatatgcataactagaagggaattgtcaagaggccaggccaatcaaatgttacattataaaatgtccataaccttaagaaagttaactataaaaacaaagcaaaatgcttttagtcacatttatacttggttttcaataaaccacagaaattaagctggaaaaaaataggatacaacttataattagtgattatgcttaaagaacattaatattacagggaaatgaatgaaatgttcctagcaattgatgctgctgaaaggcagaatttggaattttttatattttccaaaaattgcctgaagtgcacacactgtgtcagaagggcaagacaaactttctttttccttagtgatatatgtttatacttctttgcaccaacccacgagcggctgggcattcattcccaagatgccactgcttacgcgaagaagcgtggtggtagtctaccaaaagtggggctatgaaacgtggcatgaaaatcagctgttctcacttcctactaaaaaatagttaactccatctcactaagcaagagactatctgccatcagaattcaagtcccagtgattagctattaatgcttaacaggatataaatgcacaaaccacacaatctgttgaaattttttttgtattgtgaaaaggaaaaggacacttcacatttttaaagtttattcatgaatggtttaatttccctttaaagctagaaaataaagatcatttaccttctgatcttcgtttttccaaatggtaataagcattgatccttccctcgaataaaggtgaaatttttaaaatctcagtgaataggaatgtgcaaagctctaagaaaactattacttgaatgtctctaaagtggtagaagatcacaagttgggaataccctcaaaaactatatttttaccctactgttaaaacttgttttcaaagtggtgtaatctgaaagattacagttcaaaagtaattcccataccaaataatatcaactttaggtgaacatctaagtatttaagagtattatttttcttggctgggtgcggcagctcacacctgtaatcccagcactttgggaggccgaggcaggcggattcaggagtttgagcccagcctgaccaacatggtgaaaccttgtctctactaaaaatacaaaaattagccgggcttgttggctcacacctgtaatcccagctactcaggcggctgagccatgagaatcacttgaacccaggaggcggaagctgcagtgaggtgagatcacaccactgccctccagcctgggcaacaaagcaagactctgtctcaaaaaaaaaaagaaagaattacttttctttgatcggaatttctgaatttcatacatttttcttccaagtgtcatttttttttaagggaacataccacacactcagaacataatgacttagcttcttgtaaatataagaatgggggaagttaaggtacattagttatagaacgaaggaagctagtgcattcagtgtcacatatgaactcaaggccttagttacttgattgtaatttcagtattagcaacagtgtatttccctcatgcttacatatacaagtaagcaggcagacaaagcaaaaacttctaaacatataaggaatgaagacaaacaatttaatctctatattatcatattatcagtcaattaatacagttggactttcaaactataactgttggtagtaaaataatctgatcacatttcatacagcaattaaaaataacagaaacagagtctcacctatacaatcagagcatctcctgatatgaacaacagttaagcccacatacattttaaagatgctacccagactacaatctatctcaaaagcaaccatggcataatgcattttataaaatgcctacctaaaaatacattgtattttgtaatgtttattaccaatgtgggaggcatttctagcctaaacactataaccaaactattcaacagtaagccggtagtagtcttacaataagaaatttcacatatacttgttattataaatagcattttatgttcattatttcagccatctctcaaactaagacaattttcaacagttaccagaagacactgagctagagtcaacagaccagatatctagttccagctctgcctctacctacctgtgagacacggggaaagttctcttaaccttcgtaaggcctcagatttctcaaccatagaacaaaggggctgaacaaaatgaattctaaagagcattcccataaaacgggatttggctaaattttcaagaacttaatttctttaaaaaaagatagctatgagataccaaacttggtatttaccaccaataatattgattatataagagctttaagccaaggaattactgattctgcatttatggggtgaaaatataagactatttttagcatgcttttccagttaccagaaaaggggagagggggatttttacaaagacagtaaagcatacagcaatggcagtaaagcatgcagcatagcatgctagtaatggataggcattacttgtgtttccttttaggaacttttgcacacaagcaagaggttttataaaagataccacagcgcccaataacacaatatatgtgtgatctgacaaattcaaaacacagttgaaatgaaaaggcaaccaaaatacttcagagtacttcattcttctataaaatgtgtacacagacctgggcctaaaatacttcactgcaccacatccagttctaaaatccaatttccttttcaggtagagcgcatcttttaaaaaaagagccaacacacctatgtttaagaataaaaattcacttgtactagattgtatgtagctaaacactggatctattttctgattccaaaattttctatcctagtatgaataaatgaagaataggacaaacctaagtgcaggaaagtatcaaaccctgtaacgcatacttatactgaaaatgtgtttcacatggttaacatttgcaaaggctaaaatcatttttcataaagaaaattccacaggcttgctcagtattaccaaacttccataatgaacattattttgagtgccaaattgagcacgaaaaaaacacctacttttaactattatgaaatattatgaaaagtagtaagacttatttattaggctggttaaaaagtaatttaaaaccaaagagagttaaatcttccttgagaacatactctcagaacttaagaatggggtaaatcagatggagcacagccatgctgtacacatcaactcactgaaatcacataacttctattctcatggaccttattttctattatcttgaaaacaaactgattataatctcccaaaataccagtggtaccttaaaatttaatcaactcctttccttaacagaattaggactttcaattaaaaatactgtaatatccaagagggtttcaatgcaagagaaacctttgcatcataatttcaagtgaccatatatagtggagttccctctaataacacgacagacacaaacaagctatcgagcaagaatctgttaacagttttatttttttttatgttaaataccatgggacaggattgtaaggatgaaaaactcagtcaacaactgcctcacaagggataagaaaaattctgccatgatattagcaaaggtaaaggaggaaaaatttacactgtaagaggcaccatttccccaaggaatacctcttggcatttcctgaatgagtgggattagcaatctaaataaatcatatttcaagaggtaacagcaacagataaaatttaaagggattattaaaataacatttacaagactctgaacaattcttgaactcttattaaaaccacaaagaaagaacaattctttatttatgaatttcataaaggactcaatgtgcaactgacatctgctagtgatgatctggtaatatacaacctgtccagtagccgaacagtttgtttttattgtgttttctaaccgtaagagatcattaaaggcaaagcctatatgacgctgtacacacaaaaaaatggtcaccgtgggccatactaccaatgaaatggtaggtaaacaaatctttttctggtcaagagaaaaaaaaaaaaagaaacagcactctgcatgcttcactctacaagatgaatttccctagaaagaatccaatgaaaatggctgcaattacaacaagaagtgaaggaagaggactggtgacattatctctgaaggatgcagttgaggttgatccaggtttatccgaatgtgctacctttctgagccttaaaccttcatcctagaaaaaaaacacacacacaaaaggtttttaaaaacaagcatactaacgagactactggagctaaaaatctatagggacggaaagtagattagtggttgcctatggctggggacggaaaaggggattaactgctaaccacataaggaaactttccgggggtgatagacattctaaaactgaactatagtgatggttacaaagttctatgtatcaatgaattgtacactcacagtgggtgtctccatgggatataaattatacctcaataacactgattttttaaaactggagctgagaaatgtattcctaaaaagcaaaagttagataggctatatttacctttttttaaatcccactaaaaatataattaaagaagagtacttccaaggtggcccatggtatttaaaatcagttacatccgtcctagcccaatcagccaaaaactacccagacctgtagtctgccatttgggtttactgacacactgcaactaaggaaccggaacagcagaggcacaaaagggtgttcttgccgtaaacagagatatggtatcacagaatttgggggaaggaaacagtttagcgtgaaatttaagtaacagtgtttttatatgctcaaagcaaagcagagggctgtgtgtaaagtggtagcaccaggtctcgactgcaaagcagagaaagaatactgtttcttcagaaactacaaatttagatgagaaatgtacataggaaacccttatctgaagctctgcacctggactggaaaatgagggtgcttctctgtgtcaaaatgacttagatcctccagtcaagagtaggctgcttcattcttgctgatatggcttcacacagcactatgtctttagagcagaaggtttctcagaagaaagcagaagtcactccaagcaggaggttgttatgacactgtgtgcaatgtgaaccttgggaaaaatactaatacctgttaactacacagttgtctttatctctgtctgttaaccaatctgataaatggcaggacagttttttacttttttcagtacaaggcaatattttctcccatgattcctttattgtgcttataaataaacactaactaaaagagtacacctaatggcacagttttatttgcattactggattttctggagttgggtttttttggtctcatgctaattagtcctatataaacagtaattctcagtttcagctacacatcacaaacatctacagaacttttaatactcctgtgattgtgactcattaggtctggggcaagcctggtcaactgtaactttttaaagctcactaggtgattcacatgcagtgtgaattaagaaccacagggctaggggaattaaaagggatagtgaacagacaggagcaagaaagtgaacctggcaaaaaattatggtgggcctgtgtatagggtctgaaattctgtaagccagtgggtcttcaagggttttgttttttttttttttttgagacgatgttttgctcgtcacccaggctggagtacaatggcgtgatctcgctcactgcaacctctgcctcctgggttcaagtgattctcctgcctcagcctcccaagtagctgggattacaggcacccaccaccacacccggataatttttgtatttttaatagagacggggtttcaccacgttggccaggctggtctggaactcctgacctcaggtgatccacacgcctcagcctcccaaagtgctgggattaccggtgtgagccacccgcccagcccagcttttttgttttacttttccagcagcagaatcatctctcaaataaaatctcatacagaacactagcataaaaagagtagaaaccaggaataaagtctctctcacctacttccctggttcactcttcctattttccagccctgccccatctatgtcattctcactgtttccacttctcccctccctgccagaggtaaacagtggcttttgaaagaaatctattgagcaccctaaggagcacatctttatcaaagaacagaactatggaagtcatggcagatgaagtaaaagtaaccaacaacatcctttaaaagatccatggcgtgtaggtgtgaaataaagatattctttccgctacccagacaagtgcttggaagcagacgggtacccctcgagggggtactatgaaacatcaagcatgaagagacacaaaaattcactttaaaaagcatttcagcaaaggagttcacagatcgacttaaaacacagtgcctttaatttagagtgtagttcctacatacacctaacaaaaggaataatcaaataactcccatcatttagcttattttagttacatacatttttgtatcatctactttgctgcaaagagcttcaaacaaagcctagagagcaacgtataggtatttaggtcttgaaacaagtaattacttgtcaaagacaaattattcataaatttcagacatattcaaatcagtcctccttcgccatccatttaattcaatcaaatacatgaatgactaccacatgcatgtatggtgaatgcagagataaatgaagcactgcccttgccaccaaggcaattactgcccactagagggagaaaggcctctaacaagtaagagcagtagaaggcgatcagcatagtggaggcacaaagcagacatgacaaatcgatttttttcttcttttggagagggtcccagcaaaggctatatgctgtagtagcaaaacgtcaatgtgtgtatgtgctgtgtcgggaggggcagggttctgggcctttccagtcacagtgaagagcttacactaaagcaaagaggggtgataaacagatgcttctccagcatactccagcccaatgctgccccacgcaaatacaatgtgagcttcaaatgtgagccccgtatgtaaagttaaattttccaacagtacatttaaaaagtaaaaagaaatgggtaaaattcattttaataatatatttgattcaacccaatatacccaaactactatttcagtatgtaaccattaaaaaaaaaagattttacctttttctgtactaactcttcaacatcagtattttacactcaacagcacagctcaatttgaacaaatcccatttcagtgctcaacagccctaggtgactaatggctatgatgtgggacaacacaatcctaggcagttcagtatgactagggcacaaaatgggaaggacatgagaaacaagagcagaagctggcaatactgcaggccagatcacaaataattagaatgtgtgctaaagtaaggaacttgcagcaatgagaaaccacgggaagactgttaaaagaggagtagggtggggagcaaaggcactggggcaaagaagaaagaactgaccaagcaaaaatttaaaagctaattgctaaaatggcctaataacactcacatgtcctataccttcatttcaatcaatttattttcaaccaacagaacttactctcaggtgccgattttcttctgatagcttcatcatttctccctgaagtcttttacactcttccattagtttccttgtttcggtatcattaagtgaaacactgtgtggttttggcataggtccatcttgcttagatgcattcagtggaacagctttgctaggttccatatcattctgcattacaaagatattgggaattttttaactaaccaaatctccttacaggttttaaacaaataacaatataaattctacatctttgttcatgaaaaactctttaaaaggcctaaatcagtacatgtcagcagtcagattagtctaaataaccagcccactccctctattcccataa

SEQ ID NO: 8370 - DNA, 439 bp, Homo sapiens
tttatgtcaccacacatcgtagcagtattagtgtaacaagcttttttcattttaattaaattcacttactttaaaataattttaggtaaaatctgctttattcagctataaactgctaaaaaagacatttactaaatcaactttatggcattccacaatactcattttataagatttatcagaggctgcacacctaccacaccatcccagctgccaattttatattaagtataaacagattgttcaaagggcaaaacttgttattcttatgaaggggatgtgatttgattagtatgcctaaatccatgtaaaatctatttaaaaatgaaaatttataatgaggttctaatgaacaacagcatgtatgtgacctgtcggcagactcttccattcttcttcaagcttcccagttaagcaacgttttaaagcagcctacttc

SEQ ID NO: 8371 - DNA, 448 bp, Homo sapiens
cggccgccccgagacctcggtgtggcccttgaggcatttcaatgggcgagggccggcgactgtggatctggagctggacgcgctggaggggaaggagttgatacaggacggcgcgtccctgagcgacagcaccgaggacgaggaggagggggcgagcctgggcgacggcagcggggcggaaggcggcagctgcagcagcagcaggcggtcgggcggcgatggcggggacgaagtggagggcagcggtgtgggagctggcgaaggagagactgtccagcacttcccgctcgcgcggcccaagtctctaatgcagaagctccaatgctccttccagacctcctggctcaaggactttccctggctgcgctattccaaggatactggtcttatgtcttggcggctggtgccaaaagacccctgctgatgggggaaggcgtggcctttcccc

SEQ ID NO: 8372 - DNA, 555 bp, Homo sapiens
gcggccgccccgagacctcggtgtggcccttgaggcatttcaatgggcgagggccggcgactgtggatctggagctggacgcgctggaggggaaggagttgatgcaggacggcgcgtccctgagcgacagcaccgaggacgaggaggagggggcgagcctgggcgacggcagcggggcggaaggcggcagctgcagcagcagcaggcggtcgggcggcgatggcggggacgaagtggagggcagcggtgtgggagctggcgaaggagagactgtccagcacttcccgctcgcgcggcccaagtctctaatgcagaagctccaatgctccttccagacctcctggctcaaggactttccctggctgcgctattccaaggatactggtcttatgtcttgcggctggtgccaaaagacccctgcagatgggggaagcgtggaccttcccccagtggggcatgatgagctttcgcgagggacccgcaactacaagaaaaccctcctcctgaggcaccacgtctctaccgagcacaaactccacgaagccaacgcccagg

SEQ ID NO: 8373 - DNA, 1510 bp, Homo sapiens
cttgtttatttaaatatttatttatttttaaaagactagtcaagtggaagtggggaaagagtggtacaacgggcaaccaactgtgaataaccaattgagacaattcactaccttgggaccagccaaagcttgctttttaaagtaaccttgaaatacataccatattccatattatacaaagctttacatattgctcttagttttgaaatagaaaaagaacttttgaagagaataagaatcataaaactaggtctaaaaattgtaacacctgttcttcataaaacatatataactttatttacattaatacattatttaggaggttcaagcctttaacataacccttcccattaatctataactgtaaagagttcatgtatatttctcattttctgcacatatgtattaatgtaaaaaatttgtcctgccgtattttttttagtcaacaattatctggagcattttatcagttcgtgattcaacttctaatacatatgtcgcttaagagtaaaaagcccctccataacttgaaaacatcttttttttcttaacctgaaataggcttaaattctcacattgtcagatgagtcttaacactttagtatttgctaaatttagcatattaaaattttttaaaaggagtataagggccctaaattggaaaaaaaaactctactacgatcataactgtgggatttcatttccagttcattctgtcagaatcaatctaaagtccatgtaatgtaaacagttcgaaaaaagtcttaaaaatgaattgttgactttaaacacacaatcttcggagccgctcacaacgtccgtagaagcagactcctccccgctcctggggaaaaccctgcctaatatttataactttatgacatactgtaatactcacaaggtggttgtagaagtataaacacgactggagttatctgattggctgctggtgatgtaacacccatgtcaatacttcccagtgaacgcacgtgttcgaccttttatttaaatttccatttcatcacagcaataagacactcggggcggtgcattttctgtgaaatgactactgtccggggcccgaggtgctgcctcgcacaatgcatcaaaggaggttgtgtccgtggtcgtaacctcttcgcgtgaaaggcaccgcctggtccagtctttgtgaaggaacaaaataagttcacttccttgggcaccgccacccaccctcagcaaatgacaaggctggagcgcagctcccaccgcacagttatttgcaaagtcccaggtgaactcgtggcgagagaaggaaaatgcgcgtcccgggcgcgggtaggtgcgtgtgggcagcggggaggcggccagaccctgacactcgccagctgtttgtcctccgcgtagcccggccccggccgcacacgcccgccccctccctgagacccccagcccgccgcccggccttttgtccccaacccctcggccgacttccttccccgcggccgcacccccgcccccaggccgg

SEQ ID NO: 8374 - DNA, 1510 bp, Homo sapiens
cttgtttatttaaatatttatttatttttaaaagactagtcaagtggaagtggggaaagagtggtacaacgggcaaccaactgtgaataaccaattgagacaattcactaccttgggaccagccaaagcttgctttttaaagtaaccttgaaatacataccatattccatattatacaaagctttacatattgctcttagttttgaaatagaaaaagaacttttgaagagaataagaatcataaaactaggtctaaaaattgtaacacctgttcttcataaaacatatataactttatttacattaatacattatttaggaggttcaagcctttaacataacccttcccattaatctataactgtaaagagttcatgtatatttctcattttctgcacatatgtattaatgtaaaaaatttgtcctgccgtattttttttagtcaacaattatctggagcattttatcagttcgtgattcaacttctaatacatatgtcgcttaagagtaaaaagcccctccataacttgaaaacatcttttttttcttaacctgaaataggcttaaattctcacattgtcagatgagtcttaacactttagtatttgctaaatttagcatattaaaaatttttaaaaggagtataagggccctaaattggaaaaaaaaactctactacgatcataactgtgggatttcatttccagttcattctgtcagaatcaatctaaagtccatgtaatgtaaacagttcgaaaaaagtcttaaaaatgaattgttgactttaaacacacaatcttcggagccgctcacaacgtccgtagaagcagactcctccccgctcctggggaaaaccctgcctaatatttataacgttatgacatactgtaatactcacaaggtggttgtagaagtataaacacgactggagttatctgattggctgctggtgatgtaacacccatgtcaatacttcccagtgaacgcacgtgttcgaccttttatttaaatttccatttcatcacagcaataagacactcggggcggtgcattttctgtgaaatgactactgtccggggcccgaggtgctgcctcgcacaatgcatcaaaggaggttgtgtccgtggtcgtaacctcttcgcgtgaaaggcaccgcctggtccagtctttgtgaaggaacaaaataagttcacttccttgggcaccgccacccaccctcagcaaatgacaaggctggagcgcagctcccaccgcacagttatttgcaaagtcccaggtgaactcgtggcgagagaaggaaaatgcgcgtcccgggcgcgggtaggtgcgtgtgggcagcggggaggcggccagaccctgacactcgccagctgtttgtcctccgcgtagcccggccccggccgcacacgcccgccccctccctgagacccccagcccgccgcccggccttttgtccccaacccctcggccgacttccttccccgcggccgcacccccgcccccaggccgg

SEQ ID NO: 8375 - DNA, 695 bp, Homo sapiens
atttatttaaatccactatataatgagctatataatttatttgatttaatccagaatgatcttctactacttcatttaaaatacttctttccacaatttgaaagctttaaatgactgtttcttaccctttgtgggaaatggaatctgagactcactgttgtttggaatgctgccaagcttcaggattttctctatgaattctcatccctgggaaaagctttgccctcaaaaatatatggtatgtatattacgaaatttgataaacacttgctgcgtgtctgtttaagcaaacctttagaaacacatatgttatctgctgtctcattagagcatgtatggtaaaagaaaaaatcatggacgaaaggaatcagactaaagtctagggtttgaaaataattttaagtctttgtttgcagtgaggtattttaggatgagaattatgggcttatttcaatgtgctcttccaaaccatgttatcatctgtctattgatgcttttgccctctgcacagagaagatagtttgccacatttgagttgcttattaaaaacagtgggagttggaagcagtgcaaggtgagagagtgaaaggctgtaatggactacttgaagggtaagccacttaatgaaggctggtttttaatgtaaggactgttaccctcgcagacataaatgcaacatgaaaaatgtctaaatt

SEQ ID NO: 8376 - DNA, 250 bp, Homo sapiens
acctttaacatataccttaaaatcaatacatagtccaaagactcaaaatttcttttccctggtaggagtgtgaccgaaaatacagttatgaccttatacttctcctctccaaaaataaacttgactcaagataggtaggtactatctcagtttaaaagcttattatctttcaaacacaagaagaatgccagggaaatacatacacacacacacacacacacaacaaaaaaaacaaaaaaaaacaaaaaaa

SEQ ID NO: 8377 - DNA, 438 bp, Homo sapiens
gttgagatggagtcttgctctgtcacccaggctgtcgtgaagtggcacgatcttgactcactgtaacctccgcttccctgcctcagccccttgagtagctgggattacaggcacccgccatcatgcccggctcatttttgtatttttgtagagatggggtttcaccatgttggccaggctggtcttgaactcctgacctcagatgatctgcccacctcagcctcccaaagtgctgggattacaggagtgagccactgcacccgaccccagtttcccgtttttactaaagacaaattacgacaggaccaatttgctttattatgctttgccactttatttgtacgaggtgcagcaagaataattatttttcacataggcttttaaaattggttttaatgggactttgttttatagaaggaatctgagataagacttttt

SEQ ID NO: 8378 - DNA, 695 bp, Homo sapiens
ctagattaacatcagacaaagtagatgtcagaacaatgaaaattaccagggataaaaaacgacattgcataatgatatagggataaagtcatccaaaaggcataataattattaatgtgtatgcacctaaatacagagcttcaaagtgtgtgaagcaaaaagtgatagaaccgaaaggagaagtttttgttttttttttaattctgcagttacttggagaatttagtgctccactttctacaatcaatagagcaagaggacagaaaacagcaagtatatggaagacttgaacaacactatcaactaaacacagctgtcatttatattatattctatcgaatgacagcagaatggacgttcttctcaagtgcacgtgaaacattccccaagataaaccttatcgtaggtcataaagcaaaccttaaaaatttttaaagagttgaaatcatacaaagtatattcttgggaccacaatagaattaaattagacatcaacaacagaaaggtatctggaatatccccaaatatttggaaattaaacagcatacttctgaaaaagtcatgtcaaagaagaaagaaaattagagaacatttgaactgaataacaatgaaaattataatatttcagttgcaaccaaagttggacttacagggaaatttatagcatcaaatacttgtattggaaaagaagaaag

SEQ ID NO: 8379 - DNA, 416 bp, Homo sapiens
acatccatcagtgaatgaatggataaacaaaatattatatacacatacaatggaatattattcaacctcaaaagagaataaaattatatatatagtacaacgtgaatgaaccttgaagacattatgctaagttaaaccagacacaaaagaacaaatattgtatgattccacttctgtgaggtacctagagtagtcaaattcatacagacagaaagtaaaatagtggttttcaggggcttcagggaatggagagtggggagttatcttctaatgggtacagagttttagtttgggatgatgaaaaagttctggagatggatagcggtgatggttgcacaatattgtggatgtgcttaatgccactgaactgcatattttaaactgtaaatttaatgtttttaatattttaacacaat

SEQ ID NO: 8380 - DNA, 275 bp, Homo sapiens
gtaatcccagcactttgggaggccaaggcgggcagatcacgaggtcaggagatcgagaccatcctggctaacacggtgaaactccatctctactaaaaatacaaaacaaaattagccaagtgtggtggcaggcacctgcagtcccagctacttgggaggctgaggcaggagaatggcgtgaacccaggaggtggagcttgcagtgagccaagatcgcaccactgcactccagcctgggcgacagagggagactcgtctcaaaaaaaaagaaaaaa

SEQ ID NO: 8381 - DNA, 4785 bp, Homo sapiens
caaaaaaaggaaaattcagagagtaactgaagttttatcattaatgggactaaagtgctttagcccagaaacagatttgtaaaaccattactgctaacaaagacatcattataagcacagctgtactgacactgaaattaaaatttgacccatcttggaattttggccccttggtcctgtttccctgggacagattgccttaaaccagttgtgccctttatacccacttttggcatccctaaacacttagtgcttgccaaaaacctatcaccatggctatggattgtagattttcccaattccattaatgcctatcactagttgggcatttctatagtattttctataacttattttcccagcctcagactcaacatgactttctccaagtagctccatcaatactttaagctcaaaaccaattagcacaggggcctatgaaacctgacaatttgctcatatggagaattaggaaatattgcactttaatgcataagacaccttgtaaaatacccataaaattttaactggctgcagtgttaatgaagcaaataccatggagttataatagcttttgaatgtgatttatgcttacagctaatgaacagatgaaaagcactgtccttttttaagtaaacactacacactccagatggattgcaaaaatttattaaaattggagacactgttttaatcttcttgtgccatgagactccatcaggcagtctacaaagaccactgggaggctgaggatcacttgagcccagaagtttgaggctgtagtaagcttcaaaggccactgcactctagcttgggtgaggcaagaccctgtctcaaaaaataagacaagacttttagccacatttacagacttcaattaaaatgctacatgggaatgcagaatatcagatattttattgtcatcaagtaatcagtgagagagttcaagttggattgagatcatcatgtattctgcaattataatagtcccaacatttccaatcctcacctttcaagcagtaagctgcatgcttgcttgttgtggtcattaaaaaccctgaaagcgaagccaacatattaatcagggcaaaatacaaatgtgtgatgcttgttagtagagtaacctcagaatcaaaatggaacggttttacagtgatatcattatatttcatttggcagaatcattacatcattggttacactgaaaatcatcacatgtaccaaaagctgactcacctagtttaggataacaggtctgcctgtttgaagatgaaaaataatacccatttaaaatttgccctactcaatttccttctcagtcacattttaacttttaaacagctaatcactcccatctacagattaaggtgtatatgccaccaaaaccttttgccaccttaaaaatttccttcaaagtttaaactaacctgcatttcttcaatcatgaattctgagtcctgaaattaagggacaatacacagtaagacaacttgcatacaattaggagtaatccaaaatctccaaacattatagaatggctatattccccttttcggggcataaactagaatgttaccgccagatacatcagataggagcgaaagacttaatattgctcatcagcgttagtctgctgaactatgttatcatcattgtatcggctttacaacacttaaaaaccagacttgaggcggggcatggtggctcacgcctgtaatcccagcactttgggaggtcagtgcgggcagtatcacttgaggtcaagagttcgagaccagcctggacaacatagctgtacaaaattagccaggcatggtgtcacatgcctgtaatcccagctactcaagaggctgaggcaggagaattccttgaacctgggaggcagaggttgcagtgaactgatagtgccgctgcactccattctgggcaagagctagactcttgtctaaaaaaaaaaaaaaaatacttggaactgctatacctttgcttctttaaaacttgctccacacagtgtagtcaagccgactctccatacctgtagaaatttaatctcctttaccaataggtagtaataggtggatttctaaaagatttcccaactactgtttcagtttaagattaatctccattttctttctcagagagattcccatctgctttaattttaaaatcatcactaacagtagctcaatcaattaacgttaacatcaataaaacatgtacctttaaaaggtatgacaggaactgtcttcatgtccttacccaagcaagtcatccatggataaaaacgttaccaggagctggaatacaaatgaggacttccattaaaatgctaaacatcattaaactcttttcaaagttgtctgtcacagggttcttcagtgttacctttgtctacatgctcatttcaggtcagacatttgatcaacatcattacacaaaccccgttccaaacatgctcaaggaaaacacataaacactgttccagacatgctcaaggaaaatacagtcagtattcatcagccaagccttaagccattagctcagcagtaagcatatcaccatcagcattttcattaagtctatctactgttttcattaatacttaccagaaccattaagctggtccaggcaagttggactccacctaagaaataagagtggtcttagaatagccacagatgagtgttcaccccctgccaaaactaacaaatgcctttagtcagttagagctaattaagaccttcatgttcagtcagcatttgcttatcatcatccaggctgcatttacaaactttcttattaatcataacaagacaagaatccgccatttatttaatgcattcagcactaggaggtaactaaaaagccatttgtgccgtaggaagtttgcccagttacctgcttacttggatacagtttcacttaccatttcaacttccagctttctgtctaatgcctgtaattttaatacaaaattgtcagcaaaaaatattttaatggtagattggtggtacactgcttaaccattaacagcaaaccacaactaccccagatacatcagacagatagtacatctcttcatgattaaatctgctgaactatgcaaccatcatagtatctgttttcacattttcttcagtattaaacttagtatcaatatgagagcaaaattctcatttgaaaagaggggagagaagcactaacatagataatcatcattgctttggctattttctaatcccttaaaagtgagaagtacaaaatagaggtgtctcacctgtgtgccaatggcttgagttaggcttgctctttaggacctgggaagaaacaacttcatgtgaacttaggtgtactctctatgttccccaactcaccattttgggtgcctcagttaagataatggtggttaagatcctcatcattctagcactcaagagtagcaaataaactgtcatcattgtggcacatccaatggctttaaacctttttgagagggaattttcaacttacttcagtagctattctcatccttccttggggacacaactagaaaacaaaaagatgcaagcaaaacagtgagaatgaacctcacagcagtcacgttaaatataaatgctgttaacattaaagcctcagaatagaatttcagaaatcccttctgtccactactcttaaagcatcacaggctgagaccacctcttagatttcattcttcccaccatactttccccaattcttacctgtccataaggtgctatccagagccacactgcatctgcacccagcaccatacctaaagagatcaggtacagattttaattcattgttccacggttcttttttttaaagagtgttctttaaaaaaacggttcgtctttttaaaccaatgatgcaggtaacataccattcattatctagcgacaggtaaaggatacacttaatgttacaaagaagcactgcacccgcagttaagaaccaccgatggcggccgggcgcggtggctcacggcttgtaatcccagtatgttgggggaccacggctggtggatcacctgaggtcaggagttcaagaccagtctcgccaacatggtgaaaccccgtctctactaaaaatataaaagcctagcatggtggcgcgcgcctgtagtcccagttacttgggaggctgaggcagaactgcttaactcgggacgcggaggttgccattaaccgatgtcgagccactgcattccagcctgggtgacagaacgaggctcggtctcaaaaaagaaaaaagaaacactaatggaaatattggtgacactgcggaatgcaggcacttaagcacgtggactaccaccgacagcctttcatgagagcggacggctgatggaggctcgggtcacggcccttaacaatagcttactcgggtgactcggcatgtgccaccatcagagcggttggcattcatcattactctcagatgtccctaccaacacaggcttcatcagaggcagggcacgagagccgaggcttctccgcagttctactctaacatagtcgcagcttaggtcacgcatgcaccatatgtgcaatcccccaccatcctcaacttgtaggccctgcaaaggcgcgcgactggcttagaagtcccagtcaattcagggtgaccttagcagacaaaggctggagcgccccaaaacccgcaacattcgcaaagataaaacatacctcacaggagtcgactcctacctcgaaaagacagtatggtgcctgggctcctgtatataagagttcttttgat

SEQ ID NO: 8382 - DNA, 4319 bp, Homo sapiens
tttttagttttaaagatattattggccgggagtggtggctcacacctgtaatcccagcactttgggagattgaggtgggtggatcacttgaggtcaggagttcaacaccagcctggccaacatagtgaaaccgtctctactaaaaacacaaaaattagccaggcatggtggcgcatgcctgtaatcgcagccactcgggaggctgaggcatgaggtttgcttgaacctgggagatggaggttgcagtgagccaagatggtgccattacactccagcctgggtgacagagcaagactccatctcaaaaaaaaaaagacaacaaagatattattaatcactgaacactattttctctcaattataagtaattgaaaattctaatcaaccttagattaacctcaaatgtgcgaaaaagtgaacaccaaaactcattgtgattttaagttctaatcatacacataaaagttttaataaactaataattataaaatgaggccgggtacagtggctcacgcctataatcccagcactttgggaggctgaggcagacagatcacaaggtcaagagactgagaccatcctggccaacatggtgaaaccccatctctactaaaaatacaaaaattagctgggtgtggtggcacatacctgtagtcccagctactcaggaggctgaggcaggagaatcacttgaacccaggaggtggagattgcagtgagccgaggttacaccactgcactccagcctggcaacagaacaagactccatttcaaaaaaagacaaaatgagaacaaggtcttgatcagtgattttgaaattgttttcttctactcagtcttcacttctgccttgaaattcttttgatttataccttttttttttttgagacagagtctcgctcttttgcccaggttagagtgcagtggcaccatcttggctcactgcaacctccacctcctgggttcaagtgattctcctgcctcagcctcctatttaattaattaataattgatttaatgatttagtttaaaatgttaaattcattttaaaataacccattacatgttaacacaaatagcatgtttttattttattttattttgagacagagtctcactctgttgcccaggctggagtgcaatggtgcgatcttggctcacttcatcctccacctcccgggttcaggcagttttcctgcctcagcctcctgagtagttgggaccacaggtgccctccaccacacctggttaatttttgtatttttagtagagacgaggttttgccatgttgaccaggctggtctcaagctcctggcctcaggtgatccgcctgcctcagcctcccaaagttctgggattacaaaggcgtgagccaccacactcagccatgtttttattttaaaaataattattttcaaaaaaaaaatagaagagtaacattgttttatatttctgcaaatattttttatttctggcttaatagaagacactagattctgatatctgcttctgtatcctatctgttgttatatgctgttttggttgaagtctgtgaagaaaatctgaccccactcatatataaagttggaaaagggaggagtattttaatagctttgtctgataattatggatactctctttgataccacaccaaaatatgacaagtagtagagttccttaaaggctagttgcaatgtggattctgaaatcgtattgatgagcttttctaaagtccattggtgtaccttgtatttaaatagaacttttacctatgtgtgatatttgtaacaccagtccagtgattgatcatttggaaaatattggttcactgagttatgcaaatcttccaaatgttgacacattttgatatacaatatctaaaacaaaataccattaattaatattaccaccaatcccattacaaaagtctaagtctgaggaagctataagggcacagaagtgtatacaagccttccaaaattttaggtttcatttggaagcttgagttttatcattggcaacaaatgccatcagttttttccaagctgacttgttcttttttgagcaaatctctgccaaaattacccctaaaatatgaataatcaatttgtcaggttttttcaaactaaaaatgttctgtgaaaacaagcagctagttcagcttgtatctcaaacaattgtaactactttttctagggaaaaaaaaatctagacatccatactttatggcagatgtgcttcatgcatacttcccattttgtcacacagaatatcaaaataacgtgtactcaaggtcaagatttactaacaactaaaattccaaaactgctaaacaacagaatgctgaataaggtgatccaatttttaatattttatttgagacaacatctcaccctgtcacccaggctggaatccagtggtgtgacacagctcactgcatcctcaacctcctgggctcaagcgatcgtcccacctcagtctcatgagtggttgggactacaggcatgcaccatcatgcccggctcactttttttttctttttttttttaattgtagacacagggtctcactatgttgcccaggccggtcttgaactcctggactcaagcaatccccccaccttggtttcccaaagtgttgggattacaggcatgagctactacatacaactgaaatcttttaatatgcttgtcaaaaagttttctgattcagcaaatggcacttatatataaaagagagaacaagaagctggatgcggtggctcacgcctgtaatcccagcactttgggaggctaggtgggcagatcacgaggtcaggagttcgagaccagcctggccaacgtggtgaaaccccctctctactaaaaatacaaaaatagccaggcatggtggcccacgcctgtaatcccagctacttggaaggctgaggcaggagaatcgcttgaacctgggaggtggaggttgcagtgagccaagattgcgccgctacattccagcctgggcaacacgagcgaaactccgtctcaaaaaaaaaaaaaaaaagaatagaacttggctggatgcagtggctcacacctgtaatcccagcactttgggagggcagggcagttggatcacttgaggccaggagttcaagactagcctggctgacatggtgaaactccatctctactaaaaatacagaaaaaaaaattagctgggagtggtggcacacacctgtcatcccagctactcaggtagttgaggcacaacaatcacttgagcctaggaggcccaggctggagtgaggtggcacgatcttggttcactgcaacctccacctccagggttcagagtagctgggactacaggcccacactaccacacccggctaattttcgctttttttcagtagagaccgggttttgccatgttggccaggctggtctcgaagcctgagccataacctggcgaaaagatactttgaaatgtaacatcgtttttcacttcaaaatcaaggtattttaccaacttgtctttggtacctccccaaaaactgatctactacatttgcagtttcattcatttttccaacattaaggaataaacttgaagcgcttacattcttgtgggggaagtaagaacaaaacacataataggtcatggtggtcacatgaaaagtaaagggtaaccgattggggtaggtggtggtagttttgtgtgtgtgtttttttttgagaccaagtctcgccgttgcccaggctggagtgcggtggcatgatctcagttcactgcaacctccacttcctaggttcaagcaattctcctgcctcagcctcctgagtagctgggattacaggtgcacgccacacctggctaacttttgtatttttagtagagatgggggtttcactatgttggtcaggctggtctcaaactcctgaccgtgtgatccacccgcctcggcctcccaaagtggtgggattacaggcatgaaccaccacgcccagccttcttttttcctttgagaaagtctcaccctggcacccaggctggagtgcagtggcaggatcacgggtcactgcaacctcagcctcccaggttcagttcccctgcctcagcctcccgaatagctgggactacaatagcccaccactacacccggctagatttttgtatttttagtagagatggggtttcaccatattggccaggttggtcttgaaatcctgacctcaggtaatctgcccacctcagcacccagccaggtggtggtagttgttttacagcctgtgtgagacattcgggtgagccccaggaaatgaaagaatgtgcttatt

SEQ ID NO: 8383 - DNA, 5805 bp, Homo sapiens
gtaattaaatgctgaaacctttcagaaatagccataattttgtattacatacaagtaagccattttaaggagtttcatgaaagacgtttggcacttcacccattatttcttgctgatggtaatttgactatctttttcaagtagctttttgcattgactaggataatttacaaatgaaaattactttctcatcattgaacagcatgataggtatttgtgccgcattttttatcttttaaatgaaaaatatttattaggtaaatggaactgaaatactacctagttacttcttttagtagaatacttctgaggcaagaaactaaaatctacttgtcatattttccaaatgttatttatcagagtaacacgaaatgacttcccaaacacacttgaaaacagtaagtagattcacttggcacacataatctaaaggagatttattttctgtttactagaagttattgaatcttaaatattacccctcatgccctctccccctgcttttttaaaaaataagcggtggggggaatcagctaaaatacagcatagaaaatgcaggtttacccccctcccccgccagcctgctttgttaacatcttgtattgggatcaggccatctgtacagagttacacttctgaattatacctcattttattcctcaaactgtgcaaatattccctttgatttcagttatatcaaaaatggcaaatctgaaatatgccttgtaagtctaaatattctacacttcagaagcttatttatatttttataccattttaaaaagctttttcataatgcacatatcagttgaatgtttttgttcccctttgtggcagtttcttgtgaaggtgcaaatgagtactagttgtgatgatgtaatatggatacttatccataaagaattagcctgtctgtcaccttgtttcctgtaacctattcagaagctgacagatggtaatgacattcagttgttgccgacagggatctaacatcctactttatgccttcttggtcttgaaatacatcattttcatcagttgatgggaaggtacatgataaacagcttttcatgagtttgaaacaatacttttttgaatacaacagctctgttagttattaggtagttttattgtactaacagtggaaaaatagagtgggaaactccagcattataccttaaatggggcttatagaaagatttttgaatatttctcagagtacttgctaggtacttggaaagtacagggataaggactggccatataaatcttcatttatttatgctaatttcagttcgttttaggaactaaatgaatgaacatgtcctttgctgaacaccacgcagttggaaataccttttggggtgcagttttggatgttgtaaatacctttgcatagcttgggaaataagaaggtcatcaagagtctgcagatccattgccgcattctgtacttgatacttatatcttggtcacaacaggaagaggcaggctgttttatggtgataatcgatgtgttcgtatttgaatatgcaccagaaagtaagggaatggaaatattttgtatttaaataggtttatttattttattttattttattttttgcgatggagtttcgctcttgttgcccaggctggagtgcaacggcgtgatctcagctctctgcaccctctgcctcacgggttcaagcagttctcctgcctcagcctcctgagtagctaaccacacctggctaatttttgtatttttagtagagatggggcttcaccgcattggccaggctggtaatttttgtatttttagtagagatggggtttcactacattggccaggctggtcttgaactcctgacctcaggtgatccgcccattttggcctcccaaagtgctgggattacaggtgtgagccaccgtgcctggcctgttttttgcctttctaacttgaaataacttttggcaccagtttttagaattcctaatgcatacttttttttagtatgaggtataatgagtatgataaatactcctctgaaaaaccaaagtaatgattagctcttctaaaacctgtcagtttctatatgatggacatttgtttgatacatttcaaatctagagttttcctcaaggtttttgggaaaaggccttatagatcataatttgtaaggcgtaagaacaatctcaagttaatgaaaggttatttcagacaaacttccactgttagagttcagaaagttttttcccatggaaaccgtgttgtaagtaatagtagctgtcatttacatcactagcaactaatttgtgctagctgttttaagtcacacgtacattcatttatcaaaattcatttatcatgaataaatgaatacatacattcatttatcaaaattcattataaaaatcctttgaggtaggcattctttttaccatccttttatggatgaggaaactgagggatagagacatgaagtaatttatacctacagctacatagctagtaaatagtggtgctgtgattgaaacctgggcattgcagatctggagcctatgtgataaccagtgtactgcactgctttattgtaagatagtggaatgctgtaatccacctatatgtgaaatgagtttctgtgagttggcctggaaacctaagcatcattaatatccttatttaagtgttctttgtcaccgttgaccattacctagttgaaatacattccttttcacttccatagcactgtacttgcctggttttcctcctacttttctggcccaacgctttttcctgttcttcactggtgtttactcctcttctgtctaatctctgcatgttactgtttcctcagggcttgggattgataaatttcttgttcattccttgctttctcctgcggactcacatccacgtccatgcttttaaatactatctcagtggagatgcccatatttgagcagactcttctcaggacctcagactcttctgaaaacctgatcacataaccaactacctctttgaccttttacttgagcttaatgatatgctttccccacccatcacacctctgcttctctagtgaggcccatctcagtagtcatacctctgtccacttagttgcccaggccagatggtgggagttgtgtgtgctcagtcactaagacctactgttttgaatctaatgtcttgaaactgtctgcttcttttgtatccactgctccagctggtccaagccaccattatttttcacttggacaactgtggtagcttcctaacttagtcatcttggaccttttctttcctctcttcaattcattcttcttataccatccagagtgatttttaaaaacacagatctacaagtttgctcttggtcctttgcttaaagcctttccatggctactcctacatattagggtcacatttttaaacatctgtaatatggtcaggcgtgatatctcacgcctgtaatcccagcactttgggaggctgaggtgggagtattgcttgagcccaagagtttgagaccagcctacgcaacgtggtgaaaccctatctctacaaaaaataaatagaaaaaattagccgtgcatggtggcgtgcgcctgtggtcccagctactctggaggctggggtgggaggatggcttgagcctgggaggtggaggttgccgtgagctgtgatggtgccactgcacttcagtgtgagcgacagagtgagaacctgtcacacacacacacacacacacacacacacacacacacacacacacacattgtaatgtgctctgtatggctctgcgtttactgaccaattttttttaatttattttcttttttattttttcttgagacagggtctaactctgctgcctagggtggagtacagtggtatgaacacagcttactgcagcctcgacctcctgggctcaggtgatcctcccaagtagctgggactacaggcatgtgccaccacacctggctaatttttaaattttttgtagagatgaggtcttgctatgttgaccaggctggtcgggaactcttggcctcaagcagtcttcctgccttggcctctcaggcgtgagccaccatgcctcgcactggcctgtattaaattctttgaatcatcctaaattccttcttaccttaaggttttcatacatcgtcttaccttcacttagataactctcaccctatccccacctcccagactgacttgttaaggtatctcatgtgagaaacctgcagtattttcaaccctcactccttgttgctttgtgcaatggtatatgttttcacagaatattttattttactttcatattcttagaaatatatacctatgtattgtttatgtaatacgtatcttcttcagaatggaggttatttgaagaacccctatgtgttttgctgttatatttgtagtacttagtatttactttaatccatggcatatagttggtgcttaatacatacttatatcatgaaagccagaactctgcttcagtgtgggaattggaagcccctttcttcctgttgcagcctctaatgccattccccctctaccctgtagttgggaccaagatgaagggtaagtttgtgattatctttggttagcagggtggggatatgggctactacttgtttcttcctttccttggtatgttctctggaacaatgagtactaaagtatgtctaccaaaacacagttttcttttattcattaaacaaatatttgagtacctgcaattgttaaggcagtgttacctgtatctccttgagttatatttctgcagtgaaagcttgagaaatcaagtgacaagcatgcaatcactcattaaaatgtagtggccatctctcagtttctgtttctcagctgagttctgcagggtgccacaaaaatgaaaaaaaaaacactgtcttgcctctgaaagaacttgtgatctggagggtgagagggtaatgcacttgcttcctctctgcttggcttctaaatgttgaagtgctcagaaacttggagttctgtccttttttcttttctctccactgaccctaggtgtagttgccatatatgtgagatgactttcaaatttacatctctggattcatatctagcatctgacatcttcatttgaatattgaataggtatttccaaaatgacatatccaaaacatgattgtcaccctctcaacctgggcctcctctagccttccccacctcagtaattattatcaccatttactccattgcttatgtccagaaggttagagccatccatgattcatttcattccttcccatattgagtccctcagcaaatcctgttggttcaatctccatatccataatttcctgcatggataattgcagttgcctcctgttgcttttcttgcctccttttaggccttctgtaatttattaagtatgcaacagccagaattaacttttcaaaagtataggtcaggtaatgtcattaccctgcttagaaccttccagtgttaatcagtaaaatccaatgacttggtcaggtgtggtgactcatacctgtaatcccagcactttgggagactgaggcaggatcacttgaggccaggagttcaaaaccagcctggccaacatggcaaaaccctgtctctactaaaaatacaaaaatcagctgggcatggtggcaggtgcctgtagtcccagctactcgggaggctgaggcaggagaatagctggaactcaggaggcggagactgcagtgagctgagatcacaccactgcactccagcctaggtgacagagcaagactccatcttaaaaaaaaaaaaa

SEQ ID NO: 8384 - DNA, 454 bp, Homo sapiens
gaattcatcacgcctatacatacgcaagggtgcatcaaggacctgtagcccgcgtacgtgtctttctgcagctccaccatcctgaggaagtggtggtcttcctgggccagtgtggttgagagcacagttcagttgacctgtgttcctcagctctaggctctgcaattctctcctgtgcggtccatcctgctttggtccattctatcagtgcaaggaggtctgatttcttttggctaagtcttggtttctttctacacacttgtccagagctcaagctttgaggtctgactcttcatcagttcgtatatatgaaagagtcacaaattccagtttgtcttagtggaccaaaccacagggcagataatcttgtgcttctaactggaagccctgtatctgcagcatctcacaccctcgtctccctggggggaaggaggagcctttctgtggaaggttt

SEQ ID NO: 8385 - DNA, 454 bp, Homo sapiens; identical to SEQ ID NO: 8384

SEQ ID NO: 8386 - DNA, 173 bp, Homo sapiens
ggcaggcgcctgtggtcccagctgctcgggaggctgaggcaggagaatgatgtgagcctgggaggcggagcttgcagtgagccgaggttgtgccactgcactccagcctgggcgacagagcgagactccgtctcaaaaaaaaaaaaaaaaagaaaaaagaaaaaaaaagaaaa

SEQ ID NO: 8387 - DNA, 285 bp, Homo sapiens
tttgggaggccaaggtgggcggatcacgaggtcaggagatcgagaccatcctggctaacatggtgaaaccccgtctctactaaaaaaatacaaaaaattagccgggcgtggtggcaggcgcctgtggtcccagctgctcgggaggctgaggcaggagaatgatgtgagcctgggaggcggagcttgcagtgagccgaggttgtgccactgcactccagcctgggcgacagagcgagactccgtctcaaaaaaaaaaaaaaaaagaaaaaagaaaaaaaaagaaaa

SEQ ID NO: 8388 - DNA, 564 bp, Homo sapiens
atatatgatatttgcatatgtactacatgtatagaatgatctcttcccagcagttctgtatatactcagaatgaaatttttcttggttttcttggcctttgtgaaagcagaaggctgacgctatttttgttgctgaccagtacttgtttatccattaatattttctgccctctaaacttttgtataatcctttatgaaagttaatttcatcagtatatagttaatattaatagtgccaaagtgctaccagtggcaaactaggtagatcgttatttattttcaacaagatgccaagcatgtcagagtttgaagttgagcttcagcttaagtacaaacggaggtaattttaaggttgccagtgatagatccagttccattaggtttagttctctagggctaatgattgtttctgatttatttctatatccctagcacctaaaacagtgtcacacaatagtcactaaatgtttattgaataaaagagtcgacaaacataattaaaagctatttttcttcctatatatagcatgaagattgtaattgcttctctagaaaatgtatgaa

SEQ ID NO: 8389 - DNA, 564 bp, Homo sapiens; identical to SEQ ID NO: 8388

SEQ ID NO: 8390 - DNA, 442 bp, Homo sapiens
accacgtccagcctggagccattatttactgtcacagtagaagtcggaggaatattattagcaactggtgtgtagaggccagggttgttgctaactattccatgatgcataggacagcccccaacaacaaagaattaccagccccaaatgtcagtagtgctgaggataagacacacattttcaaggtaccttaccataggactcaaagtggcagaaggacatgaagaacttttttcaaaactctcattttgcttccttaccctcacctgccacaactgattcccacagttttctccattccacactataatctacattctttggccaagacgacccaattacagagtgggagaaggcttctccccattttgggtagtgttttattgctctgcaacgggggtcctcatcactggagtcaggagggacaagccagaaacacctg

SEQ ID NO: 8391 - DNA, 1351 bp, Homo sapiens
gctggtcatgactaataacgatttttataaaatttaatgcacactgaacaatttttagatgtatttccaaaattgtgtattttattaggacatttgattttttcttttaattggagaattctacataagcctgtattttttaactttttttgttctcattataattgacataaatatatttattgaggcaatttgttcagataagaactcgggatgcttcataagtcatgatgttttttaatatataaatgtggcgaacaaacatgacagtgcttgctgtgtagcagatgctccatgataagccataaatattcctgctagagttagtttgtaagttcaagtcggagagggaaaatatcaatagtgaagaaataagattgattcttcccgtggagataacaattgttttcatgctgcgaagctaaatattgctgaacctaaagagaaactctgtttcttttatttcctaattatctttagttttgtttgtcttattatgtgtcttctgtgtattcatcacagcccctctcccttttttctacgtgattgctacagttttctcattgtcttcatgccatgtcattttacatggtactttgtaggttttgatgagaaagttggtatttttaatgcactcaaaaattggttttagttagagagtttgcttatcaatataactttcagatcagttaattaagataaaacgcatacactgtccatagatcagaggattaaataacttagcattgtttttctgtttgtaaacggaaaatcttattaaattcttacacagagtgtgacacatttaatatttgctagaaaatgcatcttagaaattaaattattaagagttagtggtgaggaattttaaatttaatgttctatgatatagcacaacacagatttatttatttatttatgaaatggaatcttgctctgtcacccaggctggagtgcagtggcgtgatcttggctcactgcaacctccgcctcttgggtgcaagcaatgctcctgcctcagcctccctagtagctgggattgcaggtgcctgccactacacccagctaatttttgtatttttagtacagacgtggtttcaccatgttggccaggctggtctcgaactcctgacctcgtgatctgccctcctctgcctcccaaagtgctgggattataggcgtgagccactgtgccctgctgaatcttttatttttaagtgtgaatgttaaaggttgcaaaataataaaatgacctctgtggatttgaaatttggaataatatttcttgtccatattgatattacaactcagaggaatttcaccctgttattttatgtgtctttttagtgag

SEQ ID NO: 8392 - DNA, 147 bp, Homo sapiens
ggggggcttaggaggtgtcccctcccgtgtttcggcaccaatgaaaggcaatggaagggcaccatggatcaataaggcggagaggcgagacaaagagggcaaaaatcttctttattgagctctcaggtgaggttcactggtccgcag

SEQ ID NO: 8393 - DNA, 746 bp, Homo sapiens
tgtgttactttttatgcaaacttgttcattgtgttcccagagtggccagtcataagtctgtaagcaacaccttcccttttagtgtcttccatgtcatcaccatctgtaataaataagtaaatgtgtatttattttgtaaaacataatacttggaagtatatatacattgtcaaatgcttaattctaggtagttacctcacatagttaacatttttgtggcaagagcatgtgacattgtcagcatttttcaaaactacaaatacattattttgatctatagtcactatgctgtacaaaacaatctcttgaacttattctattaactataattatgtattttttgatcaacatcttttcaaaccctcctttctcctaaataacttgtgtctggtggccaccactttacttcaataagattaagttttttagaatccctttgtaagtgaaatcatgaaataataatctttgtgcctggctcatttcgacaaatataatgttttcctccaggttaattcgtgtgattgaaaataataaaatttccttctttaaagatgaatagtattccattgtgtgtatataccacattgtctttatttactcattaaatgttgaaaccactgattttatattttggtaattgtgaagagtgttgtaaaaaacaggcacatgtttcttcattctgatttcgtttgttttggatgtataaccaataataaaattgctgtatttggtggtttaattttaaa

SEQ ID NO: 8394 - DNA, 19371 bp, Homo sapiens
taatccgggccttctgattctttttaattatttgtattaattttaattttattttatttttaaagagatggagtttcgctatgttgcccagggtggtctggaactctcaggctcaggtgatcctcctgcctgggtctcccaaagggctgggatttcaggcgtgcgccgccatgccctgccgcaggctttccgattctgaaccatagagtcaatgaaactgtcctccatcccctccagagatgtttgcctggaccctgttttcctcaggatatcaatgaatagttcatgagtttagtgagcaaaggtcaacctccatcaggcgcatgcgtcccttccttttcccatggaggaagagacgcctcttttccttccgctttgcttgtcttttggccccggcgactcaccatcgtcagtgcgcaaccgttcgctaactgaaatgatggcgactggaacgccagagtctcaagcgcggttcggtcagtccgtgaaggggcttctcacggagaaggtgaccacctgtggtactgacgtaatcgcgctcaccaagcaggtgctgaaaggctcccggagctccgaggtgagctggaagtggactctcccggcctgatagtccggggagtcgcagtctttcgttgctgtgggaaggaggtcgcgttgcatcttgggaattgtaggctgtgaagtacttgctatgagtaggtcttcttcgcggaggcgcgtgttgcattctggggtgtgcagtctctttggttagggacagtgtgtgagggttgggggaagaagcgatgccatgggaacctgtgctttaaaacagctctttgggaggccgaggcgggcggatcacctgaggtcgggagttcgaaactagcctgacaatcatggagaaacccccgtctctactaaaaaataataattaaaaaaatatatagccgagcgtggtggcacatgcctgtaatcccagttacttgggaggctgaggcaggagaattgcttgaacctgggaggcgaattatatatataagtattatatattacgtattatataatatatatacgtatatattatatataatgtgtatgtatatattacatatataatatacatatatattatatataatatatgtaatatatattatatatattttcaactagaggtgtttatagttaaccacctgtaaatattcaacatattcatcataataaacgtacatttatttagcattttatatatgctagacactgttgtcttttatggagtttaattcatgaagtctttagaatgactaattgaaggaagtacttttccttttttttttttttttttgagacggagtctagctctgtcgccaggctggagtgtagtggtgtgatcttggctcactgcaacttccgcctcctgggttcaagtgattctcccgcctcagcctcctgagtagctgggattacaggcacgcaccaccacacctggctatttttgtattcttagtagagatgaggtttcaccatgttggccaggctggtctcgaactcttgacctcatgatctgcctgcatcagccttccaaagtgctgggattacaggcgtgagccaccgctcctggcagcattgcttcttgagcagtctccacatagctattttgtttgattagctgagaatttcatgtgtaaaaaactcattccacagtattcatttaacaaatacttattgggtgtctgctatgtgccaggaactgctctaggtacacggaataaacaaaactaaatccctctacttgggaagtttacattttagtgaagagacagacgataaacaagtgaaacagaaaaaaatcaggtggtggtaaatcctgtgaagcaaaattaatctgggaatagagagtgatgaaagggttaatctttgtttgtttgtttgttttgagacagaggaggagtcccactagctctgtcacccaggctaaagtgcagtggcccgatctcgggctcactgcaacctctgcctcctgggttcaagcgattctcctgcctcagcctcctgagtagctgggattataggcgcctgccaccacacccagctaatttttgtgtttttagtagagatggggtttcaccatgttggccaggctggtctcaaactcctgacctcaagtgatccttcccgctttggccccctaaagtgctgggattacaggcatgagccaccacacccggtcgaaagggttaatcttaaacagatgatcagggaaggggtctctggggagagagcctgtgaggagaaacacactgacatttgcccacagcataatgagtggttatgactcataggcttgtctcttgcatgcctgcgcttctcctcctccatttgagttgtgtgcttagtgagggtccattgtgtttttttctaaacatcatgtgtctgtgggctgggcgcagtggctcatgcctgtaatcctaacactttgggaggccgaggcaggattgcttaagcccaggggttcgagaccagcctgggccacatagtgatatcttgtctctgtaaaaaaaggaaaaaaaaaaagaatgaaaacaattttttaaatgtgtgtatggcacttatgcttacagttgcaactacgtaatttaatgaaataatacgaaaaatgaaatatgagtaccaaaaaagagggttgctattgctatgaaaactaagttgaaaatcagaaacacttgttgaagatgagtagctaagacaaattgttattgagttaattatgaacaagttaatggtaaaagcctaggagaaaaatttatagaaatctaaaaagattctgtagtgaagattgttttacaggtgtattcaagatgttcttccattttaaagaaagcaaaactagaaatctcagatggtatgttatgtgtctggtctgtttatgtaggaaagtgatgcagaatgccaatgaatatatcaaggaaaagccttggctttacattacaacagcccctgccttcaaggcaaccacaactcccattgagtctgttttctaaatgtctcacaaatcctttgtttctttttttcttggctacttctgtgtttcaggccatcctcattccttgcttagagtactgctgtgtcatcctaaccaatctctctgcctcattccccactctagtccacctgcttaccacatttctaaaacagaaaaatggatcatgccatttttctctagaattacacacaaagatgaattctaaaccctaacttttaagtctcagattagaagtcacttcttttagggacctttcctgaacacctacccctgtaatcagttagacactcctgccccactacatgctcccggagcagccaatgcttccccatcagcacttaccataaggtgatgtaagtgcctatgttccctttgtaacccctccagattctgagccccgttatcactcttaaccagagtaagggcatatgttaaacactcaacaaatgtttattaaatgagtaagtgaatgaagtagattgttggaacccttttttttctgccatcggtttgtaagtcaccatctcccatctataggagtttgaagtttacccttaaaagtagccacaggaggaacaggtactctcataattgttggtgggaatgcaaagtggtacagccctaaaggagaggaatttggcaatatgtagcaaaattaaaaccccacagtcacaaatcacagtcctgtgagtccatcccaaacatatgctggcaaaaagatgcaaagataggagatatttgtaacagtaaaagctatgagataagatccaagatttgagaattttttgtaccactacttaccgtggcaaaagactgggaacagcctccaaatccgtcagcagagaactgactgaataatgttatggtcacctgtagagtgtggtactctgcagttgtaaaagagcaatggattcattaggagatagcaattgaataggagattcaatatgtattgctgcagataaccctcagggatctattgcaaagtgaaaacagcaaggtgtaggctgggcacggtggctcatgcttataatcccagcactttgggaggctgaggcaggcaaatcacttgagcccaggagtttgaaaccagcttgggcaacatggcaaaaccccatctctacaaaaaaatacaaaaaactatctgcgcatggtggcatgcacttgtagtcccagctactctggaggctaaggtggaaggatcacctgagtccgggaggttgaggcttcagtgaacagtgatggtgccactgcgctccagcctgggtgacagagtgagaccatgtctcaaaaaaaaaaaaatatatatatatatatagagagagagcgagcgagagagagagagagagagagcaaggtgtaaacaagtacacatagtatgttacattttaagtaggaaagtggtatggaggaaaataaatacatgtgtccattgtttaaaaaggaacaatggaaagaaaaccacaaagctaataaaaatagttatgcatggggctgggtgtaggggctcatgcctgtaatcccagtactttgggaggctgaggcgggtggatcacctgaggatgggagtttgagaccagcctggccaacacagtgaaacctcgtctctactaaaaatataaaaattaggtgagcgtggtggcatgtacctataatcccagctactcaggaggctgctgcaggagaatctcttgaatccaggatgcggaggttgcagtgagccaagatcgcatcactgcactccagcctgggtgacagagtgataccctgtttcaaaaaaatgaaaattaaaaaataaaaaaatagttttgcatatgggggagagaacagggaaagaaagggacagagatggaaaatcctattttattgttttgactttagacatccagaaggggttactaactttaaaactttaaataaagttgccctgtgttggggaagaaatctggcaatcctagttactttgaagtcacgctacccttttcactagagtctccctgacccaagagaacagggaagggccggtaggatacacataacagtagctccttttacttggctgaatttaggtatgccaggagcagggtgcagtattaggccagaaatctctgttggtctctgcttgcctctcagtgctaatgtggtcagctctccttgactgtagaccatccagccaaatccaagctctgcttttctcttttggactcaggacccattaaactcagtaacctcattaaattctgcctgcacatttctcctttcttttcttttcttttttttttttttgagacagagtctcactctgttgccaggctggagtgcaatggtgcgatctcggctcactgcaacctctgcctcccaagttcaagagattctcctgcctcagcctcctgaataactgggattacaggcacgtgccaccacgcctggctaatttttgtaattttggtagaggggttttgccatgttggccaggctggtcttgaactcctgatctcaggtgattgcctgcctcggcctccgaaagtgctgggattacaggtgtgagccaccgcacctggccatctcctttcttttctttttcccagccctgtctggtcatcttttatggggtggttccccattttaagccctgagcttctcctcatggcttccccacaccccccactgtttctcttattccattttttttttctttttttttttttgagacagggtcttgctttgtcgcccaggctggagtacagtggtgagatcttggctcactgcaactttcgcctcctgggttcaagcaattctcccacctcagcctcccaagtagctgggattacaagcgcagccaccatgcccagctaacttgtatttttcggtagagatgcggtttcaccatgttgcccaggctggtcttaaactcctgacctcaagtgatccacccaccttggcctcccgaagtgctgagattacgggcatgagccaccgcacctggccttctcttatttcatttctaaatagctgtattcctctgtccttttcagccccattctaactcttgcatctttactactttcaaacaaccccaaatctcaaatctgcctttaaagaattacgagtcatgttctctcactggacttgtggagccaaagtttttttgcagacttctcttagcacttaatgaatacactgtgccaacagcccagcagttaggaagcacttgatttctcaggcagtggcctttgaaacagatgtcgggtccatgccagaactgccatagtgccaatgaaatgaattttcaacatgaacaaatagaaaattatccttcattacattttgagtgtttgtggttgtatagggtggaggagtgggagaggagagagggtagtagtgtaacagctgcagagagaagattacaggaagtttgggaattttgattattaccattttatttttgtcttccagctgctaggtcaggcagctcgaaacatggtactccaggaagatgccatcttgcactcagaagatgtaagaaacaacttttttttttaatgatttgggtttatgtatatggtttgtgtggccacagggaagtggaaatgttctatttctctctctcttttttatgcagagtttaaggaagatggcaataataacaacacatcttcaataccagtgagtatgccccctccagcaactatttgctgcagaatcattatccctggtctgctttcatggactttgtgcttcagcactttcctgtggaggccagagtgggagtaaaggtgggggtggccaaggatgactttctcgatggcaaagatgcctgagactacagaagaagtgggggtaaaggatgagaatcaggagcagagtccaccctttatgaacctccccatgttaaattgagggctcctcagagagagactataaaccctgtaaaggcagggcccgtgccaggaccatgctagcactgtacttggcacctgtgaggccgttgatcagtatttgatgactgactgtgcccaaggtctcttctgggaagttaagttgggtcctctactagggaatgaagtataacatacctgtatcctacatggtacataggtaagtgtggcacctgctacatataaatcatgtagggaattttgaaatataagaccccctctttctccattataatttgctcttcatcttatttcatgttgttttatattttatgtacttgatattatacttatgtacctcttagaaatatatggttggggctgggcatggtggctcacacctgtaatcccagcactttgggaggccgaggagggcggatcacctgagatcaggggttcaagaccagcctggccaacatggtgaaaccccgtctctactaaagatacaaaaaagtagccgggtgtggtggtgggtgcctgtaatcccagatactcagaaggctgaagcatgagaattgcttgaacctgggaggtggagtttgcagtgagtggagattgcacctctgcactctagccagggtgacaaaagtgaaactctgcctccagaaaaaaaaaaaaagaggctgggcacagtggctcatgcctgtaattccagcactttgggaggctgaggcaggtggatcacctgaggtcaggagttctagattagcctggccaacacggcaaaaccccgtctctactaaaaatacaaaaattagccgggtgtggtggcacacacctgtaatcccagctactcgggaggctgaggcaggagaactgcttgagcccgggagacggaaatggcagtgagctgagatcgggcaccactccactccatcctggcgacagagtgagactctgtctcaaaaaaaaaacaaaaaaacaaaaacaaaagcaaacaaacaaaatatatatatatggttaggaatttcactcttcgatatttaaatagctaatgtttgtcataatcattagtcattctttgggtatctacatattaggtattaggtatgtgaccatttgattccatatacacagactaattttaagccatgcatgtagtctgttgaaccacatttctcactctgggagaatgttactatctgtttgggtttagattccatcttttcagcagctctgcactcagacaggaatccctgttcaatagcacaatcttaggataggatggacagaaatacaggatgtgacataagctgaaatttcttctgcctatatgtattatctggtcataaatgaaacttattagttcacttatgtgtattttcctctttccttttctgatttaggcaagaagctattcagaagaagtaagtaaccccaaaggtagaggagtagggaaccaactgaagcaggctggggggatttatactgctgggtccagaatcaatacaaaaccctggttgacacctgccctcaaattgaaatatgctctgggatactcacttgggatttaaagatacagcatatttcaaaggtgtgcagtaactcaactcactgctattaatagtaaaactttctaaaagttatggggtatagagaccaaccttaaggagtagaaaaccttttacattggtaatattcattaagcagagtaaatgtgcaaaaaccattaaacagccttgttttctaaaatggattaaatttgtcccttgcaacattgtttacattactaattggctttgcaaacctttcttcagagtttaaacacttctgggacacaactggaccaatataaattttgatttacatgcaacagtatttatgcattaaagtacagatagcttgtacaggacaggtgtagtggctggctcatgcctgtaattgcaggactttggaaggctgaggctggaggattgcttgagcccagagtttgagattgccttgtgcagcatagtgagaccctgtctgtaatggaaaaaaaaaatttgtaaatagttgtacaaagatgtctttattattgctcatttcagataaaccctgtctctattctaattcctagtgttgaacagtcatcggatctacaggaccagttgaatcatctgttgaaatagaatgacatgtaagagtgctgtaggactcctttgcctaatgctgaggagtaaataccttacacagctgtcctctgggtttggttttctattttcttctccaaaagttaagttagaaaagttctgtgttagggccgggcgcggtagctcacgcctgtaatcccagcactttgggaggccgaggcgggtggatcacgaggtcaggagttcgagaccagcctggccaagatggtgaaaccccgtctctactaaaaatacaaagaattagctgggcgtggtggcgggcgcctgtaatcccagctactcgggaagctgaggcaagagaatcgcttgaacccaggaggtggaggttgcagtgagccaagatcgcgccactgcactccagcctgggcgacagagtgagattccatctccaaaaaaaaaaaaagaaaaaaaaaagaaaagttctgtgttgatgtacagtttctcctaagaagaagcgaggtggttgaattttggaagcacttcttgaatcggattaacccatgctcttattgaattttttcatctgctctgtttagtttgatattaaagcaaaattaagaggtcttagtttttcctatagaacttttaatatgtcaaaagctatattgtctaaatttcagtacttaagcaaatactgagtagtgttttaaattcagaaatagagcttctattatgaacacatgagaatgatttttttctcttaatcattattaaggaaatattttaatttcatggtcatataatggtgataagtaatacctgattgtttccttttctgttctagtaactcagaggagatacgtgttttatttgtgatagcaaattcctaaatgaacattaggcaagtggtatcattatcaggccagctgcagcctcttgccttgacctgcattcctagaatttctttgttgctgtaattcttgattaagtgaccttgactttcattttgtaattttgctaatcatcagcaaattcacttgcatgacgttactgccaaatatgaaggcagttgaattattatgagtgattgtggcagaggtttgtgccatggtgaaaactttgatgtttgtctgtgttcattggatccatctttttaaatgacattaccatgagtctgttgtcaaacctaaatatctttgtttgaatttaaaatgggactctatattgttgtagttcaggtcttcattgactaagagattgagagaaatctgacataagaaaatattgttttcactgcaggaataaagaggaagtaacagtgaatccaatatagttcatattgttattgtccaatcatcaagttaactaagcattatcagattacgtttatttctcatacatatggatattaacttaaggtaaaaaagctggatgtgaaggatctgaaaaggcattaatttatgtactaattctataaacatgtattaataattgcagtattattaaatacagatggactcaatgtacctttgaaaagaccactaatttagaaaacaaagctaagtgcagtcattacaagaagcaaagaaatacttaagttagaaaaaaattaaaatgaagggatggtctaagttttcttcatgctggaacaaatgttaaagaagcagtgattgcttacaatgtatgtgataaaataatacctttcacaatcaaaattttaatagtaaatataagataaaatttatattaaataatgaaaacgtatttgtactgaatttagtcactagagaacatcgtaacaaaatacatgaaacaaaagtagccagaaatgttagaacaggtggaaatgtatacattatttgatggtttgtttttttatggaaataaacaacatacatagaattaaatggtgatcaaaaacatggaaaaaatacttcactaaataacgtctaagttgtagaggttgtgccggaagataatatttttaaaataacaaatgttcaaatgccataaaagaaaatttgtgtgataataccaaagcagtactataagaaaataagcatgctttaaatccctgtattagggatagagtggaaatatttttgttttttttaaggggtatatagttagaatttagaaagaatggaaatggaaataataaaactaaacaaattagaaaaaaataacaaattagaaaaaataaaaagtattaagtagttcttgtagattaaatgggtaaagtgtcagctcagccagaaaagtacaaattagtaaattcgtaattgaataggcaatacataaaatcaatgagatttgaaaagagttatcagtttgctgcaaaaaatgtgattaatatatgcccagctccttataaagataaaaaattatgaaactgacacttttaacagagaatattccagattggttatgagaaataacccacaaactaagaataaccaattaaaatggcatttgcttgtgaaagctttcatgagacttttccaaactgtcaaagaacatatactcctggccgggtgtggtggctcacgcctgtaatcccaccactttgggaggccgaggcaggcggatcacagagtcaggagttcgagaccagcctggccaacatggtgaaaccccgtctctacttaaaaaatacaaaaattaaccaggcatggtggcacatgcctgtaatcccagctactcaggaggctgagacaggagaattgcttgaacccaggaggcagaggttgcagtgagccgagatcgagccactgcactccagcctgggtggcagagcaagactccatctcaaaaaacaaaacaaaacaaaacaaaaaacccctatactcccaaaatatagaaaatgatcataagacactaattcatttaatgaagtaaacaggattttcattttaaaaataaaattatgtaagaaagatgatgcaagaggatgtaagataatgtaggtgatttttttatgagtatagatgcaaaaatccgaataaaatcttagaaaactgaatagagaaatattttgaataattgttcatgtaactccagaatttcaaagttgatgtaatagttacaaaacacattacattaataagaaataataaaatcttttgtcactataatatataccaaaaaggcatttaaaatacactttctatttcaaaaaaactaaaagaattttttaaaagggtatgttttaaaacccaacataatatttgatgaagaagagtcgtataaaaccccagaatattagagctgtatggggccttaaaagttattaaattctggccccatgttttacagatgaaaaaaacacagccaggaagatgaaatgacttacccaaggtcactgagcttgatggtaggtcttttgactactagtctggctctattacctgttagtttccttatgcatagaaacaagggtgccaccttcattactagtcttcaacataatactaaagagctcttagaaaaggaaaggatcttgaagtagctgaatccaatccatttgcccctgcttctgcatctcaggtgagccatcatccagtcattcatctgcttctgcttccgatatttggggaatcctttacttaggagtgctgatccttttggaaatctccacttcttgaaagatggttctgtgtaattaaccaaaatctgcctttctggataatcctggaattgtcactccagtagcttccaagatagaatgtgtgacggtgtgcacaggcctctgttaaagggtaggggagaaaatttctatgtatgttagttttttatcttaaaaaaattagcttttgtgaggctgggcgtggtggctcacgcctgtaatcccagcactttgggaggccgaggcgggcagatcacgaggtctggagattgagaccgtcctggctaacacagtgaaaccccgtctctactaaaaatacaaaaaattagctgggcgtggtggcgggcgcctgtagtcccagctattcgggaggtgaggcagtagaatggcatgaacccgggaggcggagcttgcagtgagctgagatcctgccactgcactccagcctgggtgacagagcgagactctgtctcaaaaaaataaaaaagcttttgccaatatttaaaatatgacttgatgtgagagtcttaatttcttctacgcagtatacagatatatagcattcctgtcatttagcaggggtgatagtaaaacaaaaaaacaaaaaaccccacaaaacctgtggtgaggcactgaccaatcagaatgattgatggtcacagtctggtccaaaattagcccccacaccagacaccatggaggaaaagtgagagtaactcaatttaagttgacagtggtttgttttattgcagtttatctgtgtgtgaataggtagatttaaggattgttggccaggtgtggtggctcacacctggaatcccagcacttttaggaggcagaggcaggcggatcacttgagatcaggagttcgagacagcctggccaacatggtgaaaccctgtctctactaaaaatacaaattagccaggcatggtagtgcatgcctgtaattccagctacttgggaggctgaggcaggagaatcgcttgaaccggggaggcagaggttgcagtgagccgagattgcgccattgcgctccagcttgggcaacaagagcgaaactctgtctcaaaaaaaaaaaaaaaaaaaaaggattgtcaaatgattcttgtaagtaaaccataaattaaagataacaaaacaagcacaagagaaaaatgatacagccctttccttgacctctcactaatctgcccttttaagataaagatatcattttaactatgagaaggtaactgcttttctaaaggagctcattttatgaagataatattttgaaaactaatatttaggagtgttttcaccattctatgattgcccaaaaactaagtgatacttataaaaacactaagttttatacatatactagttggaaatattccaagctgtagaaatattccaacaaggattatttccatggggttaatttgttaaaaatataaaagacaccacctttctattaatttgtaacaactaattgacatcagagaagatgaaaatttactagctggatatcaaccagatttttgtattattggcaactgagattgaaaaatgaatgaaagagtctacttcatccatttagatatcctttcacttggatctccctgtttccttactgtcctaatgaatagaaatgatcgttacaagctgggcatggtggcttgcacctgtagtcccagctactggggaggctgaggagggaggatggcttgaggccagagttgaaggatccagagatgattgcgcagtgacgctaagcttgggccacagagttgagaccctgtctctaaaaatttttttttaatttaaattataaaaagagaaatgcttgttacaaccacaaagggaaacaagatatacacatataattgtggaagtaaaaataaataatttaaaaatacttttgggtgctcgcttcggcagcacatatagttggaatgatagagaagatttgcatggcccctgcgcaagatgacatacaaattcgtgaagtgttccatatttaaaaaaacaaaaaatacttttgggcctggcactgtggctcatgcctgtaatccaaacactttgggaggctgaggcgggcggattgcttgaacccaggagttggagaccagcctggacaacatggtgaaatcccgtctctataaaaaaatacaaaaattaaccaggtgtggtggtgcacgcctgtaatccaaggtacttgggaggctgaggcgggaggatcgcttgagccaggaggttgggcctgggtaacagagaccgtctcaaaaaaatttaaaaattaaaaaaaaaactttctgcaagatgaagtgacaatacctggaaaatacatgtgacttgaccaaaaattactataggtgaaaataaatttagcaaagttgctttcctaaatacaacccaaaatagactgggaacagctacatactgttaatggttccctctatgtgacattctagaaaaggcagaactatagggagggaaaacatctgtggttgcccaggagctaggggtgggaagagggaatttactacaaagaggcacgaagaaacttgtgggccagagctattttggtctccgttttggtgatgtatatacgtttgccagagttcacagaactgcacactgaagaaagatggatttcacggaatgtgaattatatctcaacaaacttgacttcaaaaaacagatcgagaaaagatgattctattcccaaaaagggggaggggggaagatcattatataggtgagtgttcatttaaatcagagtacgagatttatccgtgaaaatcgcagtggagcgaacaagggggatgctgataccgacctcctggttggaaagcctgtagagcagcgcggatgacagtggaacagcgggtcaggcggtgggcgcctgagcgaggggctagagcgggatgggcgggcggagcaagcctgccagcctgggcggggcctcggcacaggagctggctgcgggagcccgccgtcctgagtcgcaggccgaggagacagtgagtgcgcgccctgagtcgcaggccgaggagacagtgagtgcgcgccctgagtcgcaggccgaggagacagtgagtgcgcgccctgggcgccccgccccagcccccagccccttccttgggcccccgcaaggcgggaacgcgagcgcctcccccgagctgtgtctcgagacctttgtcctcccctcacccctgggcccgctgcctgccctttactggccccctccctcatgcccgtccctcagcaccctctcctttcaactaactttcccgctcccgacagtggctgcacttcgtgacgctgagatacagaaggacgtgcaggtgagagctgtagggcctggaatggcccaagtggagcctaggctaatggaagtctggcctggcccgcaccctgtcccccgggactcctggagtcggggtagggcagggtctaggcttcgacctttccagggaactgaggtcggccaagtggaggtggaggtggtgacggagccctcgcgctgcagtcacagctcttctccctctctacccctcactccactgtgggacgctgggtcagacctactacgggcaggtgctgaagagatcggcagacctccagaccaacggctgtgtcaccacagccaggccggtccccaagcacatccgggaagccttgcaaaatgtacacgaagaagtagccctaaggtagagtgccctgtgctgtccccaggaagaccccaaacagcagttttcccaaaagataatgatgcaggtcactagggaattaacccgtagccaccaacccatcagcttgccttgtctattgtaaaaatcctaaatctcagcacccatcatcttactgctctaagaacctccgatgagtctgggcgcgccagtgagcctgtagtcccaagtgcttgggaggctgaggcagaggatcgcgtgagcccagaagttacaggctgtagtgtgcgatccgggatgtgaatagccactgcactccagcttggtcaacatagccagatgcatctctaaaataaatgcgtactttaaaaaaattgcctaaaaaaaagaacctccagcgtgaacactctgtagtccctacccatgctcacagaatacagtcacactcactggatctgccattcaagatatgcgcagttcagcacccactaatcaaccttggcccttttgacccttcccttcctcactccatcagcactgcctgcccagccggcagtcaccaatttggaaggtcttcccttttctttttccttcccaaccctgcgcatccagcaccacgctgctgtcccacctactgcatggagccttctctaatccttgagcggcctcttccccaaactgccacagcactctgtcactcggtctgtccgtaaatcacgggaagtgttttctgtgcacgatgttttatctcgcctctcaaatacacctacgcggcggggagcggtggctcacgtccgtcatcccagaacttgggaggccaaggcaggtagatcacttgaggtcagaagttcaagaccgacctggtcaacatagtgaaaccctgtctctactgaaaatacaaaaattagctgggtgtagtggggcacgcctgtagtcccagctacttgggaggctgagggaggagaatcacttgaacgtggaaggcggaggtcgcagtgagcggagattgtgccactgcactccagcctgggcaacagagaaaaactcagtcaaaacaaaacaaaacaaaaaaaaggccgggggtggtggcttatgtctgtaatcccagcactttgggaggccgaggcgggaggatcacgaggccaggagatcgagaccatcctggctatcatggtgaaaccccgtctctactaaaaatacaaaaatattatccgggtgtggcggcacgcgcctgtagttccggctgctggggaggctgaggcaggagaacggcgtgaacccgggaggcggagcttgcagtgagctgagttcgagccactgcactccagcctgggtgacagggcaagactccgtctcaaaaaaaaaaaaaaaaaaaaaaaaaaaaaaaattagccaggagtggtggcaggcgctcgtagtcctagctactcgggaggctgaggtaggagaatggtgtcaacccgggaggcggagcttgcggtgagctgagatcgcgccactgcactccagcctgggcgacagagcgagactccgtctcaaacaaaacaaaacaaaacaaaacaaaacaaatcaaaacaaaaaacgcctatgggacagaaaccttacattttttcctcaataactagcgcagtcctgggcctgaattagaagctcagctaatgattaaatgtatttattcaacacattattttattttatttatttatttttgagacggagtctcactctgtcccttaggctggagtgcagtggcgccatctctgctcactgcaacctctgcctcctgggttcaagccattctcctgcctcagcctcccgaggagctgggattacaggtacctgctaccgtgcccagctgattttttggtatttttagtagagacagggtttcactatgttggccaggctggtctccaactccttgcctcaagcgatccgcctgccttgacctcccaaagtgctgtgattataggcgtgagccaccgcgcccagcctgaacacattattttagatggcttatgaagtcttagtgcctagcacatgcccaacaatactgtggtaaagcagatacagtcccagccttcatgggtgtccagttcagtggagactaaacatcagaagtatgagtgaatgatgcaagaaagaaggaaggaaggaaggaacggagggagggagggaggagggaagtatgtataagatttagtggtttcatgtcttacagtctccagggaaaaaatatgtgttttccatttcccagatattatggctgtggtctggtgatccctgagcatctagaaaactgctggattttggatctgggtagtggaagtggcagagattgctatgtacttagccagctggttggtgaaaaaggacacgtgactggaatagacatgaccaaaggccaggtgaggcatgatttggaagacaaggagaaaaagattctcaaaagcattatttgaaaaataaagttgttttcttcgtggctcttcaaggataatttaagaaagcttctagttagcaatgctcatttgtgccactagtgcttcctgtcttggaaactgataacttgaacaattaggggttcttctgggcgaacacaagagtcggaggtttgctctgatatgaatatcgtgacgatagagtggactttgatctttcccttcttgctgccatctatcctgaaagattttgttattgaatgaggagtttattcaagccaaactgcacgggcagcagggagtttatgtcccaggttgtagtatatcctacgtgtccacaggaatcttgtatgtttatccaaaataatctaggggaagtatattctgttagtgataggaaatttttaggaaaaagttgtgtatttttttcaaaatgttatcaaaactatatttttcttactttaggtggaagtggctgaaaagtatcttgactatcacatggaaaaatatggcttccaggcatctaatgtgacttttattcatggctacattgagaagttgggagaggctggaatcaagaatgagagcca

SEQ ID NO: 8395 - DNA, 2563 bp, Homo sapiens
ggtgaaaccccgtctctactaaaaatacaaaaaaaattagccgggcgtggtggcatgcgcctgtaatcccagctactccagaggctgaggcagagaattgcttaaacctggaggggcggaggttgcagtgagccgagatcgcgccactgcactccagctggggtgacagagtgagactccatctcaaaaaaaaaaaaaaagagtgatttactttctttgctttattaaattcttcagcactctgctattctgactcttctgttgttcgaagaaggtgatactttggaaagtagacagatttggcttttgagtattcaatccattaaacatttgaaaaatatgtcactgatattttgaaactcctgagagttcattgataaggaaagctgctggtgagaatcaatatttattttaaaaggcttttatcattctaattcttctaaaacctggtttcctaaatactgattataaaagctatcagaaggcgtggtggctcacgcctgtaatcccagcactttgggaggccgaggcgggcggatcacgaggtcaggagatcgagaccatcctggctaacacggtgaaaccccgtctctactaaaaatacaaaaaattagccgggcgtggtggcgggcgcctgtagtcccagctacttgggaggctgaggcaggagaatggcgtgaacccgggaggcggagcttgcagtgagccaagatcgcgccactgcactccagcctgggcgacagagtgagactccgtctcaaaaaaaaaaaaaaaaaaaaaaaagaaaagttctgtgttgatgtacagtttctcctaagaagaagcgaggtggttgaattttggaagcacttcttgaatcggattaacccatgctcttattgaattttttcatctgctctgtttagtttgatattaaagcaaaattaagaggtcttagtttttcctatagaacttttaatatgtcaaaagctatattgtctaaatttcagtacttaagcaaatactgagtagtgttttaaattcagaaatagagcttctattatgaacacatgagaatgatttttttctcttaatcattattaaggaaatattttaatttcatggtcatataatggtgataagtaatacctgattgtttccttttctgttctagtaactcagaggagatacgtgttttatttgtgatagcaaattcctaaatgaacattaggcaagtggtatcattatcaggccagctgcagcctcttgccttgacctgcattcctagaatttctttgttgctgtaattcttgattaagtgaccttgactttcattttgtaattttgctaatcatcagcaaattcacttgcatgacgttactgccaaatatgaaggcagttgaattattatgagtgattgtggcagaggtttgtgccatggtgaaaactttgatgtttgtctgtgttcattggatccatctttttaaatgacattaccatgagtctgttgtcaaacctaaatatctttgtttgaatttaaaatgggactctatattgttgtagttcaggtcttcattgactaagagattgagagaaatctgacataagaaaatattgttttcactgcaggaataaagaggaagtaacagtgaatccaatatagttcatattgttattgtccaatcatcaagttaactaagcattatcagattacgtttatttctcatacatatggatattaacttaaggtaaaaaagctggatgtgaaggatctgaaaaggcattaatttatgtactaattctataaacatgtattaataattgcagtattattaaatacagatggactcaatgtacctttgaaaagaccactaatttagaaaacaaagctaagtgcagtcattacaagaagcaaagaaatacttaagttagaaaaaaattaaaatgaagggatggtctaagttttcttcatgctggaacaaatgttaaagaagcagtgattgcttacaatgtatgtgataaaataatacctttcacaatcaaaattttaatagtaaatataagataaaatttatattaaataatgaaaacgtatttgtactgaatttagtcactagagaacatcgtaacaaaatacatgaaacaaaagtagccagaaatgttagaacaggtggaaatgtatacattatttgatggtttgtttttttatggaaataaacaacatacatagaattaaatggtgatcaaaaacatggaaaaaatacttcactaaataacgtctaagttgtagaggttgtgccggaagataatatttttaaaataacaaatgttcaaatgccataaaagaaaatttgtgtgataataccaaagcagtactataagaaaataagcatgctttaaatccctgtattagggatagagtggaaatatttttgttttttttaaggggtatatagttagaatttagaaagaatggaaatggaaataataaaactaaacaaattagaaaaaaataacaaattagaaaaaataaaaagtattaagtagttcttgtagattaaatgggtaaagtgtcagctcagcc

SEQ ID NO: 8396 - DNA, 27154 bp, Homo sapiens
ttgagacaaggggccgggcgtggtggctcatgtctgtaatcccagcactttgggaggccaaggtgggccgatcatgaggtcaggagttcaagaccagcctggccaacatggtgaaaccccacctctactaaaaatacaaaaattagccgggcgcgatggtgcgtacctgtagtcccagctacttgggaggctgaggcaggagaatcgcttgaacccgggaggcggaggttgcagtgagccaagatcacacccgtgtactccagcctgggtgacagggcaagactccgtctcaaaataaagtaaataaataataaaaataaataaataaaatgagacaagttatcgctatgttgcccaggctgctgatattgaactcctggcctcaagcaatctttctgcctcggcctcccaaagtgctgggaatacaggcatgagctactgctcccaccctgttctgtatcttaatagtggtggtggttcacagatgtatacgtctgtcacactcatcaaatcgtacactttaaagaatgtggttattgtgcaggccgggcgtggtggctcaacgcctgtaatcccagcactttgggaggccaaggcaggtggatcacctgaggtcaggagttcaagaccagcctagccaacatggtgaaacccatctctactaaaaatacaaaaattagccaggcgtgatagtgggcacctgtaatcccagctactcgggaggctgaggcaggagaatcgcttgaaccagggaggcaaaggttgcagtgagccaagatcgtgccactgcactccagcctgggtgacaaagcaagactccatctcaaaaaataatgttgttattgtacataaattataacataaattcatgcacataaactcaataaagtttattaaggacaaaaagtaaacagtaaatgagattcaacggagacatatgaatctagacacttggaagaggaagtaatgttgatattgaatacaggtaattttgaacaaaattttcaatacaataacattctcacatcttttattaactaaaaaagaaatggagctacttgaaatattttattttttttttgagacagagtctcactctgtcgcctaggctggaatacagtggcatgatctcggctcactgcaacctctgcctcccgggttcaagaaattctcctgcctcagcctccagagtagctgggactacaggtgcccaccaccacgcccggctaatttttgtatttttagtagagacggggttccaccatgttgggcaggctggtctcgaactcctgacctcaggtgatcctcccgcctcaacttcccaaagtgctgggattacaggcgtgagccacggcacctggcctacttgaaatattttacatattaattcacttacaaggtggttaccatcagtttggtattaatacaataaagaggttatcaataaaaattactagtgatgttgagcatttttcacatttatcagccagttgatttttttttttgaattgcctacttgtgccttttgccaatttttctattagattgtttttccttcttcatttgtttacaggcctatctgcctcatcagcctgggagttccacagagacaagaactgtatttcatttctttctctatccccagcctagtacagtgtctggtatttagttcatgaaatgtttgttaaaattgaatggaatgaggccaggtgcagtggctcacgcctgtaatcccaccattttggaaggccaaggctggtggatcattagatgtcaggaatttgagaccagcctggccaacatggtgaaaccctatctctactaaaaatacaaaaattagccgggcctggtggcaagcacctgtaatcccagctacttgggaggctgaggcaggagaatcacttgaactcaggaggcggatgttgcagtgagctgagatcgagccactgcactccagcctgggcaacaaagcgagactccatctcaaaaaaaaaataaaataaaataaaattaaataaaatgagacaagttatcgctatgttgcccaggctgctgatactgaactcctggccttgagtgacccttctgcctcggcctcccaaagtgctgggactacaggtgtgtcaccatatggataggttggccttgaactcctgacctcaagtgatccaccttggcctttcaaagtgttgggattacaggcgtgagccaccacgcctggccccttgtctcaattaatcaaaaaaaggcctaggcaacagaacaagactctggggaaaaaaaaatatatatgtatatatatatgtgtatatatatgtatatatatgtatatatgtgtatatatgtgtatatatatgtgtatatatatatatgtgtatatatatatgaatggaatgatattctcataaccccttggaaacattattacttctgtttaacagatgaggaatataagacagaagctgagtaatttgcagccacacactgctaaatggtagcattgggactgtaatccgggccttctgattctttttaattatttgtattaattttaattttattttatttttaaagagatggagtttcgctatgttgcccagggtggtctggaactctcaggctcaggtgatcctcctgcctgggtctcccaaagggctgggatttcaggcgtgcgccgccatgccctgccgcaggctttccgattctgaaccatagagtcaatgaaactgtcctccatcccctccagagatgtttgcctggaccctgttttcctcaggatatcaatgaatagttcatgagtttagtgagcaaaggtcaacctccatcaggcgcatgcgtcccttccttttcccatggaggaagagacgcctcttttccttccgctttgcttgtcttttggccccggcgactcaccatcgtcagtgcgcaaccgttcgctaactgaaatgatggcgactggaacgccagagtctcaagcgcggttcggtcagtccgtgaaggggcttctcacggagaaggtgaccacctgtggtactgacgtaatcgcgctcaccaagcaggtgctgaaaggctcccggagctccgaggtgagctggaagtggactctcccggcctgatagtccggggagtcgcagtctttcgttgctgtgggaaggaggtcgcgttgcatcttgggaattgtaggctgtgaagtacttgctatgagtaggtcttcttcgcggaggcgcgtgttgcattctggggtgtgcagtctctttggttagggacagtgtgtgagggttgggggaagaagcgatgccatgggaacctgtgctttaaaacagctctttgggaggccgaggcgggcggatcacctgaggtcgggagttcgaaactagcctgacaatcatggagaaacccccgtctctactaaaaaataataattaaaaaaatatatagccgagcgtggtggcacatgcctgtaatcccagttacttgggaggctgaggcaggagaattgcttgaacctgggaggcgaattatatatataagtattatatattacgtattatataatatatatacgtatatattatatataatgtgtatgtatatattacatatataatatacatatatattatatataatatatgtaatatatattatatatattttcaactagaggtgtttatagttaaccacctgtaaatattcaacatattcatcataataaacgtacatttatttagcattttatatatgctagacactgttgtcttttatggagtttaattcatgaagtctttagaatgactaattgaaggaagtacttttccttttttttttttttttttgagacggagtctagctctgtcgccaggctggagtgtagtggtgtgatcttggctcactgcaacttccgcctcctgggttcaagtgattctcccgcctcagcctcctgagtagctgggattacaggcacgcaccaccacacctggctatttttgtattcttagtagagatgaggtttcaccatgttggccaggctggtctcgaactcttgacctcatgatctgcctgcatcagccttccaaagtgctgggattacaggcgtgagccaccgctcctggcagcattgcttcttgagcagtctccacatagctattttgtttgattagctgagaatttcatgtgtaaaaaactcattccacagtattcatttaacaaatacttattgggtgtctgctatgtgccaggaactgctctaggtacacggaataaacaaaactaaatccctctacttgggaagtttacattttagtgaagagacagacgataaacaagtgaaacagaaaaaaatcaggtggtggtaaatcctgtgaagcaaaattaatctgggaatagagagtgatgaaagggttaatctttgtttgtttgtttgttttgagacagaggaggagtcccactagctctgtcacccaggctaaagtgcagtggcccgatctcgggctcactgcaacctctgcctcctgggttcaagcgattctcctgcctcagcctcctgagtagctgggattataggcgcctgccaccacacccagctaatttttgtgtttttagtagagatggggtttcaccatgttggccaggctggtctcaaactcctgacctcaagtgatccttcccgctttggccccctaaagtgctgggattacaggcatgagccaccacacccggtcgaaagggttaatcttaaacagatgatcagggaaggggtctctggggagagagcctgtgaggagaaacacactgacatttgcccacagcataatgagtggttatgactcataggcttgtctcttgcatgcctgcgcttctcctcctccatttgagttgtgtgcttagtgagggtccattgtgtttttttctaaacatcatgtgtctgtgggctgggcgcagtggctcatgcctgtaatcctaacactttgggaggccgaggcaggattgcttaagcccaggggttcgagaccagcctgggccacatagtgatatcttgtctctgtaaaaaaaggaaaaaaaaaaagaatgaaaacaattttttaaatgtgtgtatggcacttatgcttacagttgcaactacgtaatttaatgaaataatacgaaaaatgaaatatgagtaccaaaaaagagggttgctattgctatgaaaactaagttgaaaatcagaaacacttgttgaagatgagtagctaagacaaattgttattgagttaattatgaacaagttaatggtaaaagcctaggagaaaaatttatagaaatctaaaaagattctgtagtgaagattgttttacaggtgtattcaagatgttcttccattttaaagaaagcaaaactagaaatctcagatggtatgttatgtgtctggtctgtttatgtaggaaagtgatgcagaatgccaatgaatatatcaaggaaaagccttggctttacattacaacagcccctgccttcaaggcaaccacaactcccattgagtctgttttctaaatgtctcacaaatcctttgtttctttttttcttggctacttctgtgtttcaggccatcctcattccttgcttagagtactgctgtgtcatcctaaccaatctctctgcctcattccccactctagtccacctgcttaccacatttctaaaacagaaaaatggatcatgccatttttctctagaattacacacaaagatgaattctaaaccctaacttttaagtctcagattagaagtcacttcttttagggacctttcctgaacacctacccctgtaatcagttagacactcctgccccactacatgctcccggagcagccaatgcttccccatcagcacttaccataaggtgatgtaagtgcctatgttccctttgtaacccctccagattctgagccccgttatcactcttaaccagagtaagggcatatgttaaacactcaacaaatgtttattaaatgagtaagtgaatgaagtagattgttggaacccttttttttctgccatcggtttgtaagtcaccatctcccatctataggagtttgaagtttacccttaaaagtagccacaggaggaacaggtactctcataattgttggtgggaatgcaaagtggtacagccctaaaggagaggaatttggcaatatgtagcaaaattaaaaccccacagtcacaaatcacagtcctgtgagtccatcccaaacatatgctggcaaaaagatgcaaagataggagatatttgtaacagtaaaagctatgagataagatccaagatttgagaattttttgtaccactacttaccgtggcaaaagactgggaacagcctccaaatccgtcagcagagaactgactgaataatgttatggtcacctgtagagtgtggtactctgcagttgtaaaagagcaatggattcattaggagatagcaattgaataggagattcaatatgtattgctgcagataaccctcagggatctattgcaaagtgaaaacagcaaggtgtaggctgggcacggtggctcatgcttataatcccagcactttgggaggctgaggcaggcaaatcacttgagcccaggagtttgaaaccagcttgggcaacatggcaaaaccccatctctacaaaaaaatacaaaaaactatctgcgcatggtggcatgcacttgtagtcccagctactctggaggctaaggtggaaggatcacctgagtccgggaggttgaggcttcagtgaacagtgatggtgccactgcgctccagcctgggtgacagagtgagaccatgtctcaaaaaaaaaaaaatatatatatatatagagagagagagcgagcgagagagagagagagagagagcaaggtgtaaacaagtacacatagtatgttacattttaagtaggaaagtggtatggaggaaaataaatacatgtgtccattgtttaaaaaggaacaatggaaagaaaaccacaaagctaataaaaatagttatgcatggggctgggtgtaggggctcatgcctgtaatcccagtactttgggaggctgaggcgggtggatcacctgaggatgggagtttgagaccagcctggccaacacagtgaaacctcgtctctactaaaaatataaaaattaggtgagcgtggtggcatgtacctataatcccagctactcaggaggctgctgcaggagaatctcttgaatccaggatgcggaggttgcagtgagccaagatcgcatcactgcactccagcctgggtgacagagtgataccctgtttcaaaaaaatgaaaattaaaaaataaaaaaatagttttgcatatgggggagagaacagggaaagaaagggacagagatggaaaatcctattttattgttttgactttagacatccagaaggggttactaactttaaaactttaaataaagttgccctgtgttggggaagaaatctggcaatcctagttactttgaagtcacgctacccttttcactagagtctccctgacccaagagaacagggaagggccggtaggatacacataacagtagctccttttacttggctgaatttaggtatgccaggagcagggtgcagtattaggccagaaatctctgttggtctctgcttgcctctcagtgctaatgtggtcagctctccttgactgtagaccatccagccaaatccaagctctgcttttctcttttggactcaggacccattaaactcagtaacctcattaaattctgcctgcacatttctcctttcttttcttttcttttttttttttttgagacagagtctcactctgttgccaggctggagtgcaatggtgcgatctcggctcactgcaacctctgcctcccaagttcaagagattctcctgcctcagcctcctgaataactgggattacaggcacgtgccaccacgcctggctaatttttgtaattttggtagaggggttttgccatgttggccaggctggtcttgaactcctgatctcaggtgattgcctgcctcggcctccgaaagtgctgggattacaggtgtgagccaccgcacctggccatctcctttcttttctttttcccagccctgtctggtcatcttttatggggtggttccccattttaagccctgagcttctcctcatggcttccccacaccccccactgtttctcttattccattttttttttctttttttttttttgagacagggtcttgctttgtcgcccaggctggagtacagtggtgagatcttggctcactgcaactttcgcctcctgggttcaagcaattctcccacctcagcctcccaagtagctgggattacaagcgcagccaccatgcccagctaacttgtatttttcggtagagatgcggtttcaccatgttgcccaggctggtcttaaactcctgacctcaagtgatccacccaccttggcctcccgaagtgctgagattacgggcatgagccaccgcacctggccttctcttatttcatttctaaatagctgtattcctctgtccttttcagccccattctaactcttgcatctttactactttcaaacaaccccaaatctcaaatctgcctttaaagaattacgagtcatgttctctcactggacttgtggagccaaagtttttttgcagacttctcttagcacttaatgaatacactgtgccaacagcccagcagttaggaagcacttgatttctcaggcagtggcctttgaaacagatgtcgggtccatgccagaactgccatagtgccaatgaaatgaattttcaacatgaacaaatagaaaattatccttcattacattttgagtgtttgtggttgtatagggtggaggagtgggagaggagagagggtagtagtgtaacagctgcagagagaagattacaggaagtttgggaattttgattattaccattttatttttgtcttccagctgctaggtcaggcagctcgaaacatggtactccaggaagatgccatcttgcactcagaagatgtaagaaacaacttttttttttaatgatttgggtttatgtatatggtttgtgtggccacagggaagtggaaatgttctatttctctctctcttttttatgcagagtttaaggaagatggcaataataacaacacatcttcaataccagtgagtatgccccctccagcaactatttgctgcagaatcattatccctggtctgctttcatggactttgtgcttcagcactttcctgtggaggccagagtgggagtaaaggtgggggtggccaaggatgactttctcgatggcaaagatgcctgagactacagaagaagtgggggtaaaggatgagaatcaggagcagagtccaccctttatgaacctccccatgttaaattgagggctcctcagagagagactataaaccctgtaaaggcagggcccgtgccaggaccatgctagcactgtacttggcacctgtgaggccgttgatcagtatttgatgactgactgtgcccaaggtctcttctgggaagttaagttgggtcctctactagggaatgaagtataacatacctgtatcctacatggtacataggtaagtgtggcacctgctacatataaatcatgtagggaattttgaaatataagaccccctctttctccattataatttgctcttcatcttatttcatgttgttttatattttatgtacttgatattatacttatgtacctcttagaaatatatggttggggctgggcatggtggctcacacctgtaatcccagcactttgggaggccgaggagggcggatcacctgagatcaggggttcaagaccagcctggccaacatggtgaaaccccgtctctactaaagatacaaaaaagtagccgggtgtggtggtgggtgcctgtaatcccagatactcagaaggctgaagcatgagaattgcttgaacctgggaggtggagtttgcagtgagtggagattgcacctctgcactctagccagggtgacaaaagtgaaactctgcctccagaaaaaaaaaaaaagaggctgggcacagtggctcatgcctgtaattccagcactttgggaggctgaggcaggtggatcacctgaggtcaggagttctagattagcctggccaacacggcaaaaccccgtctctactaaaaatacaaaaattagccgggtgtggtggcacacacctgtaatcccagctactcgggaggctgaggcaggagaactgcttgagcccgggagacggaaatggcagtgagctgagatcgggcaccactccactgcatcctggcgacagagtgagactctgtctcaaaaaaaaaacaaaaaaacaaaaacaaaagcaaacaaacaaaatatatatatatggttaggaatttcactcttcgatatttaaatagctaatgtttgtcataatcattagtcattctttgggtatctacatattaggtattaggtatgtgaccatttgattccatatacacagactaattttaagccatgcatgtagtctgttgaaccacatttctcactctgggagaatgttactatctgtttgggtttagattccatcttttcagcagctctgcactcagacaggaatccctgttcaatagcacaatcttaggataggatggacagaaatacaggatgtgacataagctgaaatttcttctgcctatatgtattatctggtcataaatgaaacttattagttcacttatgtgtattttcctctttccttttctgatttaggcaagaagctattcagaagaagtaagtaaccccaaaggtagaggagtagggaaccaactgaagcaggctggggggatttatactgctgggtccagaatcaatacaaaaccctggttgacacctgccctcaaattgaaatatgctctgggatactcacttgggatttaaagatacagcatatttcaaaggtgtgcagtaactcaactcactgctattaatagtaaaactttctaaaagttatggggtatagagaccaaccttaaggagtagaaaaccttttacattggtaatattcattaagcagagtaaatgtgcaaaaaccattaaacagccttgttttctaaaatggattaaatttgtcccttgcaacattgtttacattactaattggctttgcaaacctttcttcagagtttaaacacttctgggacacaactggaccaatataaattttgatttacatgcaacagtatttatgcattaaagtacagatagcttgtacaggacaggtgtagtggctggctcatgcctgtaattgcaggactttggaaggctgaggctggaggattgcttgagcccagagtttgagattgccttgtgcagcatagtgagaccctgtctgtaatggaaaaaaaaaatttgtaaatagttgtacaaagatgtctttattattgctcatttcagataaaccctgtctctattctaattcctagtgttgaacagtcatcggatctacaggaccagttgaatcatctgttgaaatagaatgacatgtaagagtgctgtaggactcctttgcctaatgctgaggagtaaataccttacacagctgtcctctgggtttggttttctattttcttctccaaaagttaagttagaaaagttctgtgttagggccgggcgcggtagctcacgcctgtaatcccagcactttgggaggccgaggcgggtggatcacgaggtcaggagttcgagaccagcctggccaagatggtgaaaccccgtctctactaaaaatacaaagaattagctgggcgtggtggcgggcgcctgtaatcccagctactcgggaagctgaggcaagagaatcgcttgaacccaggaggtggaggttgcagtgagccaagatcgcgccactgcactccagcctgggcgacagagtgagattccatctccaaaaaaaaaaaaagaaaaaaaaaagaaaagttctgtgttgatgtacagtttctcctaagaagaagcgaggtggttgaattttggaagcacttcttgaatcggattaacccatgctcttattgaattttttcatctgctctgtttagtttgatattaaagcaaaattaagaggtcttagtttttcctatagaacttttaatatgtcaaaagctatattgtctaaatttcagtacttaagcaaatactgagtagtgttttaaattcagaaatagagcttctattatgaacacatgagaatgatttttttctcttaatcattattaaggaaatattttaatttcatggtcatataatggtgataagtaatacctgattgtttccttttctgttctagtaactcagaggagatacgtgttttatttgtgatagcaaattcctaaatgaacattaggcaagtggtatcattatcaggccagctgcagcctcttgccttgacctgcattcctagaatttctttgttgctgtaattcttgattaagtgaccttgactttcattttgtaattttgctaatcatcagcaaattcacttgcatgacgttactgccaaatatgaaggcagttgaattattatgagtgattgtggcagaggtttgtgccatggtgaaaactttgatgtttgtctgtgttcattggatccatctttttaaatgacattaccatgagtctgttgtcaaacctaaatatctttgtttgaatttaaaatgggactctatattgttgtagttcaggtcttcattgactaagagattgagagaaatctgacataagaaaatattgttttcactgcaggaataaagaggaagtaacagtgaatccaatatagttcatattgttattgtccaatcatcaagttaactaagcattatcagattacgtttatttctcatacatatggatattaacttaaggtaaaaaagctggatgtgaaggatctgaaaaggcattaatttatgtactaattctataaacatgtattaataattgcagtattattaaatacagatggactcaatgtacctttgaaaagaccactaatttagaaaacaaagctaagtgcagtcattacaagaagcaaagaaatacttaagttagaaaaaaattaaaatgaagggatggtctaagttttcttcatgctggaacaaatgttaaagaagcagtgattgcttacaatgtatgtgataaaataatacctttcacaatcaaaattttaatagtaaatataagataaaatttatattaaataatgaaaacgtatttgtactgaatttagtcactagagaacatcgtaacaaaatacatgaaacaaaagtagccagaaatgttagaacaggtggaaatgtatacattatttgatggtttgtttttttatggaaataaacaacatacatagaattaaatggtgatcaaaaacatggaaaaaatacttcactaaataacgtctaagttgtagaggttgtgccggaagataatatttttaaaataacaaatgttcaaatgccataaaagaaaatttgtgtgataataccaaagcagtactataagaaaataagcatgctttaaatccctgtattagggatagagtggaaatatttttgttttttttaaggggtatatagttagaatttagaaagaatggaaatggaaataataaaactaaacaaattagaaaaaaataacaaattagaaaaaataaaaagtattaagtagttcttgtagattaaatgggtaaagtgtcagctcagccagaaaagtacaaattagtaaattcgtaattgaataggcaatacataaaatcaatgagatttgaaaagagttatcagtttgctgcaaaaaatgtgattaatatatgcccagctccttataaagataaaaaattatgaaactgacacttttaacagagaatattccagattggttatgagaaataacccacaaactaagaataaccaattaaaatggcatttgcttgtgaaagctttcatgagacttttccaaactgtcaaagaacatatactcctggccgggtgtggtggctcacgcctgtaatcccaccactttgggaggccgaggcaggcggatcacagagtcaggagttcgagaccagcctggccaacatggtgaaaccccgtctctacttaaaaaatacaaaaattaaccaggcatggtggcacatgcctgtaatcccagctactcaggaggctgagacaggagaattgcttgaacccaggaggcagaggttgcagtgagccgagatcgagccactgcactccagcctgggtggcagagcaagactccatctcaaaaaacaaaacaaaacaaaacaaaaaacccctatactcccaaaatatagaaaatgatcataagacactaattcatttaatgaagtaaacaggattttcattttaaaaataaaattatgtaagaaagatgatgcaagaggatgtaagataatgtaggtgatttttttatgagtatagatgcaaaaatccgaataaaatcttagaaaactgaatagagaaatattttgaataattgttcatgtaactccagaatttcaaagttgatgtaatagttacaaaacacattacattaataagaaataataaaatcttttgtcactataatatataccaaaaaggcatttaaaatacactttctatttcaaaaaaactaaaagaattttttaaaagggtatgttttaaaacccaacataatatttgatgaagaagagtcgtataaaaccccagaatattagagctgtatggggccttaaaagttattaaattctggccccatgttttacagatgaaaaaaacacagccaggaagatgaaatgacttacccaaggtcactgagcttgatggtaggtcttttgactactagtctggctctattacctgttagtttccttatgcatagaaacaagggtgccaccttcattactagtcttcaacataatactaaagagctcttagaaaaggaaaggatcttgaagtagctgaatccaatccatttgcccctgcttctgcatctcaggtgagccatcatccagtcattcatctgcttctgcttccgatatttggggaatcctttacttaggagtgctgatccttttggaaatctccacttcttgaaagatggttctgtgtaattaaccaaaatctgcctttctggataatcctggaattgtcactccagtagcttccaagatagaatgtgtgacggtgtgcacaggcctctgttaaagggtaggggagaaaatttctatgtatgttagttttttatcttaaaaaaattagcttttgtgaggctgggcgtggtggctcacgcctgtaatcccagcactttgggaggccgaggcgggcagatcacgaggtctggagattgagaccgtcctggctaacacagtgaaaccccgtctctactaaaaatacaaaaaattagctgggcgtggtggcgggcgcctgtagtcccagctattcgggaggtgaggcagtagaatggcatgaacccgggaggcggagcttgcagtgagctgagatcctgccactgcactccagcctgggtgacagagcgagactctgtctcaaaaaaataaaaaagcttttgccaatatttaaaatatgacttgatgtgagagtcttaatttcttctacgcagtatacagatatatagcattcctgtcatttagcaggggtgatagtaaaacaaaaaaacaaaaaaccccacaaaacctgtggtgaggcactgaccaatcagaatgattgatggtcacagtctggtccaaaattagcccccacaccagacaccatggaggaaaagtgagagtaactcaatttaagttgacagtggtttgttttattgcagtttatctgtgtgtgaataggtagatttaaggattgttggccaggtgtggtggctcacacctggaatcccagcacttttaggaggcagaggcaggcggatcacttgagatcaggagttcgagacagcctggccaacatggtgaaaccctgtctctactaaaaatacaaattagccaggcatggtagtgcatgcctgtaattccagctacttgggaggctgaggcaggagaatcgcttgaaccggggaggcagaggttgcagtgagccgagattgcgccattgcgctccagcttgggcaacaagagcgaaactctgtctcaaaaaaaaaaaaaaaaaaaaaaggattgtcaaatgattcttgtaagtaaaccataaattaaagataacaaaacaagcacaagagaaaaatgatacagccctttccttgacctctcactaatctgcccttttaagataaagatatcattttaactatgagaaggtaactgcttttctaaaggagctcattttatgaagataatattttgaaaactaatatttaggagtgttttcaccattctatgattgcccaaaaactaagtgatacttataaaaacactaagttttatacatatactagttggaaatattccaagctgtagaaatattccaacaaggattatttccatggggttaatttgttaaaaatataaaagacaccacctttctattaatttgtaacaactaattgacatcagagaagatgaaaatttactagctggatatcaaccagatttttgtattattggcaactgagattgaaaaatgaatgaaagagtctacttcatccatttagatatcctttcacttggatctccctgtttccttactgtcctaatgaatagaaatgatcgttacaagctgggcatggtggcttgcacctgtagtcccagctactggggaggctgaggagggaggatggcttgaggccagagttgaaggatccagagatgattgcgcagtgacgctaagcttgggccacagagttgagaccctgtctctaaaaatttttttttaatttaaattataaaaagagaaatgcttgttacaaccacaaagggaaacaagatatacacatataattgtggaagtaaaaataaataatttaaaaatacttttgggtgctcgcttcggcagcacatatagttggaatgatagagaagatttgcatggcccctgcgcaagatgacatacaaattcgtgaagtgttccatatttaaaaaaacaaaaaatacttttgggcctggcactgtggctcatgcctgtaatccaaacactttgggaggctgaggcgggcggattgcttgaacccaggagttggagaccagcctggacaacatggtgaaatcccgtctctataaaaaaatacaaaaattaaccaggtgtggtggtgcacgcctgtaatccaaggtacttgggaggctgaggcgggaggatcgcttgagccaggaggttgggcctgggtaacagagaccgtctcaaaaaaatttaaaaattaaaaaaaaaactttctgcaagatgaagtgacaatacctggaaaatacatgtgacttgaccaaaaattactataggtgaaaataaatttagcaaagttgctttcctaaatacaacccaaaatagactgggaacagctacatactgttaatggttccctctatgtgacattctagaaaaggcagaactatagggagggaaaacatctgtggttgcccaggagctaggggtgggaagagggaatttactacaaagaggcacgaagaaacttgtgggccagagctattttggtctccgttttggtgatgtatatacgtttgccagagttcacagaactgcacactgaagaaagatggatttcacggaatgtgaattatatctcaacaaacttgacttcaaaaaacagatcgagaaaagatgattctattcccaaaaagggggaggggggaagatcattatataggtgagtgttcatttaaatcagagtacgagatttatccgtgaaaatcgcagtggagcgaacaagggggatgctgataccgacctcctggttggaaagcctgtagagcagcgcggatgacagtggaacagcgggtcaggcggtgggcgcctgagcgaggggctagagcgggatgggcgggcggagcaagcctgccagcctgggcggggcctcggcacaggagctggctgcgggagcccgccgtcctgagtcgcaggccgaggagacagtgagtgcgcgccctgagtcgcaggccgaggagacagtgagtgcgcgccctgagtcgcaggccgaggagacagtgagtgcgcgccctgggcgccccgccccagcccccagccccttccctgggcccccgcaaggcgggaacgcgagcgcctcccccgagctgtgtctcgagacctttgtcctcccctcacccctcggcccgctgcctgccctttactggccccctccctcatgcccgtccctcagcaccctctcctttcaactaactttcccgctcccgacagtggctgcacttcgtgacgctgagatacagaaggacgtgcaggtgagagctgtagggcctggaatggcccaagtggagcctaggctaatggaagtctggcctggcccgcaccctgtcccccgggactcctggagtcggggtagggcagggtctaggcttcgacctttccagggaactgaggtcggccaagtggaggtggaggtggtgacggagccctcgcgctgcagtcacagctcttctccctctctacccctcactccactgtgggacgctgggtcagacctactacgggcaggtgctgaagagatcggcagacctccagaccaacggctgtgtcaccacagccaggccggtccccaagcacatccgggaagccttgcaaaatgtacacgaagaagtagccctaaggtagagtgccctgtgctgtccccaggaagaccccaaacagcagttttcccaaaagataatgatgcaggtcactagggaattaacccgtagccaccaacccatcagcttgccttgtctattgtaaaaatcctaaatctcagcacccatcatcttactgctctaagaacctccgatgagtctgggcgcgccagtgagcctgtagtcccaagtgcttgggaggctgaggcagaggatcgcgtgagcccagaagttacaggctgtagtgtgcgatccgggatgtgaatagccactgcactccagcttggtcaacatagccagatgcatctctaaaataaatgcgtactttaaaaaaattgcctaaaaaaaagaacctccagcgtgaacactctgtagtccctacccatgctcacagaatacagtcacactcactggatctgccattcaagatatgcgcagttcagcacccactaatcaaccttggcccttttgacccttcccttcctcactccatcagcactgcctgcccagccggcagtcaccaatttggaaggtcttcccttttctttttccttcccaaccctgcgcatccagcaccacgctgctgtcccacctactgcatggagccttctctaatccttgagcggcctcttccccaaactgccacagcactctgtcactcggtctgtccgtaaatcacgggaagtgttttctgtgcacgatgttttatctcgcctctcaaatacacctacgcggcggggagcggtggctcacgtccgtcatcccagaacttgggaggccaaggcaggtagatcacttgaggtcagaagttcaagaccgacctggtcaacatagtgaaaccctgtctctactgaaaatacaaaaattagctgggtgtagtggggcacgcctgtagtcccagctacttgggaggctgagggaggagaatcacttgaacgtggaaggcggaggtcgcagtgagcggagattgtgccactgcactccagcctgggcaacagagaaaaactcagtcaaaacaaaacaaaacaaaaaaaaggccgggggtggtggcttatgtctgtaatcccagcactttgggaggccgaggcgggaggatcacgaggccaggagatcgagaccatcctggctatcatggtgaaaccccgtctctactaaaaatacaaaaatattatccgggtgtggcggcacgcgcctgtagttccggctgctggggaggctgaggcaggagaacggcgtgaacccgggaggcggagcttgcagtgagctgagttcgagccactgcactccagcctgggtgacagggcaagactccgtctcaaaaaaaaaaaaaaaaaaaaaaaaaaaaaaaattagccaggagtggtggcaggcgctcgtagtcctagctactcgggaggctgaggtaggagaatggtgtcaacccgggaggcggagcttgcggtgagctgagatcgcgccactgcactccagcctgggcgacagagcgagactccgtctcaaacaaaacaaaacaaaacaaaacaaaacaaatcaaaacaaaaaacgcctatgggacagaaaccttacattttttcctcaataactagcgcagtcctgggcctgaattagaagctcagctaatgattaaatgtatttattcaacacattattttattttatttatttatttttgagacggagtctcactctgtcccttaggctggagtgcagtggcgccatctctgctcactgcaacctctgcctcctgggttcaagccattctcctgcctcagcctcccgaggagctgggattacaggtacctgctaccgtgcccagctgattttttggtatttttagtagagacagggtttcactatgttggccaggctggtctccaactccttgcctcaagcgatccgcctgccttgacctcccaaagtgctgtgattataggcgtgagccaccgcgcccagcctgaacacattattttagatggcttatgaagtcttagtgcctagcacatgcccaacaatactgtggtaaagcagatacagtcccagccttcatgggtgtccagttcagtggagactaaacatcagaagtatgagtgaatgatgcaagaaagaaggaaggaaggaaggaacggagggagggagggaggagggaagtatgtataagatttagtggtttcatgtcttacagtctccagggaaaaaatatgtgttttccatttcccagatattatggctgtggtctggtgatccctgagcatctagaaaactgctggattttggatctgggtagtggaagtggcagagattgctatgtacttagccagctggttggtgaaaaaggacacgtgactggaatagacatgaccaaaggccaggtgaggcatgatttggaagacaaggagaaaaagattctcaaaagcattatttgaaaaataaagttgttttcttcgtggctcttcaaggataatttaagaaagcttctagttagcaatgctcatttgtgccactagtgcttcctgtcttggaaactgataacttgaacaattaggggttcttctgggcgaacacaagagtcggaggtttgctctgatatgaatatcgtgacgatagagtggactttgatctttcccttcttgctgccatctatcctgaaagattttgttattgaatgaggagtttattcaagccaaactgcacgggcagcagggagtttatgtcccaggttgtagtatatcctacgtgtccacaggaatcttgtatgtttatccaaaataatctaggggaagtatattctgttagtgataggaaatttttaggaaaaagttgtgtatttttttcaaaatgttatcaaaactatatttttcttactttaggtggaagtggctgaaaagtatcttgactatcacatggaaaaatatggcttccaggcatctaatgtgacttttattcatggctacattgagaagttgggagaggctggaatcaagaatgagagccatgatattgttgtgtaggtctatattcttactgttatgactatagcccattttctttattattattattattattattgagatggactctcgctctgtcacccaggccagagtgcagtggcccaatgtcagctcacgataacctctgcctcccgggttcaactgattctcttgcctcagcctctcaagtagctgggattataggcacacgctaccacatccagctaattttttaaatcttcttttagtagagacagggtttcaccatgttggccaggctggtctcaaactcctgatctcaggtgatccacccgcttccacctcccaaagtgctgggattacaggtgtgaggcactgtgctcagccctcatttccttttgaacacagagatgtcactattactgtttgctgaattgactctcatttagggtgttaaactaaacttagcatggcttactaatgggagagagctggtttgagctgctggagctcaccagcagcagaacacaccagaccaagagggaacttacttgaaacttaaccacaaaccaatgaacccaaaagaccagcaggaccactaagtttgctcctacaatacatgctgacctgtatctttcataatattttcatggtaaattataggattctatttccttttttccctcaagttgttattgtcaaatcatgcccaagtgacagctgcctttgaggaacatagcctgtttacgtgaagcataagaaatgccttgtgccggccaggtgcggtggctcacgcctataatcccagcattttgggaggccgaggcaggtggatcacgaggtcaggaattccagaccagcttgaacaacatggcgaaaccccgtctctactaaaaatacaaaaattagctgggtgtggtggcacatgcctgtaatcccagctatttaggaggctgaggcaggagaatcacttgaacccgggaggcggaggttgcaatgagccgagattgcgccattgtactccagcctgggcaacaggagtgaaacatcctctcgggaaaaaaaaaaaaagaaagaaatgccttgtgcagtaggcatctggtctgaggtttcatcttgttacatggtgaacatcaggacagaaacaagtaagaatcatgcctgatgttattttctgcacattcaaacttgctaacaatttattgagattttaagcactctgtctctgatcttggggaaaagcttagttgaaggcattagaaagagaggagggaggcggtaagaatggggtagctttgacagaacggtgggaaccacctttagggtctgaaaggatttgcagatctctgagtgttgtgaagatttgctcgacatttcatctgttctcttttagatcaaactgtgttattaaccttgtgcctgataaacaacaagtgcttcaggaggcatatcgggtgctgaaggtgaggaggagagtgagataaattatctttgaacatcagtaagagctgatgggttaagtcttgtttgttcccccttgaactaagagctcaaactctcttaatttatccattaaatgaataaggggtggcaaaagggggaaggggcaggaataccccggatatggattactttccctcttaggttgcaaaaggtagtaaatccgaggtgacagttgtcactgaatgtgttaaggtatttgctttcttgactgtctctcctatttgctgctgtacatgatcctagaagagcatctgtggagctataggaatctttgcactgactactaatgattgctttgaatatactctcttctagcatgtacagtgtttctcagggcttctgatttcttatctgtcatgatttcagatctttgggaagttacagaagatggaacttttacattaactacttgctaaaaggaaagcttgcaggagctccacagccttcattgtatcatgagatgtgtatcttcatgatagtagatgaaatattcagccaggtgcggtagctcacacctgtaatcccagtgctgtgggaggccgaggcgggcagatcacctgaggtcaggagtttgagaccagcttggccaacatggagaaactctgtctctactaaaaatacaaaaattagctgggtgtggtggtgcgtgcctgtaatcccagctcctcgggaggctgaggtaggagaatagcttgaacccagaagtcagaggttgcagtgagccaggatcgtgccactgcactccagcctgggagacagagcgagactccatctcaaaaaaaaaaaaaaaaaaaaaagattctagctgggtgggtggtacatgcctgtactcccagctacttggatgctgaggcaagaggattgcttgagctctggagtttgtgtgcagcttgggcaatatagtgtgatcactgcctctaaaaaaatgtttttttttttgagatggagtctcactctgctgtccaggctgtagtgcagtggcaggatttcatctcactgcaacctccgcctcctgggttcaaacaattcttttgcctcagcctccctagtagctgggactacaggcgtgtgccaccatgcccagctaatttttgtacttttagtagagacaagatttcaccatattggtcaggctgatcttgaactcctgatctcatgatctgcctcagcctcccaaagtgctgggattacaggcatgagccgctgtgcctggccaaaatttttttttaaattgacaacagatttttgagatttttggtttacaaagctgtcatagaactcaaatacaaatatctatatagaaatgatttaatgatttagtgatgtctttgttagtatgtcattttacacgccagttcactatctccaccaaaaatgtacttataaaaggtagaaacactattatagaatctagatctccaggtttccaggtttttgaaattagctaaataaaatgttaagttcctgatcactcatttgccttacattttaaggataatattttaaagataaaatgtgttgttataaaagtaaataacaacattacaaaaagttatattttttaatagaaatggggtcttgctgtcacccaggctggaatgcagtgtcactatctgtacccctctaactcctgagttagagggtacagatagtgacactcactgtaccctctaactcctgggctcaaacaatcctcttgagtagctaggactccaggcacatgccaccatgcccagctagtttttaaatttctatatgggagagagggtcttgctgtgttgccaaggctagtctcaaactgctctcctccagcaagcctcccacttcggcctcctgagtcattgggattagaggcctgagccatcatacctggcaaagttatactattcttaagagataaaagattatgaatactgatgatatcctctgttctacaatgacctggggctgcttttggttcagattggctaaaaatttaaatgtaagtaacctgaaaatctttatttaggagacagacactcttagaatgtgattttattacctgttggataagccactgggaggaaaaaaaaccttggcacttgactattgattgtaactaaagaggcagctgctatttgttcacaaagggtcagcttaaacattgctattgatttttaaatttgattttgttcccctattcctttctttgttatgtggggtcaatgtaatcattaatcatcttgtttggactaatatgcctctgtttcagcatggtggggagttatatttcagtgacgtctatacgagccttgaactgccagaagaaatcaggacacacaaagttttatggggtaggtgattttgtttagtttagtattaaggcagatggttgtacatgtgcagaactcctttctgctaatagccaggatgaggctatatgagatcacatggggttaggccatgaggccaaggttccattcttcctctgccattcaaaagtgatagggctttggatagtttaattcatctctttgagttatcgttttccaaattgtaaaatgtaaataataatacaatctgccttatagggctgttatgaagattaaatgggataaagaatgggaaaaatactttgaaaactctagtgtggaaatgaggacaattgttcccaagctggtgtcctcttagtccccttatgttctcatcattattgtgttctttattcctttattatcattttaatagtctggaagttgagataaatgcatgcttttcatcagtctatgaaatcaaaagttcttattcttaaaataatattaactttattcttactatgtaataataaataggtaccgttaacaagttggaaagtgccaaaaaaaaaaaaaaaaaagaaaaaattactaagctggacacagtggcacacacctgtaaccccagatatttgggaggctgagtcaggaggattgcttgagcctaggagttcaggtacagcctgggtgtcatagtaaaaccctatctcttaaaaaaattacttataatcatataacccagtgataacttcttttttttttttttttttttttgagatggagtctcgctctgtcacccaggctagagtgcagtggcgcaatcttggctcactgcaacctccacttcccgggttcaagtgattctcctgcctcagcctcccaagtagctgggattacaggtgcatgccaccatgcccagctaatttttgtatttttagtagagatggggtttcactgtgttggccaggctggtctccaacacctgacctcatgatctgcccacctcggcctcccaaagtgctgggattacaggcatgagccaccgcgctcggcctatgatttattttttatactactttattcacataacagtgcttttcagaatgtggcgtactgcatacatgaatattatgcttgcagctgagtagaaccaatccaccagtgagtgtcctgaagaatggttcctagagaccatcagctagcacacccagtcttaaccatggctttctagaccttggagggatgctcaagttagcttctactgctaggatctatgttttaactaataccatgtcctaattaattatatagaagaatagttcccttaatactgtattaagtgttggctggtctgtggttttttgttgttgtttgttttttaggtgagtgtctgggtggtgctttatactggaaggaacttgctgtccttgctcaaaaaattgggttctgccctccacgtttggtcactgccaatctcattacaattcaaaacaaggaac

SEQ ID NO: 8397 - DNA, 376 bp, Homo sapiens
gaaataataaaatcttttgtcactataatatataccaaaaaggcatttaaaatacactttctatttcaaaaaaactaaaagaattttttaaaagggtatgttttaaaacccaacataatatttgatgaagaagagtcgtataaaaccccagaatattagagctgtatggggccttaaaagttattaaattctggccccatgttttacagatgaaaaaaacacagccaggaagatgaaatgacttacccaaggtcactgagcttgatggtaggtcttttgactactagtctggctctattacctgttagtttccttatgcatagaaacaagggtgccaccttcattactagtcttcaacataatactaaagagctct

SEQ ID NO: 8398 - DNA, 103 bp, Homo sapiens
gagacagagcttcgctcttgttgcccaggctagagtgcaatggtgcggtcttggctcaccgcaacctccgcctcctgggttcaagcggttctcctgcctaagc

SEQ ID NO: 8399 - DNA, 726 bp, Homo sapiens
attgccgagaagagccctgcagacagttcacacctctgtttcttttgcaagatatagctacctcaaaaaatcctttcttgatcaaactcttatggcctggaatccttgcgtttctgctgatgactgtcattttagagtacttactaaagacaatggttggggaaatagatattttaaaaataagggaagaagtgggtagggtaaacccaggcttacttatgtaaactctgagtgctgaagttagaagacaacctttaagattaaaaaaaaaaacaaacaaaaaaaaacggcaaagttagaacacacaaaagatagtatagttccttacccatccaccacttggttttgaggagaaaagggaaataagaagagttgaagagaagaaaaacagaacagaagagtgggaaaggaagatgaaagggtgctctggagtactatgcacctgtttagaagtggggaagtagcacaaacactagcaaaagaagaaccaccatggagttcctccttgcacatctctctcccctcctgaaggcctagggtgagcccacagcattgttccagcagtgagggagtcttcactgccccctgagactctctcacggctcttaagatacctccctgaagtccctccaaagaattcaatgtgcccctagtctaaatcagtttcctccatcataaatactcatagatgatgcaacaataaaacgttaataacgataatggcaa

SEQ ID NO: 8400 - DNA, 726 bp, Homo sapiens
attgctgagaagagccctgcagacagttcacacctctgtttcttttgcaagatatagctacctcaaaaaatcctttcttgatcaaactcttatggcctggaatccttgcgtttctgctgatgactgtcattttagagtacttactaaagacaatggttggggaaatagatattttaaaaataagggaagaagtgggtagggtaaacccaggcttacttatgtaaactctgagtgctgaagttagaagacaacctttaagattaaaaaaaaaaaaaaaaaaaaaaaaaacggcaaagttagaacacacaaaagatagtatagttccttacccatccaccacttggttttgaggagaaaagggaagtaagaagagttgaagagaagaaaaacagaacagaagagtgggaaaggaagatgaaagggtgctctggagtactatgcacctgtttagaagtggggaagtagcacaaacactagcaaaagaagaaccaccatggagttcctccttgcacatctctctctcctcctgaaggcctatggtgagcccacagcattgttccagcagtgagggagtcttcactgccccgagactctctcatggctcttaagatacctccctgaagtccctccaaagaattcaatgtgcccctagtctaaatcacttttcttcatcataaatactcatagatgacgcaacaataaaagcgttaaataacgataatggca

SEQ ID NO: 8401 - DNA, 299 bp, Homo sapiens
attgccgagaagagccctgcagacagttcacacctctgtttcttttgcaagatatagctacctcaaaaaatcctttcttgatcaaactcttatggcctggaatccttgcgtttctgctgatgactgtcattttagagtacttactaaagacaatggttggggaaatagatattttaaaaataagggaaaaagtgggtagggtaaacccaggcttacttatgtaaactctgagtgctgaagttagaagacaacttttaagattaaaaaaaaaaaaaaaaaaaagatttctggtagccgcc

SEQ ID NO: 8402 - DNA, 129 bp, Homo sapiens
gactatgcctggctaatttttgtatttttagtagagacagggtttcaccatgttgaccaggctggtctcgaactcctgaccttaggtgatccacctgccttggcctcccaaagtgctgggattacaggc

SEQ ID NO: 8403 - DNA, 453 bp, Homo sapiens
tgctcactgtatcactcccttaaaatctcttttaagcattttatgctaggaggtattacacttcaattcctaagtaggtgtgtactttttgtatataatgatgtatgaaagggttgacctgtatgcatcaagatgtctccccaatttaacagtatcataaattcacaactgtgtaattatcaaaccacagtattattggatgagtctcagtgctttagtcactaaaatggttatgcaattttgaatatttattgacgttgttctcagggactgttgaattgtttttactcacattcttatattcttccttcatgattagccaagacattcttgacagcaagattcaggcatacagaaagtttctacttcaaaatatggaaaatcttcttaccatctaggtgcagatcatatctaagtcccctgaagaaaaagaaaatggaaacttttcttact

SEQ ID NO: 8404 - DNA, 469 bp, Homo sapiens
aaattcatataggaatgctcactgtatcactcccttaaaatcttcttttaagcattttatgctaggaggtattacacttcaattcctaagtaggtgtgtactttttgtatataatgatgtatgaaagggttgacctgtatgcaccaagatgtctccccaatttaacagtatcataaattcacaactgtgtaattatcaaaccacagtattattggatgagtctcagtgctttagtcactaaaatggttatgcaattttgaatatttattgacgttgttctcagggactgttgaattgtttttactcacattcttatattcttccttcatgattagccaagacattcttgacagcaagattcaggcatacagaaagtttctacttcaaaatatggaaaatcttcttaccatctaggtgcagatcatatctaagtcccccaaagaaaaagaaaatggaaacttttcttact

SEQ ID NO: 8405 - DNA, 582 bp, Homo sapiens
cccaggctggagtgcagtggcacaatctcggctcattgcaagctccgcctcccgggttcatgccattctcctgcctcagactccctagtagctgggactacaggcacccgccaccatgcccagctaattttttttttgtacttttagtagagatggggtttcaccgtgttagccaggatggtgtcgatctcctgacctcgtgatccgcccacctcggcctcccaaagtgctgggattaaagacatgagccaccgtgcctggccgtttagggctatattttatgttttcttctccctttggtatttaataaagatttgatatttttctattatctgctttcctctgttccaaggtttttggcctcaggtgtgttctctggaaatggcaatgataggcatttataatctccatatttagatatttccctcacagtgctagtttctgagcttattagaacctaatgttaaatgacgagttaatgggtgcagcacaccaacatggcacatgtatacatatgtaacaaacctgcacgttgtgcacatgtaccctaaaacttaaagtataataataaaaaaaaagaaa

SEQ ID NO: 8406 - DNA, 469 bp, Homo sapiens
aaattcatataggaatgctcactgtatcactcccttaaaatcttcttttaagcattttatgctaggaggtattacacttcaattcctaagtaggtgtgtactttttgtatataatgatgtatgaaaaggttgacctgtatgcaccaagatgtctccccaatttaacagtatcataaattcacaactgtgtaattatcaaaccacagtattattggatgagtctcagtgctttagtcactaaaatggttatgcaattttgaatatttattgacgttgttctcagggactgttgaattgtttttactcacattcttatattcttccttcataattagccaagacattcttgacagcaagattcaggcatacagaaagtttctacttcaaaatatggaaaatcttcttaccatctaggtgcagatcatatctaagtcccccgaagaaaaagaaaatggaaacttttcttact

SEQ ID NO: 8407 - DNA, 539 bp, Homo sapiens
ggcaggcataggtcaagcctggcacagtctggatctcagtccctgactcagaccctggatgctcgctgccttgtacagaaacaacctgctcaaccaaacagggtgaccctgctgaagccgcaaatgtccaacagtcctgccaaccgtggatgcttctgtagcttccctttagctctccctcctggcatgaaaccagacacagactacccagaagatgaactgagcactctgcaatgggcccagcacgctgctgcatctgagaccatcttctcggccctaacaaccctggcaggctcttctctctggtggggaaattgggcttagggaaaggacatctttaggacagtcatcccaccaagtagaatgactctatgcagcctgaatactgtttccctgggaggaaaaaaatccaaagcataaacttttataagctgttttaattaaaacactctttgtaaagtgatgtatttgaagcaagggaggagaaaggttttctggcaaaagtgtcttttgtggtgtttctttggtgagcaaaagga

SEQ ID NO: 8408 - DNA, 775 bp, Homo sapiens
aaaaaaaaaaaaaaagaagaaccaggaatggcatcctagagttactggggcccttttctcaactacacagattgtcaaacttggcaatattacaaaacaattctgaagacaataaaattatctctaaacctaaactgtccagtagagtagccactaacccctatagctattgagcatttgaatgtggtcaggccaaactaaggtgtgctatagcaatatacaaactacatttcaatgactttgtacaaaaaagaatgtaaaatatccctataataaaaaaaagacgtaaaatatcccattaatcatttgttagttgattacatgttgaaatgatattttggatatgttgggttaagtaaaatgttaaaatttcagctgtattttttttttcttttccgatgtggctactagaaaatttaaaatgacacatggctcacattttacttcttttagccagtgctgctctagactgagtttgcatgaggtgtaactgtctagagctatagtgacatgtaagtaatatacatgctttgtacaaaatctccctataaactgctgattttgaaattgaagtcatgaaagacagattgaaccgatagagtcctttgagagtcaccagttactggtccactctctgtatccttttgatatttgcatttggcaagtataaacccgaccaggataggggatggggggaggaatccactggttatttgatgcaaaaaaagagggagaaaaagtgggggggtgcacttatagtcccagctacttggga

SEQ ID NO: 8409 - DNA, 2905 bp, Homo sapiens
attcaaagtacatttgacaacccactgcaagttgtggcatacatgggtgccatgaaccatgataccaactacagctttcaggtcaggacactgagcctttacttaaagctttgctcaatgcttacttaaaactataactccgggccgggcgcagtggctcatgcctgtaatcctagcactttgggaggccaaggccggtggatcacttgaggtcaggagttcaagaccagcctggccaatatggtgaaaccctgtctttaccaaaaatacaaaaactagctgggcatggtggctcatgcctgtaatcccagctattctagtagctgaggcaggagaattgcttgaacccgcgaggtggaggttgtagtgagccaagattgcgccactacactccagcctgggcaagagagtgagactccatctcgaatctgtctcaaaaaaaaaaaaaaaaacttctcagtgggggggtaggaggagaaaaattgtaaaaaaaaaaaaagttaaaaaatagaactccttgaggtttttccttttttaatctctatttttatcccattgcttaacgtcttccttgttcctttcccacttaaaaaagcactttttggctgggcacagtggctcacgcactttgggaggccgaggcaggcagattgcttgtgctcaggagtttgagtccagcctgggcaacatagtgaaaccccgtatctacaaaaaaaatacaaaaattagctggacatggtggcgcacacttgtgccagctacttgggaggctgaggtgggaggattgcttgagcccaggaagtggaggttccagtgagccgagattgtaccactgcactctagcctggccgacagagcaaaaccctgtctcaaaaataaataaataggccaggtgtggtggcccaagcctataattccagcactttgggaggccgagttgggcagatcacctgatgtcaggagttcaagaccagcttggctgacatggcgaaaccctgtctctactaaaaatacaaaaattagctgggcgtggtggtgtgtgcctctagtcccacctacttgggaggctgaggcaggagaatcgcttgaacccaggaggcggaggttgcggtgagccaaggttgttccactgcactccagcctgggcaacagagcaagactgtctctctccaaataaataaataaataaataaataaataaatagcactttttggccaggggtggtggctcatgcctgtaatcccagcactttgaaggaggccgaggtgggcagattgcttgagcccaggagttcaagaccagcctgggcaacgtgacaaaactccatcattactaaaaatagaaaaatcagccggaagtggtgcccgcctcagcttcgagggtgcaacgagccgagattgtgccactgcactccagcctggacgatgggagtgggatcctgtctcaaaaaagaaaaaaaaagcacttttccaccctcttcttgggccttttttttttttcaatggctctgtaaggatcacagcccagtcttcaatgttttatctgtcatctttgtgttcttgtgtcctggtgcagtctttgatcaacctaccttagaaactgagttaggagatatcctgtagattattttatactgagtttgccctggagtaagaaggaaacgaacctaaactctggacctactgtagtgaaacgagaattgccctgtgtttcttcctaggttcaatgtggcttaattgtggtggcctacaaagatggatcacctgcccacccacatttcatggatgcagagctctgttcccagtactggaccaagtggcttcttcgactagaagaatatacggaaaagaaaaagaaccagaatattcagaaaccagaatattcagaatagggagcaagttgctatttgggaacattcagcaccttctcacagtttgggaacatatattgctgtttactccagtgtaaaaatgaggtgccactggatctgagtgctacacgaacacaagtagaagtattaatttgttgaaatgtgttgttaccaaaaagactgaaaagccccaaagtctagatataaagacctagacttcggcacgcgaaatcccagctatgctacctcttatttacctgaaaggaggacacgcaggatgggcagtcatgctggtgactcttgtactcccttgagggacattgggggggggggggcgtggtcccaggcaggatgcccagtctttgagctgagattggaaggcagtgaggctgagggtgccaagatttccccagggttcacccagaggggaaggggctacatgcccccagctgtgtgcagggaggacacatcagcccactaccgctgccaacaccaatgcctaaaacttgtttcatacattggggttttctatatatttcagctgggaaaagcttacatttaaccttttgaaaaaataaatacgtgattagcctcaactaaacattgctgactataaagacagtatattcaccatgtcgctggcaatatgtcattgcgtaacaccaaataaccccccagaagtagccagaggccagtttgaacatcacaattctaagtgttttagtaactatttctggcgtgagtcaacagatcatgtagatagagtcaattattgtttgtggagtttttcagctataggggaggggaactattaaaatccatttgtttctattcaataggtaataaaaattagttgtccctgggtttgggaaacttaaatgcccattacagccctggggaagggttttctgtcttatggagtgagtcttagcatttaagttatacagttgctgccttaaaatagtagcctgctacaatgacttctttgggtagccattttcataagaaataaaatacaagatatgagtaatgaa

SEQ ID NO: 8410 - DNA, 592 bp, Homo sapiens
gaggcaggcagatcacaaggtcaggagatcgagaccatcctagctaacacagtgaaaccccatctctattaaaaatacaaaaaatgagccgggcatggtggcgggcgcctatagtcccagctactcgggaggcagaggcaggagaatggcgtgaacccaggaggcagagctttcagtgagccgagatcgcgccactgcactccagcctgggccacagagcgagactccatctcaaaaaaaaaaaaaaaaagacataatgatataacctcattttcttctatgttttcctgctttcctaccaatatctgtaaaacattaacgtcattatttaaaaaaatatgtaacctagataatatagtaatcagacatcattgttaaatttacagcttaaggaagtaagttgtcttttcaatcagattagtcattctgtttttttagtaatagttatatattaatgaagtgaaactttataggtaggtatacatcaatgaaatcttaggcttttaccatctatattgcatacttctgacattatatcttattttccttaggttctaagaattttagatccagttacctgcaaagagagttc

SEQ ID NO: 8411 - DNA, 2625 bp, Homo sapiens
gaggcaggcagatcacaaggtcaggagatcgagaccatcctagctaacacagtgaaaccccatctctattaaaaatacaaaaaatgagccgggcatggtggcgggcgcctatagtcccagctactcgggaggcagaggcaggagaatggcgtgaacccaggaggcagagctttcagtgagccgagatcgcgccactgcactccagcctgggccacagagcgagactccatctcaaaaaaaaaaaaaaaaagacataatgatataacctcattttcttctatgttttcctgctttcctaccaatatctgtaaaacattaacgtcattatttaaaaaaatatgtaacctagataatatagtaatcagacatcattgttaaatttacagcttaaggaagtaagttgtcttttcaatcagattagtcattctgtttttttagtaatagttatatattaatgaagtgaaactttataggtaggtatacatcaatgaaatcttaggcttttaccatctatattgcatacttctgacattatatcttattttccttaggttctaagaattttagatccagttacctgcaaagagagttcacctgataatccattttttgagtcttcaccaaccaccttacttgctacaaagaaaaatattggacgatttcatccctatactagatatgaaaatataactttcaattgctgcaatcactgccggggagaactgattgccctttaacagtcaatatgttggaggcatgctaaggtacttccttattacccaagagtcattattatttgggagctggggttcttacaatgctagaaataatatcacttcctatttacataatgtatacacccaaagatattttatgtactagactccagattaccctttcttaataaatatctcagggtaaggaaagaaagaaactgtatagatatatttaaaatagagaatactttccaagcaatacatgatacttttcctaaaagactctaaaagaaaaagattctgtaactctcttttagcaccaaattattgtttatcttgctggatattttatatgaacagtgttaatttagatgcactaaagcaaaggtaggcaaactacaaccatgagtcaaacatggccacacccattcatgtgctattgtctaagctggttttgcactacaactgcagagttgaatagatgcagcagatcctttacagaaaaagttttctgacctcaattctaaagtaattgtagtagggagctggaggactttctttccctttatggtaattttttgagctacaaaagagccttgcagaaatgggtgaagggattaatcttttaaaaataaatgctatctattaggaaaataaaaaatattttagagccaagttaacaagtacttcagcaaaacatgctcgttttatgcaggggattctgtattccaaatggatacaatccgacatatataaaagaaacagattcttaactattgactcttatttagcaaatgcaacagacaagaatatccaacttgatatttataaaaggtagactttttccaaaagtgtataagctcaaagaaaaaatgcaacctgtcaattaatatatactatgtaatatatattattgtgtatttatgattagccatcataaatgcccattgcttggcctttaagaataatcacaaaatatttatattaaattatacaaatttgttgcagaagtgcctgtgagagaaatcttcaaaagacaaacctggtcaaataataataattttaatgtcaatgattttttttgtctgactcatctgagttatatttagttttcaagtggcaataaatttatctaccttctttattgcgactattccttttttcccccagaattagtgctttggtttaggtctttgtctagcttaactacttccaattgattcttcagccttttcttttaggtttacttactataaaagtctcagaagaaagcataaggggaaagcttcgtgacattgtatttggcaatgatttcttgaatatgacaacagaagcacaggcaacaaaagaaaaaatagataaattgaatttcatcaaaatttcaaatttttgtgcattaaaagatgcagtgaaaaggcaacacagagaatgggagaaaatatttgcaaatcatatatctgataactgtctagtgtccagaatatataaagcactcctacaactcaaccaccaaaaaacaacccaataaaaattagcaaaggggctgggcatggtggctcatgcctgtaatcctagcactttgggaggctgaggcagtcagatcacctgaggccaggagttcaagaccagccgagccaagatggcgaaaccccatctctactaagaatacaaaaaattggcctggcgcagtggctcacgcctgtaatcccagcactttgggaggccgaggtgggtgggtcacctgaggttaggagttcaagatcagcctggccaagatggtgaaacccccgtctctactaaaaatacaaaaaattagttgggcatggtggcgggcacctgtactcccagctactcgggaggctgaggcagagaattgcttgaacctgggaggcggaggttgtagtgagcc

SEQ ID NO: 8412 - DNA, 2625 bp, Homo sapiens
gaggcaggcagatcacaaggtcaggagatcgagaccatcctagctaacacagtgaaaccccatctctattaaaaatacaaaaaatgagccgggcatggtggcgggcgcctatagtcccagctactcgggaggcagaggcaggagaatggcgtgaacccaggaggcagagctttcagtgagccgagatcgcgccactgcactccagcctgggccacagagcgagactccatctcaaaaaaaaaaaaaaaaagacataatgatataacctcattttcttctatgttttcctgctttcctaccaatatctgtaaaacattaacgtcattatttaaaaaaatatgtaacctagataatatagtaatcagacatcattgttaaatttacagcttaaggaagtaagttgtcttttcaatcagattagtcattctgtttttttagtaatagttatatattaatgaagtgaaactttataggtaggtatacatcaatgaaatcttaggcttttaccatctatattgcatacttctgacattatatcttattttccttaggttctaagaattttagatccagttacctgcaaagagagttcacctgataatccattttttgagtcttcaccaaccaccttacttgctacaaagaaaaatattggacgatttcatccctatactagatatgaaaatataactttcaattgctgcaatcactgccggggagaactgattgccctttaacagtcaatatgttggaggcatgctaaggtacttccttattacccaagagtcattattatttgggagctggggttcttacaatgctagaaataatatcacttcctatttacataatgtatacacccaaagatattttatgtactagactccagattaccctttcttaataaatatctcagggtaaggaaagaaagaaactgtatagatatatttaaaatagagaatactttccaagcaatacatgatacttttcctaaaagactctaaaagaaaaagattctgtaactctcttttagcaccaaattattgtttatcttgctggatattttatatgaacagtgttaatttagatgcactaaagcaaaggtaggcaaactacaaccatgagtcaaacatggccacacccattcatgtgctattgtctaagctggttttgcactacaactgcagagttgaatagatgcagcagatcctttacagaaaaagttttctgacctcaattctaaagtaattgtagtagggagctggaggactttctttccctttatggtaattttttgagctacaaaagagccttgcagaaatgggtgaagggattaatcttttaaaaataaatgctatatattaggaaaataaaaaatattttagagccaagttaacaagtacttcagcaaaacatgctagttttatgcaggggattctgtattccaaatggatacaatccgacatatataaaagaaacagattcttaactattgactcttatttagcaaatgcaacagacaagaatatccaacttgatatttataaaaggtagactttttccaaaagtgtataagctcaaagaaaaaatgcaacctgtcaattaatatatactatgtaatatatattattgtgtatttatgattagccatcataaatgcccattgcttggcctttaagaataatcacaaaatatttatattaaattatacaaatttgttgcagaagtgcctgtgagagaaatcttcaaaagacaaacctggtcaaataataataattttaatgtcaatgattttttttgtctgactcatctgagttatatttagttttcaagtggcaataaatttatctaccttctttattgcgactattccttttttcccccagaattagtgctttggtttaggtctttgtctagcttaactacttccaattgattcttcagccttttcttttaggtttacttactataaaagtctcagaagaaagcataaggggaaagcttcgtgacattgtatttggcaatgatttcttgaatatgacaacagaagcacaggcaacaaaagaaaaaatagataaattgaatttcatcaaaatttcaaatttttgtgcattaaaagatgcagtgaaaaggcaacacagagaatgggagaaaatatttgcaaatcatatatctgataactgtctagtgtccagaatatataaagcactcctacaactcaaccaccaaaaaacaacccaataaaaattagcaaaggggctgggcatggtggctcatgcctgtaatcctagcactttgggaggctgaggcagtcagatcacctgaggccaggagttcaagaccagccgagccaagatggcgaaaccccatctctactaagaatacaaaaaattggcctggcgcagtggctcacgcctgtaatcccagcactttgggaggccgaggtgggtgggtcacctgaggttaggagttcaagatcagcctggccaagatggtgaaacccccgtctctactaaaaatacaaaaaattagttgggcatggtggcgggcacctgtactcccagctactcgggaggctgaggcagagaattgcttgaacctgggaggcggaggttgtagtgagcc

SEQ ID NO: 8413 - DNA, 602 bp, Homo sapiens
ctcttttatccaaccattttatttcactatacaatgttaggtatcctcagggcttgatttagatccccttcttctcccagacctttatccaccacattctcctatttaacaaaactgacagcccttcttccttagtgtctcttaaacttttcagtcccattgcttcaaggtgccatcatttcttagctagattattacaataacctccctttttctgttcttatgtctgcttatgcatactgcttcccccatcccccacactgtgtatagaatgatctctctgaaaggcaccctgcataaaatccttccccatcactttcaggctaaaatacagaaacctttctgttcatattagtgggtcagtctcctgctcctgaattcccttagcattttgtttctcgctctataaagacctataatgtaataacatctttatagtatttgagaacttattttctcctctaaatttataagcaatgttaaggtaagcccttcatctttgcttatcctctaataccaaacaaacttccataaaaatagaaggatctcaaaaactaaattgaaaaagcagtctagttgaaaaatagaggtgctaaagtaag

SEQ ID NO: 8414 - DNA, 467 bp, Homo sapiens
gccaataagcacatcaaaagatgctcagcataactactcattaaggaaatgcaaattaataccacttcacatccattaggatggcagttatcaaaaaagcaaattataaatgtcaaagatgtggagaaattggaacccctatgcattgtttgtgggaatgtaaaatgttgaaaacagtgtggcagatcctcaaaatattaaacatagagttaccatatggcctagcaattctgcttctaggtagattcccaaaagaaagcagaaactagaataggtatttgtacaacagtgttcacagctgcattattcacaatagccaaaaggtggatgtaacacagtgtccatcgatggatgaatagataaacaaaatctggtatatacatgtgaagaaatactattcagccttaaggaatgaaatttgatgctacaatgtagatgaacctttagaatattatactaagtgaaat

SEQ ID NO: 8415 - DNA, 602 bp, Homo sapiens; identical to SEQ ID NO: 8413

SEQ ID NO: 8416 - DNA, 467 bp, Homo sapiens; identical to SEQ ID NO: 8414

SEQ ID NO: 8417 - DNA, 643 bp, Homo sapiens
ttattttgttattttttttaattgagataccattccctgggggttttttcctattagattatttccttagaatagcttccttaaaaatagaattattaagacaaaggaaaaattataaaatacacataacaagatttaccatcttaaccatttctaagtgtatgactcagtattattaagtacatttatgttgctgtgcaaccaatctccagaaagcagttttaatcttagaaaagcagatggtccaatagagtaatttgggcacaatgaaaagaaagtggaaacattttgagaaaattaattcattctttggcatgaaaagttagaggacttttaaatcttcttcagagctaggcaaccaggttattaaaatgaaatataccagtaggccatcagtatagcattctttaattgcaaatgcaacactcataccacacacaaaataaattccataaggattaaagatgtaaatgagaaagtactcaaataaatataggttgatacatatattaagtgaaaaaatattatcccaaagatagaaatgaacaaagcctttcgtggtttttttatgtaatttttttttttaaggtggagtctcactctgctgcccacgctggagtgcagtggtgtcatctcagctcac

SEQ ID NO: 8418 - DNA, 643 bp, Homo sapiens; identical to SEQ ID NO: 8417

SEQ ID NO: 8419 - DNA, 516 bp, Homo sapiens
ttattttgttattttttttaattgagataccattccctgggggttttttcctattagattatttccttagaatagcttccttaaaaatagaattattaagacaaaggaaaaattataaaatacacataacaagatttaccatcttaaccatttctaagtgtatgactcagtattattaagtacatttatgttgctgtgcaaccaatctccagaaagcagttttaatcttagaaaagcagatggtccaatagagtaatttgggcacaatgaaaagaaagtggaaacattttgagaaaattaattcattctttggcatgaaaagttagaggacttttaaatcttcttcagagctaggcaaccaggttattaaaatgaaatataccagtaggccatcagtatagcattctttaattgcaaatgcaacactcgataccacacacaaaatacattccataaggattaacgatgtaaatgagaaagtactccaataaatataggttgatacatatattaagt

SEQ ID NO: 8420 - DNA, 388 bp, Homo sapiens
ctcaacgtttaatccagtgctccagttggcactggacaacctagacagacctctggctgaaccgtggagcagaaactgtgagcagggtgccattagcaagatcccacatgcttggcccttaagatgccagtaactgagtcatctcttctggagcaggctagtggctttgctagctcttctcccactgcctggactgctgcaaccacttagtcactaacctttagggtagagggcataaaactgctgggtaatgctcaagttttaaatctgcatatgtgtcttctgatacagtagataattttatatccaaaaaatagaacccttttctacagcaatccagggttgctggtgccagtgtcttttccagagcacagactttccatgcttc

SEQ ID NO: 8421 - DNA, 241 bp, Homo sapiens
agtaaagacaggatttcaccatgttggccaggttggtctcaaactcctgacttcaggtgatccacctgcctcagcttcccaaactgctgggattacagacatgagccgtcgcgcctggctggggaattttattaatcacagctatttaccaggattatctatatgccccatctttcccaaactttttttttgtacatcttttcttttctatttgactgtttctgggttgcatggttttttt

SEQ ID NO: 8422 - DNA, 105 bp, Homo sapiens
atcctagcactttgggaggccgaggcgggcggatcatgaggccaggagatcgagaccatcctagctaacacggtgaaaccccatctctactaaaaaatacagaaa

SEQ ID NO: 8423 - DNA, 851 bp, Homo sapiens
attacatgggtatattgcatggtggtgaagtctgagctttttgagtaaccatcacccaaataatgtacattgtatctactaagtaatttctcatccctcaccctcttcccaccctcccaagtcactatcattccacactctatgtccgtgcacacacattataagctcccacttgtaagtgagaacatgcggtatttggctttctgtttctgagttgtttcagttaaaatattgacctctagttccttccacattgctgcaaaagatgcgatttcattccttttatggctgagtagtattctgtggtgtatatagaccacatttgcttcatccattttgagtcccttcttataagggccttgatcccattcagaaagtctccatgatctgatctaatctcatgatctaatcacctcccaaaggccccacctcctaaaagcaacacactggggggttaggcttcaaccaattaatctgtagaggacaaacacgttcagtccatagcaggaagcagtgccgccatggggaagagcattgtcgtgaaaccttttgcccctcttgttgagttttctcctccagcacaccctgaacatgctgacagtgtcaccttcctctttacttgtccctcttccgctccaagttgcctcctggcttcccagtgtctctgtgggcttgagaccagagcttgtcataagagatagatgacgtcacttgatggaaagagtcaagtgcagtgaccagcacatagaaggcggccatcaacattggtttcatcctttagagcaaagtttccccaagcgcctggtgtgcactggtgagatttggggacggggtggtacttaagacctggc

SEQ ID NO: 8424 - DNA, 576 bp, Homo sapiens
gttaataggagattctcatgttactccttttcttaaaactctgtgtcacctcattatctacagaggtggaacttactgtgctgtaaaaggccctcattgctctagggtggaatgaatgggccaaaatgtattttgaggaattctgagcttcttcagtgggctttggttgttgttgattttcaaaagggcattgctttcaaacaaatatatttatatacatacatacacacgtgtgtttgtgtgtgtgtgtgtgtgtgtgtgtgtgaatgtatatatatattttggagatggagtcttgctaggttgcccaggctggagtgctgtggctattcacaggcaaggtcatagtgccctacagcccggagctcctggatgcaagtgatcttcctgcctcagcctcctgagtagctcatactgcaggtgcacaccaccacacttgaccaaatgaatatatttttaaaaataaaaaatgcctcagttttgagactgggtatagtagtatgtgcctgtaatcccagctacttaggaggctaagataggaggatcggttgagtccagaagtttgagaccaacctg

SEQ ID NO: 8425 - DNA, 570 bp, Homo sapiens
gttaataggagattctcatgttactccttttcttaaaactctgtgtcacctcattatctacagaggtggaacttactgtgctgtaaaaggccctcattgctctagggtggaatgaatgggccaaaatgtattttgaggaattctgagcttcttcactgggctttggttgttgttgattttcaaaagggcattgctttcaaacaaatatatttatatacatacatacacacgtgtgtttgtgtgtgtgtgtgtgtgtgtgaatctatatatatattttggagatggagtcttgctaggttgcccaggctggagtgctgtggctattcacaggcaaggtcatagtgccctacagcccggagctcctggatgcaagtgatcttcctgcctcagcctcctgagtagctcatactgcagatgcacaccaccacatttgaccaaatgaatatatttttaaaaataaaaaatgcctcagttttgagactgggtatagtagtatgtgcctgtaatcccagctacttaggaggctaagataggaggatcggttgagtccagaagtttgagaccaacctg

SEQ ID NO: 8426 - DNA, 3799 bp, Homo sapiens
cagtatgttaagagacaaagaaggccattacataatggtaaagggatcaattcaacaagacgagccaactatcctaaatatatatgcacccaatacaggagcacccagattcataaagcaagtccttagtgacatacaaagagacttagactcccacacaataataatgggagactttaacactccactgtcaacattagacagatcaacgagacagaaagttaacaaggatatccaggaattgaactcagctctgcaccaagcggacctaatagacacctacagaactctccaccccaaatcaacagaatatacattcttttcagcaccacaccacacctattccaaaattgaccacatagttggaagtaaagcactcctcagcaaatgtaaaagaacagaaatgataacaaactgtctctcagaccacagtgcaatcaaactagaactcaggattaagacactcactcaaaactgctcaactacatggaaactgaacaaactgctcctgaatgactactgggtacataacgaaatgaaggcagaaataaagatgttctttgaaagcaatgagaacaaagacacaacataccagaatctcttggacacattaaaagcagtgtgtagagggaaatttatagcactgaatgcccacaagagaaagcaggaaagatccaaaattgacactctaacatcacaattaaaggaactagagaagcaagagcaaacacattcaaaagctagcagaaggcaagaaataactaagatcagagcagaactgaaggagatagagacacaaaaaaccgttcaaaaaatcaatgaatccaggagctgattttttgaaaagatcaacaaaattgatagaccactatcaagactaataaagaagaaaagagagaagaatcaaatagatgcaataaaaaatgacaaaggggatatcaccaccaatcccacagaaatacaaactaccatcagagaatactataaacacctctacacaaataaactagaaaatctagaagaaatggataaattcctggacacatacaccctcccaagaccaaaccaggaagaagttgaatctctgaataaactaataggctctgaaattgcggcaataattaatagcttaccaaccaaaaaaagtccaggaccagatggattcacagccgaattctaccagaggtacaaggaggagctggtaccattccttctgaaactattccaatcaatagaaaaagagggaatcctccctaactcattttatgaggccagcatcatcctgataccaaagcctggcagagacacaaccaaaaaaagagaattttagaccaatatccgtgatgaacatcgaagcaaaaatcctcaataaaatactggcaaaccgaatccagcagcacatcaaaaagcctatccaccatgatcaagtgggcttcatccctgggatgcaaggctggttcaacatacaaaaatcaatgaacataatccagcatataaacagaaccaaagacaaaaaccacatgattatctcaatagatgcaaagaagacctttgacaaaattcaacaacacttcatgctaaaaactctcaataaattaggtattgatggagcgtatctcaaaataataagagctatctatgacaaacccacagccaatatcatactgaatggacaaaaattggaagcattccctttgaaaactggcacaagacagggatgccctctctcaccactcctattcaacatagtgttggaagttctggccagggcaatctggcaggagaaggaaataaagggtattcaattaggaaaagaggaagtcaaattgtccctgtttgcagatgacatgattgtatctgtagaaaaccccatggtctcagcccaaaatctccttaagctgataagcaacttcagcaaaatctcaggatacaaaaccaatgtacaaaaatcacaagcattcttatacaccaataacagacaaacagagagccaaatcatgagtaaactcccattcacaattgcttcaaagagaataaaatacctaggaatccaacttacaaggggcgcgaaggacctcttcaaggagaactacaaaccactgctcaatgaaataaaagaggatacaaagaaatggaagaacattccatgctcatgggtaggaagaatcaatattgtgaaaatggccatactgcccaaggtaatttatagattcaatgccatcctcatcaaactaccaatgactttcttcacagaattggaaaaaactactttaaagttcatatggaaccaaaaaagagccctcattgccaagtcaatcctaagccaaaagaacaaatctggaggcatcacactacctgacttcaaactatactacaaggctggtactggtactaaacagcatggtactggtactaaaacagagatatagaccaatggaacagaacagagccctcagaaataatgctgcatatctacaactatctgatctttgacaaacctgagaaaaacaagcaatggggaaaggattccctatttagtaaatgatgctgggaaaactggctagccatatgtagaaagctgaaactggatcccttccttacaccttatacaaaaattaattcaagatggattaaagacttagatgttagacctaaaaccataaaaaccttagaggaaaacctaggcaataccattcaggacataggcatgggcaaggacttcatgtctaaaacaccaaaagcaatggccacaaaagccaaaattgacaaatgggatctaattaaactaaggagcttctgcacagcaaaagaaactaccatcagagtgaacaggcaacctacagaacgggagaaaatttttgccacctactcatctgacaaagggctaatacccagaatctacaatgaactcaaacaaatttccaagaaaaaagcaaacagccccatcaaaaagtgggcaaaggatatgaacagacacttctcaaaagaagacatttatgcagccaaaaaacacatgaaaaaatgctcatcatcactggccatcagagaaatgcaaatcaaaaccacaatgagataccatctcacaccagttagaatggcgatcattaaaaagttaggaaaccacaggtgctggagaggatgtggagaaatagggacacttttacactgttggtgggactgtaaactagttcaaccattgtggaagtcagtgtggtgattcttcagggatcttgaactagaaataccatttgacccagcaatcccattactgggtatatacccaaaggattataaatcatgctgctataaagacacatgcacacgtatgtttattgcagcactattcacaatagcaaagacatggaaccaaccgaaatgtccaacaatgatagactggattaagaaaatgtggcacatatacaccatggaatactatgcagccataaaaaatgatgagttcatgtcctttgtagggacatggatgaagctggaaaccatcattctcagcaaactatcgcaaggacaaaaaaccaaataccgcatgttctcactcataggtgggaattgaacaatgagaacacatggacataggaaggggaacatcacacactggggcctgttgtgtggtggggggaggggggagggatagcattaggagatatacttaatgctaaatgacgagttaatgggtgcagcacaccaacatagcacgtgtatacatatgtaacaaacctgcacattgtgcacatgtaccctaacacttaaagtataataataataaagttaaaaaaaataacag

SEQ ID NO: 8427 - DNA, 3799 bp, Homo sapiens
cagtatgttaagagacaaagaaggccattacataatggtaaagggatcaattcaacaagacgagccaactatcctaaatatatatgcacccaatacaggagcacccagattcataaagcaagtccttagtgacatacaaagagacttagactcccacacaataataatgggagactttaacactccactgtcaacattagacagatcaacgagacagaaagttaacaaggatatccaggaattgaactcagctctgcaccaagcggacctaatagacacctacagaactctccaccccaaatcaacagaatatacattcttttcagcaccacaccacacctattccaaaattgaccacatagttggaagtaaagcactcctcagcaaatgtaaaagaacagaaatgataacaaactgtctctcagaccacagtgcaatcaaactagaactcaggattaagacactcactcaaaactgctcaactacatggaaactgaacaaactgctcctgaatgactactgggtacataacgaaatgaaggcagaaataaagatgttctttgaaagcaatgagaacaaagacacaacataccagaatctcttggacacattaaaagcagtgtgtagagggaaatttatagcactgaatgcccacaagagaaagcaggaaagatccaaaattgacactctaacatcacaattaaaggaactagagaagcaagagcaaacacattcaaaagctagcagaaggcaagaaataactaagatcagagcagaactgaaggagatagagacacaaaaaaccgttcaaaaaatcaatgaatccaggagctgattttttgaaaagatcaacaaaattgatagaccactatcaagactaataaagaagaaaagagagaagaatcaaatagatgcaataaaaaatgacaaaggggatatcaccaccaatcccacagaaatacaaactaccatcagagaatactataaacacctctacacaaataaactagaaaatctagaagaaatggataaattcctggacacatacaccctcccaagaccaaaccaggaagaagttgaatctctgaataaactaataggctctgaaattgcggcaataattaatagcttaccaaccaaaaaaagtccaggaccagatggattcacagccgaattctaccagaggtacaaggaggagctggtaccattccttctgaaactattccaatcaatagaaaaagagggaatcctccctaactcattttatgaggccagcatcatcctgataccaaagcctggcagagacacaaccaaaaaaagagaattttagaccaatatccgtgatgaacatcgaagcaaaaatcctcaataaaatactggcaaaccgaatccagcagcacatcaaaaagcctatccaccatgatcaagtgggcttcatccctgggatgcaaggctggttcaacatacaaaaatcaatgaacataatccagcatataaacagaaccaaagacaaaaaccacatgattatctcaatagatgcaaagaagacctttgacaaaattcaacaacacttcatgctaaaaactctcaataaattaggtattgatggagcgtatctcaaaataataagagctatctatgacaaacccacagccaatatcatactgaatggacaaaaattggaagcattccctttgaaaactggcacaagacagggatgccctctctcaccactcctattcaacatagtgttggaagttctggccagggcaatctggcaggagaaggaaataaagggtattcaattaggaaaagaggaagtcaaattgtccctgtttgcagatgacatgattgtatctgtagaaaaccccatggtctcagcccaaaatctccttaagctgataagcaacttcagcaaaatctcaggatacaaaaccaatgtacaaaaatcacaagcattcttatacaccaataacagacaaacagagagccaaatcatgagtaaactcccattcacaattgcttcaaagagaataaaatacctaggaatccaacttacaaggggcgcgaaggacctcttcaaggagaactacaaaccactgctcaatgaaataaaagaggatacaaagaaatggaagaacattccatgctcatgggtaggaagaatcaatattgtgaaaatggccatactgcccaaggtaatttatagattcaatgccatcctcatcaaactaccaatgactttcttcacagaattggaaaaaactactttaaagttcatatggaaccaaaaaagagccctcattgccaagtcaatcctaagccaaaagaacaaatctggaggcatcacactacctgacttcaaactatactacaaggctggtactggtacgaaacagcatggtactggtactaaaacagagatatagaccaatggaacagaacagagccctcagaaataatgctgcatatctacaactatctgatctttgacaaacctgagaaaaacaagcaatggggaaaggattccctatttagtaaatgatgctgggaaaactggctagccatatgtagaaagctgaaactggatcccttccttacaccttatacaaaaattaattcaagatggattaaagacttagatgttagacctaaaaccataaaaaccttagaggaaaacctaggcaataccattcaggacataggcatgggcaaggacttcatgtctaaaacaccaaaagcaatggccacaaaagccaaaattgacaaatgggatctaattaaactaaggagcttctgcacagcaaaagaaactaccatcagagtgaacaggcaacctacagaacgggagaaaatttttgccacctactcatctgacaaagggctaatacccagaatctacaatgaactcaaacaaatttccaagaaaaaagcaaacagccccatcaaaaagtgggcaaaggatatgaacagacacttctcaaaagaagacatttatgcagccaaaaaacacatgaaaaaatgctcatcatcactggccatcagagaaatgcaaatcaaaaccacaatgagataccatctcacaccagttagaatggcgatcattaaaaagttaggaaaccacaggtgctggagaggatgtggagaaatagggacacttttacactgttggtgggactgtaaactagttcaaccattgtggaagtcagtgtggtgattcttcagggatcttgaactagaaataccatttgacccagcaatcccattactgggtatatacccaaaggattataaatcatgctgctataaagacacatgcacacgtatgtttattgcagcactattcacaatagcaaagacatggaaccaaccgaaatgtccaacaatgatagactggattaagaaaatgtggcacatatacaccatggaatactatgcagccataaaaaatgatgagttcatgtcctttgtagggacatggatgaagctggaaaccatcattctcagcaaactatcgcaaggacaaaaaaccaaataccgcatgttctcactcataggtgggaattgaacaatgagaacacatggacataggaaggggaacatcacacactggggcctgttgtgtggtggggggaggggggagggatagcattaggagatatacttaatgctaaatgacgagttaatgggtgcagcacaccaacatagcacgtgtatacatatgtaacaaacctgcacattgtgcacatgtaccctaacacttaaagtataataataataaagttaaaaaaaataacag

SEQ ID NO: 8428 - DNA, 1115 bp, Homo sapiens
ctggcggccgcgtctgccgccccggcgcccgcccgggtcccaggccgactaattaggcccggctacctcccgcgccgcccactgcccgctccaggcccgctgcccgctccaggcccgaggtgatggcggctgttcctgccgttctggggcctgtgccccagagctggccgcgtttctcggggcgggagccagctctgctcgcctggcttaacccagacgagcccaggacgccctatccctgaaccccatcgtggcgtgcaggtctgagtaggctctgggccatgccggggtacctggcttggaggctctcttcagtctcgggagagatatgcttatcccaggcggagcggagaaggctgggggatgactgatagggggagtcgggaggggatgttgagccctgaggtgttgcactgagcacggatccagttcctcttggctttgccacaaacacagtgaccttatgtagagtccttagcctcggtttctccgtttgtaaaccatcagcaccagcccattttctcctgaatttgggatttagggagctgggctttgtatacccctcccagtctcctctcttggggggttgctgagggggtggaggtaatgtctggacctagcagggcctgccttactgccatgagccctggatgccagtggccagcctgctcgctgtgctgagggccaggcaggccctgggcactgaggcacgttgtttgctgaaaccaaatttctgtgcttgtgtttttccataattatattagcaggtgggatttttcctcggggaagcagtgggagggggagcgccatggcagtgtccccgcccgctctaagcgtgagctcacactcagctctgcccgcctgccgtaatgattttttaattatgcagccagtgctcggaattgctaatccccctccagccctgcatcccctcctgcaactcacaccccagcccctggctgatgtccctagagtggcggtgcccagccccgtgcccatcactgagtgcttgggacaaccgccatagcgggagagagggtaggtcaggaagggccggaggggcgcccctccgccatctgcaagtgacaagacttgtggctctctttgtctcccac

SEQ ID NO: 8429 - DNA, 454 bp, Homo sapiens
ccagcctgctcgctgtgctgagggccaggcaggccctgggcactgaggcacgttgtttgctgaaaccaaatttctgtgcttgtgtttttccataattatattagcaggtgggatttttcctcggggaagcagtgggagggggagcgccatggcagtgtccccgcccgctctaagcgtgagctcacactcagctctgcccgcctgccgtaatgattttttaattatgcagccagtgctcggaattgctaatccccctccagccctgcatcccctcctgcaactcacaccccagcccctggctgatgtccctagagtggcggtgcccagccccgtgcccatcactgagtgcttgggacaaccgccatagcggagagagggtaggtcaggaagggccggaggggcgcccctccgccatctgcaagtgacaagacttgtggctctctttgtctcccac

SEQ ID NO: 8430 - DNA, 1114 bp, Homo sapiens
ctggcggccgcgtctgccgcccgggcgcccgcccgggtcccaggccgactaattaggcccggctacctcccgcgccgcccactgcccgctccaggcccgctgcccgctccaggcccgaggtgatggcggctgttcctgccgttctggggcctgtgccccagagctggccgcgtttctcggggcgggagccagctctgctcgcctggcttaacccagacgagcccaggacgccctatccctgaaccccatcgtggcgtgcaggtctgagtaggctctgggccatgccggggtacctggcttggaggctctcttcagtctcgggagagatatgcttatcccaggcggagcggagaaggctgggggatgactgatagggggagtcgggaggggatgttgagccctgaggtgttgcactgagcacggatccagttcctcttggctttgccacaaacacagtgaccttatgtagagtccttagcctcggtttccccgtttgtaaaccatcagcaccagcccattttctcctgaatttgggatttagggagctgggctttgtatacccctcccagtctcctctcttggggggttgctgagggggtggaggtaatgtctggacctagcagggcctgccttactgccatgagccctggatgccagtggccagcctgctcgctgtgctgagggccaggcaggccctgggcactgaggcacgttgtttgctgaaaccaaatttctgtgcttgtgtttttccataattatattagcaggtgggatttttcctcggggaagcagtgggagggggagcgccatggcagtgtccccgcccgctctaagcgtgagctcacactcagctctgcccgcctgccgtaatgattttttaattatgcagccagtgctcggaattgctaatccccctccagccctgcatcccctcctgcaactcacaccccagcccctggctgatgtccctagagtggcggtgcccagccccgtgcccatcactgagtgcttgggacaaccgccatagcgggagagagggtaggtcaggaagggccggagggcgcccctccgccatctgcaagtgacaagacttgtggctctctttgtctcccac

SEQ ID NO: 8431 - DNA, 389 bp, Homo sapiens
cgacacctccctccctcctcctcagcctcccgcctctcgcctgcctcccccacgcctctgcagggagggcctgcggtctgggggcttttgttttccagttttttccacgctcaggccaggcaggcgggtagacactggccagagctgttggaccttgaacagcagacaagacaggtgtcccccttagagctgggacagattctcagctagtggaaccctgggttggtttctcagaggcacaaactgaacctggatggaaccagcccccaccacagcccaggtgcacctgtgggcagcttcctgtttccataggggccctagcagctggcaccagttcctgtctacaccatccccgtcccagtagggccccagactcatacagcccagag

SEQ ID NO: 8432 - DNA, 389 bp, Homo sapiens; identical to SEQ ID NO: 8431

SEQ ID NO: 8433 - DNA, 249 bp, Homo sapiens
ttctctaagcctcattttgctcatgcgggaaatggggatgatcacagatgccattcagagagctgcggagaggtgcagggacgcataaccacttgaagtggtgctggctctggcgcaggctgtttcactgcccagtggaggcaggctgggtggaagagcagtgagctgactgagactgtgctgtggctggggcctgaggaccagtgggttttgagaggggagcctggtgcatgtgtcagaggaactgaa

SEQ ID NO: 8434 - DNA, 878 bp, Homo sapiens
tggactgttttaagatcatttattagaacagtcattcagaagccattgagacatcaggcagcagaaaggcaggtgggatggagcaggccctgtgaaggaccaagaacaaagtaatagccacagttatgaaatttcattttattctgataaagactaatatatgcttgataacctagtgataatccataagtttggtatttcacaacattttttagaaagcacataagattaacattcaaataaggcattatagaaagttttataaagaatgaagtgtttcctataattcttttaaaaaaccttggttcatcttgaaagatcgatgaattttttaaatatcagaagaaaagggaaataaaattttccccccaaaacacataagaaccacttactggcacttgtattttaagtacctgggaaaaaaacggaacagatttttaaaggcaataacgacttgtaagacggcttgtttcatttgatttggcacgaagtaaagtaagagtaaatatgccatggaagacataatcaagtttttcctccatctctcatatttccccacttctaccagaccacacagtacatcagcaaccatcctttagattccaatttttaaatggctgctcagacgacaccaatagagttctttctccttaaaatatggtggcagtgaatgctaacaggtatcaatttctttgatcaggaacaaagaactccttcaggaaactcactttcctggtccttgttaacctatcatgtaaattctttttattggtacacctgtttactaattatgattgattgctatttatgccaagggagcatttcccaggcatgcctcatctatttactaacaacaaagtatgcttacttcatccaca

SEQ ID NO: 8435 - DNA, 1947 bp, Homo sapiens
tggactgttttaagatcatttattagaacagtcattcagaagccattgagacatcaggcagcagaaaggcaggtgggatggagcaggccctgtgaaggaccaagaacaaagtaatagccacagttatgaaatttcattttattctgataaagactaatatatgcttgataacctagtgataatccataagtttggtatttcacaacattttttagaaagcacataagattaacattcaaataaggcattatagaaagttttataaagaatgaagtgtttcctataattcttttaaaaaaccttggttcatcttgaaagatcgatgaattttttaaatatcagaagaaaagggaaataaaattttccccccaaaacacataagaaccacttactggcacttgtattttaagtacctgggaaaaaaacggaacagatttttaaaggcaataacgacttgtaagacggcttgtttcatttgatttggcacgaagtaaagtaagagtaaatatgccatggaagacataatcaagtttttcctccatctctcatatttccccacttctaccagaccacacagtacatcagcaaccatcctttagattccaatttttaaatggctgctcagacgacaccaatagagttctttctccttaaaatatggtggcagtgaatgctaacaggtatcaatttctttgatcaggaacaaagaactccttcaggaaactcactttcctggtccttgttaacctatcatgtaaattctttttattggtacacctgtttactaattatgattgattgctatttatgccaagggagcatttcccaggcatgcctcatctatttactaacaacaaagtatgcttactttatttacatagtgccacgggtttctcttttttcttctcttttttattggcgggggagatggtactataacttgttatttatcagggcagatcacacatttggatcaaaaagaaaaaccagcaagtagatcctaaaacacatttcttaacctgagtcataactgaaaacatagactttaattacattttgttgaaaattcattcaactttggtgcttgtaaaagcacttatgtcaatttttgacacaaatcataaccctcagtacacaggtattttcaaaggaaacaagtcatcttaaagtaatatttttctatatgctaattgatacatctttatagcaaattgaaaattctgagtaaactgaaagtatgcttaacgacaaaataaatacagcatatatggttaacatatacatttcttagtgtaaaggcagcagtgaatttgtgtctcacaataaatctgtaaatccagttgctttctttctggaattttatatagtgtctcaccatgttccacaatgctggaaatgtcttttttggcatcaatctatgcacaaatttctgattacgtattttctccaaatgacatgtaactttttttaacttttccagaaaaatatggaaactttatcaaccacttattaactgaacaaaaagttagattactaccaaatgctcttttaattttgctctaacagatgttttaaaggttcagacatcgctgatgtttttgaggataactgcatacaacacactagatgatttcaaacgatgcatcttagtatccgaatcatttggcacatccttagtatccaaaataaaatcagtagaaataaaagtaatataattttcaaagaattcatacatactagaagtcttaggaaaagcagcttctaaatgcaaggactaggaggtttgcccatcttactattaatagttacacacatttctcctcatggagtaactgaagctttctggcttctttgtggaactttagtttgtaggaaagcatatacatagggccaaatcttgttggtttctgttccggagaatgtttccagcaccccttttttcctaaa

SEQ ID NO: 8436 - DNA, 464 bp, Homo sapiens
ttcttttttttttttccactgttttaaggtcatttattagaacacagtcattcagaagccactgagacatcaggcagcaggaaggaaggtggggtggagcaggccctgtgaaggaccaaggacaaagtaatagcctcagttatgaaatttcattttattctgataaagactaatgtatgcctgataacctagtgataatccacaagtttggtagttcacaacatttttagaaagcacgtacgattaacatttaaataaggcattatagaaagttttataaagaatgaagtgtgtactataattcttttaagaaactttggttcatcttgaaagatcaatgaatttttaaaatatcagaagaaaaggaaaataaatttttttccccaaaaatacataagaactgcttactggcacttgtattttaagtacctggggaaaaaatggaaaagatttttaaaggcaat

SEQ ID NO: 8437 - DNA, 8163 bp, Homo sapiens
tggactgttttaagatcatttattagaacagtcattcagaagccattgagacatcaggcagcagaaaggaaggtgggatggagcaggccctgtgaaggaccaagaacaaagtaatagccacagttatgaaatttcattttattctgataaagactaatatatgcttgataacctagtgataatccataagtttggtatttcacaacattttttagaaagcacataagattaacattcaaataaggcattatagaaagttttataaagaatgaagtgtttcctatatttcttttaaaaaaccttggttcatcttgaaagatcgatgaattttttaaatatcagaagaaaagggaaataaaattttccccccaaaacacataagaaccacttactggcacttgtattttaagtacctgggaaaaaaacggaacagatttttaaaggcaataacgacttgtaagacggcttgtttcatttgatttggcacgaagtaaagtaagagtaaatatgccatggaagacataatcaagtttttcctccatctctcatatttccccacttctaccagaccacacagtacatcagcaaccatcctttagattccaatttttaaatggctgctcagacgacaccaatagagttctttctccttaaaatatggtggcagtgaatgctaacaggtatcaatttctttgatcaggaacaaagaactccttcaggaaactcactttcctggtccttgttaacctatcatgtaaattctttttattggtacacctgtttactaattatgattgattgctatttatgccaagggagcatttcccaggcatgcctcatctatttactaacaacaaagtatgcttactttatttacatagtgccacgggtttctcttttttcttctcttttttattggcgggggagatggtactataacttgttatttatcagggcagatcacacatttggatcaaaaagaaaaaccagcaagtagatcctaaaacacatttcttaacctgagtcataactgaaaacatagactttaattacattttgttgaaaattcattcaactttggtgcttgtaaaagcacttatgtcaatttttgacacaaatcataaccctcagtacacaggtattttcaaaggaaacaagtcatcttaaagtaatatttttctatatgctaattgatacatctttatagcaaattgaaaattctgagtaaactgaaagtatgcttaacgacaaaataaatacagcatatatggttaacatatacatttcttagtgtaaaggcagcagtgaatttgtgtctcacaataaatctgtaaatccagttgctttctttctggaattttatatagtgtctcaccatgttccacaatgctggaaatgtcttttttggcatcaatctatgcacaaatttctgattacgtattttctccaaatgacatgtaactttttttaacttttccagaaaaatatggaaactttatcaaccacttattaactgaacaaaaagttagattactaccaaatgctcttttaattttgctctaacagatgttttaaaggttcagacatcgctgatgtttttgaggataactgcatacaacacactagatgatttcaaacgatgcatcttagtatccgaatcatttggcacatccttagtatccaaaataaaatcagtagaaataaaagtaatataattttcaaagaattcatacatactagaagtcttaggaaaagcagcttctaaatgcaaggactaggaggtttgcccatcttactattaatagttacacacatttctcctcatggagtaactgaagctttctggcttctttgtggaactttagtttgtaggaaagcatatacatagggccaaatcttgttggtttctgttccggagaatgtttccagcaccccttttttcctaaagatgaaacaaaaacaaaacaaacacacacaggtctgagtcttcctaataagctctttcaaagcctttctgtaaataatgatattgtagatataggagtcttggtaagtatagatttgtgtaatcaggagagaaaggcacttggctgggcattggaaaatgtacattttggtttcagttgtgctctctggcttacaaaaatgggtgcttaaaaaaataacagcacctatcatttattttatttattgaacatgcactgtgtgtcaaaggctgtgctacatgctttacatattatagtttgtttaatcctttccaaagctcaaattttcttattttactaataaaatcatccctttgtaatgtaacttagcccaaatcaccaagttggtagtacatttccaaacaggacctataagataccagaacacccatcagccttttttttctacttactcttttgcaaaagctactttctaatacttgagtatctttcctttttgcccaggccaacatttatgttctcctctattccactcttctgaatattaacagaaaggggaataaaaagtgttggttttattgggtttcctattgactgtcttcatttcttcccaggcagatttgtctagcttgtcactagaccagcagccaaagtctattttatttactccagtttcctgtggataacatggtgaagagtgagatcagaatcctgggggtgcttttcaagccacacagattccctccaaagattctggccttcctcttgctaatacccgtcctctagcccatgcgtacacctacgcctacacatatacacctccacatatacacacctccacatatacacgcctacacatatacacacctccacatttacacacctacacatatacgcctacacatatacacctacacatatacagctacacatatacatctacacatatacacctacacatatacacacctacacatatacacacctacacatatacacacctacacatatacacacctccacatatacacacctacacatatacacacctccacatacacacacctccacacatacgcctccacatacacacacctccacatatacacctccacacattcgcctccacacatacacactggtgtaaagactgcataaggacaacctaagaactctggtttatgactttgtgaaaagaggattccttatacctgtgtggcccttcttccgaggttttcagggctttcactaaggacaaaagcattcttcccttgatacctcataaaatttgccacagttaacttaaataacacccactgttttctcggtaagaaacatctgctaaggaaggaaattatgcaaatacagcattcttgggatattagaaaccctcctgcttctaaattcactggcacctggtactgctttcaagggaacaagcttcttaactgttgtaagcctcttgaagagccgatttaaaaatcaagccagtgtcacaagtgggttaattactgagggcacaattgcaggcacctattcgatcctaaatcgtgggtgaacatttgtcattttaatttctgtgtaataaaatggaaccagcttcaacaattggtcctccaaagagtaagggcatcatgttgtttgtaaacatagaccagttactctataatgtcccacagctaaaaggttttttttaaaacaaccaacaatacaactgtcagcatttctaaataacaatgctgactattactaacattcttgcaaataaactttcagtttttagtcaagtctcgctgagttctacgtgtgggagctgagaatgaaaagactgaattcggccgggtgtggtggctcaagtctgtaatcccagcactttgggaggccaaggagggtggatcacttgaggtcaggagttcaagaccagcctggccaacatggcgaaaccccgtctctactaaaaatacaaaaattagcaggacatggtggcacgtgcctgtagtcctagctactggggaggctgaggcataagaatcgcttgaacctgggatgaggaggctgcagtgagctgggatggcaccactgcactccaacctgagagagagtgagactccgtctcaaaaaaaaaaaaaaaaaaaagaaagaaggaaagaaaaagaaaagaaaagcttgaattaacagcaaaaggcagcaaaagccagaaggagcctagaaagacttctaaaatatctcctaagacaggggcccgtgtctttcacttcatcttcgcagctttccttaacttcccttactactttttttttttttttttttaagacagggtctcactctgacacccgcgctctagactgcagtggagcaatcatagatcactgcagtcttgacccactgggtccaagcaatcttcttacctcagactccccagtagctgggactataggcatgtgccaccatgcctggctaatatttttttttatgttttgtagagacagagtttcaccatgttgcccaggctgatcttgaattcctgccttttcgatcctcctgccttagcctcccaaagtgctgggattacaggcatgagccactgtcccaggccccttcccatattttgatattttgacagaacgaatcccaacaacccctggtacttcactgctttgggggattatcattcatagccttgcagtggtggtgttatctgcccagcaacaatgcattctcccttcctctggttacctttgggaaataacctctccaccaaactcagtcgacgaggttcaggagagactgtccccactccccatcttcaaggatggacatgatcagagctaatcggtgccgaccccaagacttttgctggcaaaagaggctctttgctgctggggtttctggctggtaggaggtaaactggaaagctgaggggctgctacacagggagggcacacctgagactgaagccagcacaggacaatggagcggagtgactgacgcctgatgataggtgtttttgaacacctggacccatccatctatctttgacttttcagttacattaccaataaattccccttttgcttaacctggtgtgaattaggttcttagttaatataagcacatatcatattgtatgataaatactgtttacccagctccccacctcacccacaaacatagcttcttggagcctgacagggactggatctaattgtccatgtggaccaagggcctagcacagtgtcaagagagtgaacaataattgctgacaatgaatgatttaatagacaccagggctgttgtaggactttccaggatctctcacttaattcttttaacaaccctataaagcagatgctatttaatattgcctgattttacaaataagggatttgtggcatggaggttaaatagcttgcctagggcaaaagagacggtaattttcagaaccagcctcattaaacaaatgacaaaattatagtaacagctactacaaaaaatggtttgccaaccttgtaattttatgctccagaaaaaattaagatggtttgaaaggccaggcatggtggctcgtacctgtaatcccaatgttttgggaggccgaggcaggagggttgcctgaagccaggagtttgagtagcccgtgcaacatggcaagagccccagctctaaaaaaaatttttttaattggccaggtctggtggcacgggcctatagtcctggctacttgggaggctgagacaggagaattgcttgagcccaggaattcaaggctgtagtgaactatgaaagaaccactgcactccaacctgggtgacagagtgagaccctgtctctaaaataaataaataaataacagtttggaaactattgcttcagatttctactgcatacatacgctattacaacaacaataacaatagctaacatttctatagtgctttctatgcgtcaggcccagttctaagagttacccatattaatctttcaaacctttattctcttccccaatttacagaggaaaaaacaggcagaggttaagcagaaggtgaaggtgaagatggtgagctgggacttgaacttaggtattctggctccagagtctgtgttctgcccaagatactgttctgccctgatcaggatcagtattcaataagtacataaatgaaaggggaggcagtcaatcctctgtaagaagcaggaaggctcagtaagaaaactggagtatttcttagcctaagtcaaatactcattcagtacggttcctatacgtgttgcagacaaaacaagagcagacaaaacaatgttaaaatgtaagcttttaaagactgctagccaattacatagtctgagggattagctgccatctgagattcttccacaccatagcatcctgtattggcaaatgtggtgggcaatattaagtttgcctccccagcattcattccagccctgcctcccctaccgacaatccccagcttacaattattcaatgcaggatttttcagctttatgatggtgcgaaagcaacatgcattcaatagaaattgtacctcgagcacctgtacaaccatcctgcttttcaatttcagtacaatattcagtaaattatgtgagatattcaacactttattacaaaacaggctttgtgttagatgatttcgcccaactgtaggctaatctaagtgttctgagcatgtttaaggcaggctaagttatggtgcttggtattttcaaattacaatggatttattaggatgtaatttcattgtaaattgcggaacatctgcacatagcagagtatggatgagactgtcgcactgccaactctagaagtggactagtcagtgtaatcagtggaatccttcccaccccaatgactggttctgcagtaggcagtaacccaagcctgtaacagttagtgccaggcattccctgactgtagttcaagttggctccatccgagtggtgctctgggcttctattcactggaggaaaggttacccctcagcccttcatagaagaggaagccctggctgttcctacaaatgtctgctaccatgcaggaagcctaaggacaaagccaatacacacacaggaaggcaaaaccaagagaacggctacactgatcaaacccaggtgtgactgaagcccaacctaccttctggacttctgttacacaagctaatgtatttcctttattacttaagcccatgtgaactgggtcttttggcattttagcatttcagctgtagaggaaggaaaatcaaaactagacttagtgcaccactacgcaagagaagttctgaaaagcaaaaactcactggtaatattccaggactggctttgtttggtcttcataagcctttagtctcttgataaccgtctctggtttatcatcctcacgctgaatgagaggctccccagtcaggtcatcaatgccctaaacaggattagaagagactagtatcagatatcatatttctgaaagatattttcataagcagttcaattatttttaaacagacatctctgtgcaagtgccaagcacaaaaatgtgctaacttttaaaaaaatggaatccaacctcaaaagagatcatcgcaacagaaacagggtacgccagtttcatttctacagttatcagtcactttagccttagagtaaaaggttttctaagcagcctctaagtaagttcatatatattcaaaaagattcagctataaacttggaatttcaactgcaagtcctaaataaaccaaggtgttatgaatctctatcagcgcaactcctaacacactccttggcagagcaggaaatcaacaaatgtttttgaatgagtaacaaacccctgctgctcctggggcaacctttcgcaccaagctcagtggacttgatcagtcaactctaccaagtaacctgagaatataccctcaggagttttggtcagaggatttccaagttcactcaacttatgtctgttagggcaagaggactcagggacagtctgctatgtgacagttccacaacaactactcaccacagttttgggagggttgaattcaatgttatagactcggccactggcgggatgaatccagcgagcagtaaggcgttgtttaatgacctcaaagggcacattcaggttaatcactgtgtcgatctgataagctctatctagggcttctgcctgtggaagtgtccttggaaaacctttataaag

SEQ ID NO: 8438 - DNA, 297 bp, Homo sapiens
ttttttttttgagacggagtctccctctgtcgcccaggctggagtgcagtggcacgatctcagctcactgcaacctccgcctcccggattcacaccattctcctgcctcaacctcccgagtagctgggactacaggcgcccgccaccatgcccggctaatttttttttttgtatttttagtagagacggggtttcaccgtgttagccaagatggtctcgatctcctgaccttgtgatccgcccgcctcggcctcccaaagtgctgggattacaggcgtgagccaccgcgcccggcct

SEQ ID NO: 8439 - DNA, 966 bp, Homo sapiens
tgatttacacttaggcatgacagtttattcagtgctatatatggaaaaatcagtgtttatattatttagtgagctaaaaacaaataaaaagcaggagggggataagggctctacaaagcatactggcttttaccagaagctttaagcacagctacactattttaactgtttaaaaattttttaaccataacttccaagatgaaaatctttaactgcaaagatagaaaagctatttctacagtttatcagggcctgaggatttatttttatttttatttttattttttggtcaatgagaagacacaacatattctaaaatacaaattcttgctgttggttgcaactatagcaatttaacataatttgagatctataattacaatgatttgttgttagtatagggcagttttgtcacaagttatgaggatccaaaatatcttgctagaatgccattatatatagctgggggaaaagtagccatagggtggggtttagagatttgagccagtatttaaactatttgaaatggaactgacagaaatttctggatggtgctaacaactgctagtttgcatttcccacagtacacgctgcttacaaaaggtatagcaaaataacttttactctataaaataaatcagttgaggtgctgttctccctggcttttttttttgagacggagtctccctctgtcgcccaggctggagtgcagtggcacgatctcagctcactgcaacctccgcctcccggattcacaccattctcctgcctcaacctcccgagtagctgggactacaggcgcccgccaccatgcccggctaatttttttttttttttttgtatttttagtagagacggggtttcaccgtgttagccaggatggtctcgatctcctgaccttgtgatccgcccgcctcggcctcccaaagtgctgggattacaggcgtgagccaccgcgcccggcct

SEQ ID NO: 8440 - DNA, 508 bp, Homo sapiens
ggctcactgcaacatccaccttccgggttcaagtgattcccctgcctcagcctcctgattagctggggctacaggcgcgccatccagcccgagtaattttttgtattttagtagagacggggtttcaccatgttggccaggatagtctcgatctcctgacctcatgatccacccgcctcggcctcccagagtgctgggattataggcgtgagccaccacgcccggcctagattccagtttttaaatggcttctcagatgacaccaacagagttctttccctttaaaataaggtggcagtgaatgctaacaggtatcgatttcttggatcaggaacaaagaactccttcaggaaactcacttactggtcctggttaacctattgtgtaaagtctttttattggcacacctgtttactaattatgattgattgctatttatgccaagggagcgtttcccaggcatatctcatctatttactaacgacaaagtgtgcttactttatttaca

SEQ ID NO: 8441 - DNA, 304 bp, Homo sapiens
ttttttttttgagacggagtctccctctgtcgcccaggctggagtgcagtggcacgatctcagctcactgcaacctccgcctcccggattcacaccattctcctgcctcaacctcccgagtagctgggactacaggcgcccgccaccatgcccggctaattttttttttttttttttgtatttttagtagagacggggtttcaccgtgttagccaggatggtctcgatctcctgacctcgtgatccgcccgcctcggcctcccaaagtgctgggattacaggcgtgagccaccgcgcccggcct

SEQ ID NO: 8442 - DNA, 6647 bp, Homo sapiens
gttatctatgactttctggctgtggatgatataaacggggacaggatccaagatgttctttttctttataaaaacaccaacagcagcaacaatttcagccgatcctgtgtggacgaaggtaatttcattttatatgaaaaaggcggagctccctgtagaaagaggaatcgtcattttgggtcaccctctcgctttcagtgtttgggggaagcagatggtggtgtttctggaacccatctcgtcatccttcctggcagaccagaaagaggcctggaagcccagtcccagcactgccctggcccctgagccccgtggggtcagcattagagccccgggagcctgcaagatacaggagatccacctggcgggaggggctgtggcctaggagaggtgtgaggaaaacagacctggaacagcacatgctggggctggccggcctgcctgcccagatggtgcaacagtgaggtgccggtgtctctccctacaggcttttcctctccctgcacctttgcagctgctgtgtcgggggccaacggcagcacgctctgggagagacctgtggcccaagacgtggccctcgtggagtgtgctgtgccccagccaagaggcagtgaggcaccttctgcctgcatcctggtgggcagacccagttctttcattgcagtcaacttgttcacaggtaggccagccaggcagcggggttctcactgagggcctctcacctgagccacctcaccctgagggctaatgccaggaggccgcgacgaggctcagccctgtgatcttgagggtggctggatgggaaggaaggttatggggagaacctccaagtgaggctgcaagcgtgtggaaggcacacgcctcggctgccttcagctgcactgtgtctgttacctcccgttacaccttgctggtgggctgtaacacacaggggcagtccgatgtcacctgccatggggtagcagagaggaggagcggcttggcccccggctgctcctggggtgtcagtggtggcagtgcccagggcgagcccagaacatgaaccagcactcggcccgtcaggggagatcggggcctgtcagtgcccctaagcctgaaggtgcaggtctccgagccccagcggagccggcctcgtggaaggacgagggaaagaatgcgtggtgcacggggccatgtgtgtgtgtgggctccttgcacctcatcgcggtctggaagatttctgtgcctagatttggtgaatgttcatatttcccttacaagctgtcattttaaggatatggaggagaataaagagcaggctgaaaatattttaagaatcaaggaatctgtctttaaaaaaaggtttggatgagattgtatgtgcgtaaggagttggacgaggacctgtggtcagtagatctgcctccgggcgcacacctccattcttgccttctatgtggagggcagatgaaggggccactcagctggggcctgcatggcaccaagggcacgcctgcaaccccagcaggaggcaggggcttcgagaggtgggtgaggtcaggcttcatccactcgggcaggagggtcagcatgggccctagaggttccaggacacgcagataggagaaaaggaagggggaactctgcggttcccaggaatgaggctgtcagcgtttggcatattgccaccgagtctccatacacgggcaggacgtgtgtccaccacctccgcgtgctgctccttcacgagcacaggagtgccgccctcccctcctgttggcatctgctctgagtgtgcagtgagccgtgggctcacgagggtgatgcctcaacaggagcctgcctgtcacaggccttgcagttgccgggctgctgttgaaggggactcagggccacgttccgtgaccgtgtgcttgattctaggggaaaccctgtggaaccacagcagcagcttcagcgggaatgcgtccatcctgagccctctgctgcaggtgcctgatgtggacggcgatggggccccagacctgctggttctcacccaggagcgggaggaggtacatcccagcctggctctgctcccaagtcacgaggccacctgccacacggccctgctctacctccccatctgctgccacttcccagacaggattcgggtctgaccacttgccggggactcgcccagagccccacgttcccaactcccatagacccagcatactcagggggctccatctctaccaggcagctttggggcctccccaagaatggtggagtacacacttcccatttgtgctgttgcagtgttgggggtgaagctctgagggctgggagcacctgtgaggcactggggctgccctgcctgcctcatgtgccccgtgcagtgtggaggcaccaaccatcgtggcagactctctgatgtcagcgtgtctttcctcaaaaccaagagcctgtgggccccttacccttccacatctcccattgtagagtgccccgcccccaggctcacgtccctctcttcctgggccttgtgtcattgcagccccagggctcaggtccttctcttcctgggccttgtgtccttgcagccccaggctcaggtccctctcttcctgtgtcatcctgtgtcattgcaggttagtggccacctctactccggcagcaccgggcaccagattggcctcagaggcagccttggtgtggacggggaaagtggcttcctccttcacgtcaccaggacaggtgcccactacatcctctttccctgcggtacgttgtttctgccacatccctggccagcctcactcgtggagcatgactgccctgcggctcctcaggtcctgcttctgctctcgaggtgctggagtcaggaagcccaggggcctggctccatgtggcactgcgtgcccctggtccgggttcacagcgtgaccctggtgacctcgggcccttctgtgttttgaatagcaagctccctctgcggctgctctgtgaagggtctctacgagaaggtgaccgggagcggcggcccgttcaagagtgacccgcactgggagagcatgctcaatgccaccacccgcaggatgctttcccacaggtgggtccgggccgcagcctttctccatgcagagcgcccccccatggctctgctcgcctgcctcagcgttcggacaatctgtgtggagcccagagcagccccccggcagggaggtgctcggggtaccgcaaggtcaccctgggctcagatgtgagaaatggtcaaataaaagttgagtaaagagaagaaaggttcccgacgctgtgcctgtctgtctccacggaaagtgggggtctttcttctcttttctgttttttttttttttggttgttttttttttttaagacggagtcttgccctgtcccccaggctggagtgcagtggtgcgatctcggttcactgcaacctccgcctcccgggttcaagtgattctcctgccccagcctcccgagtagctgggattacaggcgcgcacctccacgcccagctaatttttgcatttttagtagagacggggtttctccatgttggtcagactggtctcgaacttctgacctcgtgatccgcccgcctcggcctcccaaagtgctggaattacaggcatgagccaccgcgcccagctcttctcttttcaagctgtagaactgagaaacgggttatgggggcctaagaggagcaccctgagacgggcggtgccagagcctccactgggtgcctgaggccgccccggggacccggcgcccctttctcccactctcctgtctagctctggagcagtgcgctacctgatgcatgtcccagggaacgccggtgcagatgtgcttcttgtgggctcagaggccttcgtgctgctggacgggcaggagctgacgcctcgctggacacccaaggcagcccatgtcctgaggtacagggtttccccaaggaccgcgcaggtgctgcaccccttcccggcatcccgggcacatcccgttggctggcgaggagacagcgctgggggtggggccggaggccgtgtgctgctgcccgggcttcttgcctgtctctggtacttgccccttgccccagacgtcggctccgtgtcctgggccctggtccagatgtggccatgggagactgaggggcggacgtgttcctgggtgcttccttcatctcagtctcctcactgagacccctcgtgagcgcttcctccatattgttccagaaaacccatcttcggccgctacaaaccagacaccttggctgtagccgttgaaaacggaactggcaccgacagacaggttcgttgttcttccttcggaggtggcacctttgttcttagctgaggatagactggtctgaaagcagacggggctgcggcccaggaggctgctgccgtcagagctgctgagaaggttctgcctccctcagagcatctgcctccagggctggcatggctgagggcacgtgtgcctgtgcaagcctcgagcttttcccggtagcccccacgttggcccccacagtgtcccctccctccccagatcctgtttctggaccttggcactggagccgtcctgtgtagcctagccctcccgagcctccctgggggtccactgtccgccagcctgccgaccgcagaccaccgctcagccttcttcttctggggcctccacgagctggggagcaccagcgagacggtacgggagccaccctcggagcagccatgctgggagccggggccagagacccaggctggagctccaccgtggagtgcccagaagctcatcggtgcctgggcaacctcacataagttgaagtccagtgacagtcaggatgaggtggtgcaagctgaggcaaagtgaccttagaggggtccagcgagaaggggctgatggccttcggtggataggggcgcacacagccatgccctgaagggagtggctgccggcaaggaccagtgtcaggaccaggtggggtgggaggacctgggaggtggccacagaactgggggctggcatttgggggacccagatagggcccctagcagacatagagctccaggcacggtcactctgacagcagtgtcctgtgggagtgctcagtgaagggcgtggggcccattgctggttctcgctccaggagaccggggaggcccggcacagcctgtacatgttccaccccaccctgccgcgcgtgctgctggagctggccaatgtctctacccacattgtcgcctttgacggtgagtgtggcctcggccagggacccgggtgttccgcggggtctgccctggctggtcctgagccgccctgacagctgtgtcccccaccctgcagccgtcctgtttgagccaagccgccacgccgcctacatccttctgacaggcccggcagactcagaggcacccggcctggtctctgtgatcaagcacaaggtgcgggaccttgtcccaagcagcagggtggtccgcctgggtgagggtgggccagacagtgaccaagccatcagggaccggttctcccggctgcggtaccagagtgaggcgtagaggcacgccagccagagcctgtggagagactccgcctgctgacactaaacgtcctgggaagtgggcccttccctgggtctctgcactgactcccccactcctgaccctggtgatggtcgccactgggcagcagcagccttaccagtcctccatgatcacacccagggacctgcatgggtgaggggacaccctgggcctctctcccgcccagcatcctccctgagtccccacacagggcctcactctgcaccccaccagggtcccgctcacaccaggcagccttcatagtggtctccctggccaccttgggcagagctgggtcatgcagcaccccatccttacccggtgccctctccttgccagcttctccccaggccagagcggccatcgcgtagaaagaaccagggtgtccccgggacaggccgtcccccaccccatcctgtagaagtccattccccttttccctcctgtgctctgtcccccaaggagtcatggaactcagggtactgggcctcaacgggaacctgagacagctccagcttcgcagcccttcccggagctacagggggatcctctagcatggggggtgtgacttggttcctttgaccaggtcctgtgaggaagcctggagcaagggtctcccccagcaggatgggtggggcctgctctggagctgagcccgtggccgctcacaggtgtccttagtggtgttgcagctgtctactggctgcatgtgctgtgaatatcccaaggaactggctgtggaatgcgtgtttgggtcagtctgtgccctctcagtagacactggagctgctctgtccctgaagaggccccgtgccccaggcatggcaagcgcctgcctctccccttccggtgctcacacgcccacgccgtgccacccgatgcaggactcacctctgtgccttgctgctcctgaggcccaaggggcaggcccaatggtgctctgtactgctcgggccgcccaggtcacagagcctgagcttcgtagccaaagcagcctgatgacccacccaccaaggaagaaagcagaataaacatttttgcactgcctgaaaaaccccggtggtcaggcgtgagcctagcgtg

SEQ ID NO: 8443 - DNA, 16579 bp, Homo sapiens
aggtccacctgggcttgcgaaggcacagattccccgtccacagctcacgaccagatgcaccagcaggagtccacatcgaggacgtcctccgggcactcccacgaccaggtaggtgaggactggtgggcccgtggctggatgggtggtgttttcagattcctggtggtggcggttgatgcccctccttgagtagtgctttcctgcacgctttctttgatgctctagctcccaccagatgaggacagctgaggctcagagctcgaatttcttggctgcaattttaaagctcttaagtttaaagccgtaaagatagaaatccagaattataacattctggttcttactccgtttttttctttcctttgccaaaggaatctatgttttatttatttattatttaaaaaaaatttttctttttagacggagtctcgctctgtcgcccaggctggagtgcagtggcgcgatctcggctcactgcaagctccacctcccgggttcacgccgttctcctgccgcagcctcctataggcgcatgccgccacacccagctaattttttgtattcttagtagagacggggtttcaccgtgttagccaggatgctctagatctcctgacctcgtgatcctcccacctcggcctctcaaagtgctgggactacaggcgtgagccaccgcgcccggccaggaatctatgttttaaacatttcacacatcccttccttggggacatggtggctagatttgctgaattaatggccgtctcctcttcttccagccctggccccagcccctcaggccctggcaatgaggcactcctacgttctgttgctggctttttccctagttaccttttccagacaacccacgtcctgccttccccacccccatgccagctgcttgggtttaatgaggtccttggtcgcgactcattgtttgattttccgtgttctaactcactgcctttgataagcacaccttttctgacttccaagatgttaaaacttaagcctcagcacctaggagaatgcacacattttttcttattgtggtaaaatgtacataacgtaaaatttgccattagtaacatttggtatgatcacagcattttgtaaccatcaccactattttcatcatcccacaaagaaaccctcagcccatagcagtcattcccgactctccctgttccgcacctggcccccacgagtctactccctgcctctgtggatttgcctgttctgggcgtttcacactacaggggaccttcgtgtcctagtcattgcatttagcataattttataatgtgtcagaattttagtttttaccatggctgaaaaacacaccactgcattatggtgtaattatgcactgtattatggataggccacattttgtttatccattcatatgttttgttttgttttgtttttgagaaggagtctccctctattgcccaggctggagtgcaatggtgcaatcttggctcactgcaacttccacctcccgggttcaagcgattctcctgcctcagcctcccgagtagctgggattacaagcgcctgccaccatgcccatctagtttttttgtatttttagtagagatggctttcaccatattggccaggctggtctcgaacgcctgacctcgtaatcctcccgccttggcctctcaaagtgttgggatcacaggcgtgagccactgcgcccagccgatacgttcatatgttgttggacatctgggttgtttctacattttggctgttgttaataatgaaccaatatgaacatttatttacaagtttttgtttgagcctctgcagtagggtttttttttgttttgttttttttgagatggggtcttgctctgtcacccaggtggcagtgcagtggcgtgatctcagctcactgcagcctccacccccctgggctctagtgatcttcctaccccagcctccgggtagctgagaccacgggcgagcgccgccatacccaactaatttttttggtatttttagtagagacagagtctcgccacattgcccaggctgttctcaaactcctgaggtcaagcactccactcactcggactcccagagtgctgcgattacaggcataagccaccatgcctagccaggtttttttttttttttttttttttttttaagagatggggtcttggccaggcgtggtggctcatgcctgtaatcccagcagtttgggaggccagtgcgggtggatcacgaggtcaggagatcgagaccatcctggctaacatggtgaaaccccatctctactaaaaatacaaaaaattagccaggcatggtggcggacgcccatagtcccagctattcgggaggctgaggcaggagaatggtgtgaacgggggaggcagagcttacagtgagccaagatcatgccactgcactctagcctgggcgacagaatgagactccgtctcaaaaaaaaaaaaaaaaaaagagatgggtctctctgttgcccaggctagagtgcggtggcatgatcagagctcactgcagcctcgagcaatcctcaagggatcctcctgctttggcctcccaaagtactggcattacaggcatgagccaccgtgctggccatgtctctgtttttctgttttttgttttttttttttttttgagacagagtctcactgtcgcccaggctggagtgcagtggcgcgatcttggctcactacaacctctgcctcccaggttcaagccattctcctgcctcagcctcccgagtagctgggactacaggcgcccgccaccatgcccagctaatttttgtatttttagtagagatgcggttttcaccatgttgtccaggatggtctcaatctcttgaccttgtgatctgcctgcctcggcctctcaaaagtgctgggattacagccgtgagccaccgtgcccggccggaaagtctgtttttaattcttgtgggtgtacacctaggactggacttgctggagagtatggtagttctgtgtttaactttttgaggatctgccagactgtgtttcacagcagcggcatcattttacagtcccaccagcaacgtacgatgttctgatttctccacatcctcacccagactcgtcgtttttcccttttaaaattaaagccattctagtgtcatacacaggttattaagtgagttacttttattatataattaggcaaagacaaagtccgagtgaacagtttaaaacaaaagccagcagtcccttatctctctgtcttcctgacccttccccagagggtgcggctttcagctcagcttttcctcgccttccctcgctgacctccgcacgccctctttcatctttcacccctccctttgctgtgaactgttgacttcctttttgggtaggtgaaggttttacctcaaatctgcatgatcacgtccagtctctcagtatgatgtgttaggacatcggtttggttgtttaaaaggaaccaaaataacaaaaatcttgcctgagacaaaatggaagtttgtttttttctcgttttatacagtcgaagcagctcaggctgggtggtggtggttggcagatatcaggggccctgtgcctttcccatgttcaaatgtgttttccgttttggtttctaagacggcgactgccggtttccccaccgcatccacccccggtccggccagcaggaaccaggggaaggagagggcatgtttttcccctcagaattggggctcagaagttactcccagcaccgagctcactcaacacagctgtcccctgtcctcccctgcggacttctgtttgaatatattttattttatttttttctagttagtctgtgcttatccatgaacatattttattaataataattaggtagtgtttgaatgtttactgtgtatcatatgatcttataagtactttatatgcatttaatttttttttttgagacggagtgtcactctgtcgcccaggctggagtgcactggcgtgatctcggctcactgcaagctccgcctcccgggttcacgccattctccagcctcagcctcccaagtagctgggactacaggtgcccgccaccgtgccctgctaattttttgtatttttagtagagatggggtttcaccgagttagccaggatggtcttgatctcctgacctcgtgatccgcacgcctcggcctgccaaagtactgggattacaggtgtgagccaccacgcccggctacatttaattatttaatccttagaacaggcttctaaagtagatattgtttgttttacagataaggaaactgaggcacagttcagtcaaagcacatgtcctggtcacacagctagggaggtgcaagcctgcccgcccagagcccatcttcactccgggtactttgaattttgggtctgtggccctccagggagtccatgtgtgcgcacctgggtcaccttttccatctgtgcttgaggctggtggaaggtggctcagatatgctcagaggctgagtaggtggggcttagttaacactgccctggagctcattgagcatttcctgggttcggcaggcaggaagcaccagcgtgttctggatgaaaatagttcctgcctgctggctctccacagctaactcgcctttccacactaattagagaccttcttaagtataatctgttaagactgacaccctaaacatttatttagcttttatttcctgggctggtggcccatagttagagctgcagccagtccccaagaagccgacgccagcagacccctctgtgctgcagctttgtgccgtgggactgctggcctcgccgacctcttgctttatcgacacagtgaccaggagttaaactttgggatgtgcccgtgatgttggaccacaaggacttagaggccgaaatccaccccttgaaaaatgaagaaagaaaatcgcaggaaaatctgggaaatccatcaaaaaatgaggataacgtgaaaagcgcgcctccacagtcccggctctcccggtgccgagcggcggcgttttttctttcattgtttctctgcctttttgtggtgttcgtcgtctcattcgtcatcccgtgtccagaccggccggcgtcacagcgaatgtggaggatagactacagtgccgctggtgagcctcggcttccccgcccagtggggtccaaagcagctcttcccaggggatggggcggagggggcagaactgtgtctgcgagtctagaagtggcctttaaacagtgaatcaatcccaagaggctgccagttctatgtccaaggttttcccggagttttagggagcgatagaccagcctttttatttttgagatggagtttcgctcttgttgcccaggctggagtgcactggcacaatctcagctcaccgctacttctgcctccggagttcaagcgattctcccgcctcagcctcccaaatagctgggattacaggcgtgcagcaccacgcccagctaatatttgtatttttagtagagaccgggtttcaccatgttggtcagggtggtctcgaactcctgagctcgtgatccgcccgcctcagcctcccaaagtgctgagattacaggcgtgagccacagcgcctggccctaattttgtatttttggtaaagatggggttttaccatgttagccaggctgctcttgaactcctgattttaagtcatcctcctccctcggcctcccaacgtgctgggattacaggtgtaagtcaccacacctggcccaattcagtgatttgtagtcagtttgtagagttatgtagctgtcagtacaattccgttttagaatatttccatcatccctaaaagattgctcaagaggctgggcacagaccgcatctctacaaaaaatacaaaaatcagccaggcgtggtggcatgcagctgtggtcccagctacttgggaggctgaggtaggagtatcatttacacctggaaggttgaggctgcagtgagctgtgatcgtgccactgcactccagcctgggtgacagagagagaccctgtctcaaaaagagaaaattcctcattatctttgccatcactccctgttccctcctctcctagccctgggcaacctagtctcctgtctccaaagattagtctttttatttttttagacagagttttgctcttgttgcccaggctggagtgcaatggcacaatctccgctcatctcaaccgccacctcccaggttcaagtgattctcctgccccagcctcccgagtagctgggattgcaggcatgcaccaccacgcccagctaattttgtatttttagtacagatggggtttctccgtgttggtcaggctggtctcaaactcccgacctcagatgatctgcccgcttaagtctccaaaaagggctgggattaccggcgtgagccaccgcgcccggcctctagacatttcttagaagtgaaatcatacagtatgtaagtgaaggagtgtgacttccttaacttagcgtgatgttttgccgttcgtttgtgtcgtggtctgtctgtgtctttccgttgctgagcagtgctcctgggagggttggctgacgatcacctggatggctctcagttgagactcttatgaataattctgccgtgaacattcacgtgcagatcttcgtgtggatatgttttcatttctcttgggtagattgctaggagtggaattgctgaaccctatggtaagtttatgtttaactttctgaggagctgacaagctgttttctaaagcgactgcaccatttgactattttccattcctactacaatgctgaggaggcctttagtttcttgttattgtctgtcttcttattacactcatgctagtgggtgtgaattagaatctcccagtgactgaaaatgttgggtccctcttttcgtgtgagttttagccattcttgcatcttctttggtgaatgtctattcttgcatcttctttggtgaatgtctattcttgcagtcttttgcccatttttagaaattaaaaataatttatttttatttatttatttatttattttttgagatggagttttgctcttctaccccaggctggagtgcaatggcgcaatctcggctcactgcaacctctgcctcccaggttcaagcgattctcctgcctcagcctcccaagtagtagctgggattacaggcacaggctaccatgcctggctaatttttttttttttttttttgagacagagtttcgctcttgtttcccaggctggagtgcaatggcctgatctcagctcaccgtaatcgccacctcccagattcaagtgattctcctgcctcagcctcccgagtagctgaaactacaggcatgtgccaccacacccggctaattttgtatttttagtagaaacggggtttctccatgttggtcaggctggtcttgaattcccgaccttaggtgattggcctgcctcagcatcccaaagtgctgggattacaggcacgtgccaccacgcttggccgtaacttttgtatttttagtagatgcgaggtttcaccatgttggccaggctgatctcaaactcctgacctcaagtgatccgcctgccttggcttcccaaagtgctaggactaccggtgtgaaccaccacgcccagcctttccactctcttgatagtgtccttcgatgcataaaagcttttagtttcaatgaagtcttttttttttttttttttttttttttggagacagtcttgctctgtcatccaggctggagagtgcagtggcgcgatctcggctcactgcaacctccacctcccgggttcaagcgattctcctgcctcagcctcccaagtagctgggattacaggtgcccgcctccatgcctggctaatgtatgtatttttagtagagacggggtttcaccatattggccaggctggtctcaaactcttgacctcaggtgatccacccgcctcggcctcccatagtgctgggattacaggcgtgagccaccgcactcagcctcctgtgcttttgtatcaaagaaaccatcaccagatcccttgtcatgaagatttttcccgttttttttttctaagagttttataattttagctcttacgtttaggtctttgattcattttgagttcatttttgtgcatgacgtaaagattcaacttcatgctgggcgcagtggctcacacctgtaattccagcagtttcagaggctgagacaggaggatcacttgaggcctcgagttcaaggccagcctgggcaacgtagccagaccctgtctctaaaataagggggacggggttcaactttattcttttttttttgtttgtttgtttttgagatcgagtctcgctctgtcgcccaggctggagtgcggtggctcaatctcaactgactgcagcctccacctcctgggttcaggcgattctcctgccttagcctcccgagtagctggaactataggcgcccgccaccacgcccggctaatttctgtatttttagtagagaaggtttcaccgtattagccaggcttgtctcggactcctgaccttgtgatccacccgcctcggcctcctaaagtgctaggattacaggcgtgagccacctcacccggcctattttttttttttttttttattgatcattcttgggtgtttctcgcagagggggatttggcagggtcatacgacaatagtggacggaaggtcagcagataaacaagtgaacaaaggtctctggttttcctaggcagaggtccctgcggccttccgcagtgtttgcgtccctgggtacttgagattagggagtggtgatgactcttaacgagcatgctgccttcaagcatctgtttaacaaagcacatcttgcaccgcccttaatccattcaaccctgagtggacacagcacatgtttcagagagcacagggttgggggtaaggtcaccgatcaacaggatcccaaggcagaagaagttttcttagtacagaacaaaatgaaaagtctcccatgtctacttctttctacacagacacagcaaccatccgatttctcaatcttttccccacctttctcccctttctattccacaaaaccgccattgtcatcatggcccgttctcaatgagctgttgggtacacctcccagacggggtggtagccgggcagaggggctcctcacttcccagtaggggtggccgggcagaggcgcccctcacctcccggagggggcagctgggcccggcctatttttttgtttttgttttttgagatggactccagctctgtcggccaggctggagtgcagtggtgcaatctcgctcactgcaacctctgcctcctgggttcaaacgattcttgtgcctcagcctcccgagtagctgggactacaggcacgtgctactacacccagctaattttttgtatttttagtagagacagggtttcacacgttggccaagatggtctcaatctcttgacctcgttatctgccctcctcggcctcccaaagtgctgggattacaggcgtgaggcaccttgcccggccaacttcactcttttggtgtttgattttagggcataaagtttatcacttgagtccttgaatgaaaggaagtgtaaaccctgacgagtatggagtgtggactgtctagatgccccctggtctagggagggatttatccctgaacagaaggtgccagaacatccaattcttaatgcccagatgtcctgcttgttcctttctgaaggttaacactaggcattgttgcccaccccctggttttcacgaaggaaattactcatcctagtgaggaagaagccaccgtcctcgttgggtgccctcacagtggcaggttccatgtagcagagaagtaggtcgtgctggacctgatcgttcctggaaaccaggcatggcccgcggagtatagtctgtggttttctctttcagttatctatgactttctggctgtggatgatataaacggggacaggatccaagatgttctttttctttataaaaacaccaacagcagcaacaatttcagccgatcctgtgtggacgaaggtaatttcattttatatgaaaaaggcggagctccctgtagaaagaggaatcgtcattttgggtcaccctctcgctttcagtgtttgggggaagcagatggtggtgtttctggaacccatctcgtcatccttcctggcagaccagaaagaggcctggaagcccagtcccagcactgccctggcccctgagccccgtggggtcagcattagagccccgggagcctgcaagatacaggagatccacctggcgggaggggctgtggcctaggagaggtgtgaggaaaacagacctggaacagcacatgctggggctggccggcctgcctgcccagatggtgcaacagtgaggtgccggtgtctctccctacaggcttttcctctccctgcacctttgcagctgctgtgtcgggggccaacggcagcacgctctgggagagacctgtggcccaagacgtggccctcgtggagtgtgctgtgccccagccaagaggcagtgaggcaccttctgcctgcatcctggtgggcagacccagttctttcattgcagtcaacttgttcacaggtaggccagccaggcagcggggttctcactgagggcctctcacctgagccacctcaccctgagggctaatgccaggaggccgcgacgaggctcagccctgtgatcttgagggtggctggatgggaaggaaggttatggggagaacctccaagtgaggctgcaagcgtgtggaaggcacacgcctcggctgccttcagctgcactgtgtctgttacctcccgttacaccttgctggtgggctgtaacacacaggggcagtccgatgtcacctgccatggggtagcagagaggaggagcggcttggcccccggctgctcctggggtgtcagtggtggcagtgcccagggcgagcccagaacatgaaccagcactcggcccgtcaggggagatcggggcctgtcagtgcccctaagcctgaaggtgcaggtctccgagccccagcggagccggcctcgtggaaggacgagggaaagaatgcgtggtgcacggggccatgtgtgtgtgtgggctccttgcacctcatcgcggtctggaagatttctgtgcctagatttggtgaatgttcatatttcccttacaagctgtcattttaaggatatggaggagaataaagagcaggctgaaaatattttaagaatcaaggaatctgtctttaaaaaaaggtttggatgagattgtatgtgcgtaaggagttggacgaggacctgtggtcagtagatctgcctccgggcgcacacctccattcttgccttctatgtggagggcagatgaaggggccactcagctggggcctgcatggcaccaagggcacgcctgcaaccccagcaggaggcaggggcttcgagaggtgggtgaggtcaggcttcatccactcgggcaggagggtcagcatgggccctagaggttccaggacacgcagataggagaaaaggaagggggaactctgcggttcccaggaatgaggctgtcagcgtttggcatattgccaccgagtctccatacacgggcaggacgtgtgtccaccacctccgcgtgctgctccttcacgagcacaggagtgccgccctcccctcctgttggcatctgctctgagtgtgcagtgagccgtgggctcacgagggtgatgcctcaacaggagcctgcctgtcacaggccttgcagttgccgggctgctgttgaaggggactcagggccacgttccgtgaccgtgtgcttgattctaggggaaaccctgtggaaccacagcagcagcttcagcgggaatgcgtccatcctgagccctctgctgcaggtgcctgatgtggacggcgatggggccccagacctgctggttctcacccaggagcgggaggaggtacatcccagcctggctctgctcccaagtcacgaggccacctgccacacggccctgctctacctccccatctgctgccacttcccagacaggattcgggtctgaccacttgccggggactcgcccagagccccacgttcccaactcccatagacccagcatactcagggggctccatctctaccaggcagctttggggcctccccaagaatggtggagtacacacttcccatttgtgctgttgcagtgttgggggtgaagctctgagggctgggagcacctgtgaggcactggggctgccctgcctgcctcatgtgccccgtgcagtgtggaggcaccaaccatcgtggcagactctctgatgtcagcgtgtctttcctcaaaaccaagagcctgtgggccccttacccttccacatctcccattgtagagtgccccgcccccaggctcacgtccctctcttcctgggccttgtgtcattgcagccccaggctcaggtccttctcttcctgggccttgtgtccttgcagccccaggctcaggtccctctcttcctgtgtcatcctgtgtcattgcaggttagtggccacctctactccggcagcaccgggcaccagattggcctcagaggcagccttggtgtggacggggaaagtggcttcctccttcacgtcaccaggacaggtgcccactacatcctctttccctgcggtacgttgtttctgccacatccctggccagcctcactcgtggagcatgactgccctgcggctcctcaggtcctgcttctgctctcgaggtgctggagtcaggaagcccaggggcctggctccatgtggcactgcgtgcccctggtccgggttcacagcgtgaccctggtgacctcgggcccttctgtgttttgaatagcaagctccctctgcggctgctctgtgaagggtctctacgagaaggtgaccgggagcggcggcccgttcaagagtgacccgcactgggagagcatgctcaatgccaccacccgcaggatgctttcccacaggtgggtccgggccgcagcctttctccatgcagagcgcccaccccatggctctgctcgcctgcctcagcgttcggacaatctgtgtggagcccagagcagccccaccggcagggaggtgctcggggtaccgcaaggtcaccctgggctcagatgtgagaaatggtcaaataaaagttgagtaaagagaagaaaggttcccgacgctgtgcctgtctgtctccacggaaagtgggggtctttcttctcttttctgttttttttttttttggttgttttttttttttaagacggagtcttgccctgtcccccaggctggagtgcagtggtgcgatctcggttcactgcaacctccgcctcccgggttcaagtgattctcctgccccagcctcccgagtagctgggattacaggcgcgcacctccacgcccagctaatttttgcatttttagtagagacggggtttctccatgttggtcagactggtctcgaacttctgacctcgtgatccgcccgcctcggcctcccaaagtgctggaattacaggcatgagccaccgcgcccagctcttctcttttcaagctgtagaactgagaaacgggttatgggggcctaagaggagcaccctgagacgggcggtgccagagcctccactgggtgcctgaggccgccccggggacccggcgcccctttctcccactctcctgtctagctctggagcagtgcgctacctgatgcatgtcccagggaacgccggtgcagatgtgcttcttgtgggctcagaggccttcgtgctgctggacgggcaggagctgacgcctcgctggacacccaaggcagcccatgtcctgaggtacagggtttccccaaggaccgcgcaggtgctgcaccccttcccggcatcccgggcacatcccgttggctggcgaggagacagcgctgggggtggggccggaggccgtgtgctgctgcccgggcttcttgcctgtctctggtacttgccccttgccccagacgtcggctccgtgtcctgggccctggtccagatgtggccatgggagactgaggggcggacgtgttcctgggtgcttccttcatctcagtctcctcactgagacccctcgtgagcgcttcctccatattgttccagaaaacccatcttcggccgctacaaaccagacaccttggctgtagccgttgaaaacggaactggcaccgacagacaggttcgttgttcttccttcggaggtggcacctttgttcttagctgaggatagactggtctgaaagcagacggggctgcggcccaggaggctgctgccgtcagagctgctgagaaggttctgcctccctcagagcatctgcctccagggctggcatggctgagggcacgtgtgcctgtgcaagcctcgagcttttcccggtagcccccacgttggcccccacagtgtcccctccctccccagatcctgtttctggaccttggcactggagccgtcctgtgtagcctagccctcccgagcctccctgggggtccactgtccgccagcctgccgaccgcagaccaccgctcagccttcttcttctggggcctccacgagctggggagcaccagcgagacggtacgggagccaccctcggagcagccatgctgggagccggggccagagacccaggctggagctccaccgtggagtgcccagaagctcatcggtgcctgggcaacctcacataagttgaagtccagtgacagtcaggatgaggtggtgcaagctgaggcaaagtgaccttagaggggtccagcgagaaggggctgatggccttcggtggataggggcgcacacagccatgccctgaagggagtggctgccggcaaggaccagtgtcaggaccaggtggggtgggaggacctgggaggtggccacagaactgggggctggcatttgggggacccagatagggcccctagcagacatagagctccaggcacggtcactctgacagcagtgtcctgtgggagtgctcagtgaagggcgtggggcccattgctggttctcgctccaggagaccggggaggcccggcacagcctgtacatgttccaccccaccctgccgcgcgtgctgctggagctggccaatgtctctacccacattgtcgcctttgacggtgagtgtggcctcggccagggacccgggtgttccgcggggtctgccctggctggtcctgagccgccctgacagctgtgtcccccaccctgcagccgtcctgtttgagccaagccgccacgccgcctacatccttctgacaggcccggcagactcagaggcacccggcctggtctctgtgatcaagcacaaggtgcgggaccttgtcccaagcagcagggtggtccgcctgggtgagggtgggccagacagtgaccaagccatcagggaccggttctcccggctgcggtaccagagtgaggcgtagaggcacgccagccagagcctgtggagagactccgcctgctgacactaaacgtcctgggaagtgggcccttccctgggtctctgcactgactcccccactcctgaccctggtgatggtcgccactgggcagcagcagccttaccagtcctccatgatcacacccagggacctgcatgggtgaggggacaccctgggcctctctcccgcccagcatcctccctgagtccccacacagggcctcactctgcaccccaccagggtcccgctcacaccaggcagccttcatagtggtctccctggccaccttgggcagagctgggtcatgcagcaccccatccttacccggtgccctctccttgccagcttctccccaggccagagcggccatcgcgtagaaagaaccagggtgtccccgggacaggccgtcccccaccccatcctgtagaagtccattccccttttccctcctgtgctctgtcccccaaggagtcatggaactcagggtactgggcctcaacgggaacctgagacagctccagcttcgcagcccttcccggagctacagggggatcctctagcatggggggtgtgacttggttcctttgaccaggtcctgtgaggaagcctggagcaagggtctcccccagcaggatgggtggggcctgctctggagctgagcccgtggccgctcacaggtgtccttagtggtgttgcagctgtctactggctgcatgtgctgtgaatatcccaaggaactggctgtggaatgcgtgtttgggtcagtctgtgccctctcagtagacactggagctgctctgtccctgaagaggccccgtgccccaggcatggcaagcgcctgcctctccccttccggtgctcacacgcccacgccgtgccacccgatgcaggactcacctctgtgccttgctgctcctgaggcccaagggcagccatggtgctctgtactgctcgggccgcccaggtcacagagcctgagcttcgtagccaaagcagcctgatgacccacccaccaaggaagaaagcagaataaacatttttgcactgcctgaaaaaccccggtggtcaggcgtgagcctagcgtg

SEQ ID NO: 8444 - DNA, 637 bp, Homo sapiens
cctcacccggcctattttttttttttttttttattgatcattcttgggtgtttctcgcagagggggatttggcagggtcatacgacaatagtggacggaaggtcagcagataaacaagtgaacaaaggtctctggttttcctaggcagaggtccctgcggccttccgcagtgtttgcgtccctgggtacttgagattagggagtggtgatgactcttaacgagcatgctgccttcaagcatctgtttaacaaagcacatcttgcaccgcccttaatccattcaaccctgagtggacacagcacatgtttcagagagcacagggttgggggtaaggtcaccgatcaacaggatcccaaggcagaagaagttttcttagtacagaacaaaatgaaaagtctcccatgtctacttctttctacacagacacagcaaccatccgatttctcaatcttttccccacctttctcccctttctattccacaaaaccgccattgtcatcatggcccgttctcaatgagctgttgggtacacctcccagacggggtggtagccgggcagaggggctcctcacttcccagtaggggtggccgggcagaggcgcccctcacctcccggagggggcagctgggcccggc

SEQ ID NO: 8445 - DNA, 357 bp, Homo sapiens
atttattactgattttttaaaattataaatccaaactacattaatagtaattgtcttgcagggtcctttggtcatagcttacatattagaagaaggattaagaaagggagtgatataatttactagcttgaggtctgcatttggattgactttactaagcttgctgtgaactccaaggaacagaaaacccagaatacaggccgggcggcatcttcagaggaagaggccctttcccctttgccttgcttgcttccaggctggctgtggggggatgcagtctccccttgagggtcaggagatgtctggccatcatctggtagttagagtgggatgaaccgaacaagggcagacttctcg

SEQ ID NO: 8446 - DNA, 488 bp, Homo sapiens
taagtttcacttgaaacattcccaaattaaaacaaaaacaagccttgctttgagctgttgaaaaggcattttactgagaagatccagatgctattgctgttcttaaatgatgttgaaaggcaaagggtcaggactttcaaaaagtcactttgaggtcacctcacataagcaagcaacagtttgaactgatgcaaaaacaaacaatgaaattatgaacaggaggaagaaactaaaatgagggcagtatatgccataaatatggaagaggctgtctcttatttatcttctcatttcctgtacataatacagaaacctggtatgtaataggcatacaattatttgtggctcaactgaataaacgaagatggaaaccagcaagcagcgggcagataatatacttgggaaaggagaactgcagagaccgctgggtggttcaaggcttctgcatgatcctcaaatgtcaccccaatctgctgtgacatagctat

SEQ ID NO: 8447 - DNA, 1805 bp, Homo sapiens
taagtttcacttgaaacattcccaaattaaaacaaaaacaagccttgctttgagctgttgaaaaggcattttactgagaagatccagatgctattgctgttcttaaatgatgttgaaaggcaaagggtcaggactttcaaaaagtcactttgaggtcacctcacataagcaagcaacagtttgaactgatgcaaaaacaaacaatgaaattatgaacaggaggaagaaactaaaatgagggcagtatatgccataaatatggaagaggctgtctcttatttatcttctcatttcctgtacataatacagaaacctggtatgtaataggcatacaattatttgtggctcaactgaataaacgaagatggaaaccagcaagcagcgggcagataatatacttgggaaaggagaactgcagagacgctgggtggttcaaggcttctgcatgatcctcaaatgtcaccccaatctgctgtgacatagctataccactcatcagaataccccaaaacaaattgtctgcctcccttatgtacaacttttattatttcttatctcggttggttaagaatatgtagtaatggccgggcgcggtggctcacgcctgtaatcccagcactttgggaggccgaggcaggaggatcacctgaggtcaggagttcgagaccagcctcaacatggagaaaccccgtctctactaaaaatacaaaattagccgggcgtggtggtgcatacctgtaattccagctactcgggaggctgaggcaggagaattgcttgaacctgggaggcagagtttgcggtgagctgagatcgcgccattgcactccatccagcctgggcaacaagagcgaaactccatctcaaaaaaaaaaaaaaaaaaaaaagaatatgtagtaatggttaagagtccactgtggaatcagcctgcataggtccaaatcccagccctgactgaatacctgtgaacaagttatatcagtgactcaggcttattatctgtaaaatggggattatagcattcctgcctcatagggatgttatgagatttaaataccaataagtctgtacattataaaccttatcagattggtgtggtgaaaatgctcagtaactgagcctcgtgagcattagaatgttgagatcagcatgaagttagcctgtatactgggcatacacattcttctggatttgctccttttgtgagcaatcaatgatgagctaaaggcatttgctaactagtaggaatgaaataaggtttcagacaggatcttggtgggtgatgtagattttatctgtcccatttgtcccatttctcaactggaagtgagtctggccttggtctgcatctgtgctctccccttcacaaaaggcaggcccagagagactccagagatggcccctgtctcctgtgtgtcctccgccgctgtgtccacttgggcacgtcaaaggtatgatcggtacttatctgatgaaaacaaatctttgtatatacagttgtctacctgggttgaatatttcagaggtataaagtagtttaaataaataagccctctagtgttttgtttgttaagccacattactcagaaggttttctttcttttttttttttttctgagacagggttttgctttgttgcccaggctggagtgtggctgcagtgcagtggcagcacgaccatagctcactgcaccctttacctccttggctcaagcagtcctcctgtctcagcctcccaaatagctgagatcacaggtacgcacgaccacacccagctaatttttgtagaaaatggagtctcctta

SEQ ID NO: 8448 - DNA, 490 bp, Homo sapiens
tgatgcacaaaggaatccttgatatgtttgtcctcaaagaccaaagacaagtatctagtaaaaaatgcaaatcatatctaacagtgaagctttccagcaaaaaccttctgctctagaatgcataattatgcgagcataagatctactactctagacttttagcataattacctataggcagcaaaaccctagtcaattgagtgtctggtgcctcttggacctggacttctccaagagaatgggcaaggaggacgaaaaggaagagacagctatgctttgtgaaacaggaggtgacttaaaaaaaaaattctatagcagtcttcttaattcctgttacagacttgatacgcttatctgctgttgaggacacggttgccagtttctaaccttctctgtctgcctgaaaaactagaaattagatgatcatatggcctagagccagaagtgcaggaggcagaaagccaggggccagtttttttctttttgtttc

SEQ ID NO: 8449 - DNA, 580 bp, Homo sapiens
aaaacaattattttattaacagtaagtttttctctttcagaaaactatttaaatataattatctttccaatcaagagacatacttctaaaaaggctcattaaaaaattttaaaaatcaagactcaacttgcctttttacaagagtcagctgagatctaatgataagaaaagactgaaagtggcaagaccaagtagaaatttcatgtaaatactaacaaaatgagagcagaagaggtcaaaataatattacacaagctacattgttaaagtcaaaagctgtcatattttataaaatgtactttaagttaaaacttcaaaaaagaaggacattaaacaatatatagattaattcatggaaacctatgacaaatttgtttatccatgtgtgtatttgtgcgtgtgtgtgtctcaaattggggtttcaaatatataaagcaaatactaacaaagttgaatagagcaatataattatagtaggatatttcaataccccactttctgtaataataataaaacaagacagtatattagtaagggaacagaggactagaaggcagtaaaaaacaattatttctaatga

SEQ ID NO: 8450 - DNA, 584 bp, Homo sapiens
aaatggaatttcttacttaactaatgttaattagttatgttaatcataatggtacagtttaaaagataaaagtatggaaattatgaacatctgttaatgaatagacaacataaaaaatataattagtaaaatcaataacaaatgtgaaggtagatgtaataatgaggaatttctgtatgcaactgaagttaattttttactacattaaaatatattgttggatcttttagaggttttagataatcccccaaggtactactaagaaaatatccgaggccaggcacggtggctcacgcctgtaatcccagcactttgggaggccgaggcgggcggatcacaaggtcaggagatggagaccatcctggctaacacggtgaaaccccgtctctattaaaaatacaaaaaaaaaaaaattagccgggtgtagaggtgggcgccggtagttccagctactcgagaggctgaggcagaagaatggtgtgaacccgggaggcggagcttacagtgagccaagatcgcgccagggcactccagcctgggcgacagagcgagactccgtctcaaaaaaaaaaaaaaaaaaaaaa

SEQ ID NO: 8451 - DNA, 8345 bp, Homo sapiens
gcggccgcagtctctagtgtggtgagacgagtggaagagctcggggatctggctcaggcccacatacagcaacttagcgaagctgccggtgaagatggtgagggagcggaggagagggaggcgggcggggcagacggcgctaaggtactggcgctcgatggctgtgagggctagaggctgaggcctgtgttcctttgggtcccaggccgcaggtggttacccgaggtctgtcgcttctgagcccctctgcgccatcgattgcccacttcccagaactcacaatgccaaggcgttgtcttcgaaaaccgcattattcagaacccatggaaaatctgtctagatccgtgctggtgtaaactgtctcggtagcgattggaagaagggcagaatctaaataaaatacagaagtttaaataaatggctaagatgaatgataacactcaaattagttatggtggtttgcatcctgtaaagataaaaagacatgtataacagttccactttttcattgctgcgttgtaatttgcgttttacgttttggattcaaaacaacattctatagaagagctttacattggtgtgtagactattctgccccatacatcatgccagttctcacaagggctctgttaagtattggcatacttgttttggaaaggtctaagctgttaggaaaaactgggctagggaattgcctcaaccttctgaatttaagtccaattcttttcattacgtctcagctgcctttaggttctacattattcctttttgagtttgagcaattactacagatagtttttaaaattctgtggactgactcatatcatcggactcataggaaaacagtggtggaacattttcttaagcgattgaatagttggtgaatttgttattaaatagggtctatgatgaaatgccttagtttcagtgaatattttttgccagattatcatttatcaggagtgttttgttttgttttgtttttagaggcagagtatcattctgttgctcaggctggagcccctctagtagtgggacaacaggcgcacaccatctcgcccggctaactttggcatattttgtagaaacggggttcaccatgtcatccaggttggtcctgaactcctgggctcaagcattccacccgctttggcttcccaaagtgctgggattacaggcgtgagccactgtgccaggccaggagtgtgttctttaaagacctacagaccaccctgaagccgacttatattttggtctgtggattcacatgaataattcttgggtagtaggagctattaacttgaaagttatctatgttacctctaattccagattcacttgaaccagtccaaagagaccaaagaatgttttttattcacttatcactgaactaaaaagccattctcatttcccttggaagagttctttaatctggaatgaatcagagctggaaataaaagtcatgtgctatatatggaattcttgtttgaaggctttatacttctgaaaatttactaaaataaaatgacaatgttagtggtccacattatgagccgttgatcagcatggaaatcagttcaatcttaaaaatattacaagatttatgaactttaattaaaacaagatttcatgtacttgaattgaatttggcattatttttccacgcaacaagaataatatacattcaaactttgttctttaatgtaatgagtatatatttatactaggatataagggtttgatgatttccattgtcttcttcagattagatgagatacagccagacattatttcatctaagaatgcgtctttaaatttctagccaatttttgttaatttatttctcatcatacaagcacaatctgtttactctatggaagtacgtcatgagggagtttttccacagattatataagaatcagtttcatcttttgctttgccagtcattactttgactaaatagttctagtcaaaatactgcattttatgggcttttccaaagtgtgagttatgccaccaccacacccctgccacagtaattatgtcatcaatttatgtgacatactctttcagcaatggtttagtgagttcaatgcaaatctttacattgaaaataatcctgcaagttaaacaaaatatcaacacactctctaaagaagcacctaaggcatgtcatattccatgtaatttcagtttatagtagaatctttttctacattgtgtggatgtcacttctgggctaatgagaggtggaaggacagtgctaagaagtagatttcaactcaagtgaaagtggatcttacagcagtcaaaatgcaatctcaggctttacctgagaagacttaaggcagcagtcacatgattgccaacagacataacctgatggtgcttttgctccaacaatgaacaccttatctgtgtaactcctgaggctggatcaggtaggcctacaccaaatgctacactatctgttcattggcccatgaagaagaaagggatatattttagaatatcagactatgtttcagaagggaagcactgagaggtaaactcagagagtttagtgtcttgattatgggtgtatctaaatttgacttcatgaagtgctgcagaagggtggatagtaccttgaagtggacacataagaaaaggtgaaatcacagaagcaacaaagggattatgacattagagaaagggaaaaaaaatcaggagatggtgaaggcggagggagggtgaattgtgattagaggacttattagaagtatttagttccttttcttccaggttttgaggaaatgaggtaatttgtttctaagtttttaaaggaattaaatacacagatgtattatgtaattttaattgtagtagatataaacaattataaaattgctcataatgctggcattttgtaaggaatttgatttggtcaatcatggtcttttgaataacatttgcaactacatttatgaaatcttaagttttcagtggaagccctttctgtatatttatgtatattatttgtatattccagtaagttttaaatttgtttaattattttgagtgcattatcataaaagaagcataatgagaatacagactgcatttaagaaatggcaagagtgactctagaaagttttcagtattttgctttgtagaaaaaattttcatgataaatttacttaattaggattaggcattatgagatatttcatgttttagataagatattattactataattctgtttctccatatgtcataatattatttcatcttgtcatttcatcttcatacataatgtgttttttgtttaaataacactctgaaactaggtgaagtaatcctcatgtttttatttcttatagatcactttttaattcgggcctctgcagcattagaaaaattgaaactcctgtgtggagaagagaaagaatgttcaaatccatcaaatcttctagaactttacacacaggtactgaaagagtggtggactctggcattttatgagggcaggttgtttatttagatgattgactccaactttaggtaaaatgacatcagtttattctatatttcaagtgtttaattttgtccaaaaaactatgaataaaacacaaaaacttaaaactttgaggtagtatgaaaagaagtaagatttattagatgtgttaataagaaaagtcaggaagaaaatcttacagataacggaattgttttcctttagagataattgaacaggacactagtgtgtgcaatgtccaatctcttgaaagtttcagagggagcaggggagtatataagggccctgactttttttttttcccctgaaatttaccttccctaggattctcaatattattctccctgctagtgtcatgcatatctatgtgatttttctattcacccactttttttttaactttcctttccaaatcaggctgctgtgtggacaacacctttttttcttggttttctgaaacactgctgaggcatgctaacatcaagaaatgtaattttattatggtaactaacatctatatagcactttgtagttgatagagtgttttcatgtgccctttttggattgctaagggataataaaactgaagtggttacagaaagtacagtacacttagttaggcttccaaagtgcccatttatagcatttaaatgcttggtgctgttcttcctgttaggaaatttctaaagatagcttctgccttcaaacaccatggatgagtaagcctaacagctactcacaaaccacagagaactgttttaagtttggcaggtattttgcttggttttctttctgttcagaagactctgtgcttgtctgtatgtgttttatgtcatctcatttttttcacgagagtgttccagacattttaacttactggaataaggcaaaagacctagagatacagatttcaattttaagatcctcttaaaccctattgatggttctgaatcaacagatcacctttcatatgatgatgaaatcatatatgatgatctctccttactggcttaggcctttcgcacgataacatttactcctcatgttcacagaaagtaaagcactaactgggtgctaggtaacgtttctagtaccttacatatgttaattaattttttactccaacaaggaactttgaaaggtattttagtccaatttatcatttagccaattaagaaactgaggctcaaaaaaggtaaaattgacttgtctttggttagttaagtgattagtggtagaactgaccctagaacccagtttccttagtcttagttcaatagattaaaaaaggaaaaaggattggggagttttaatatgctttaacagcatctctaataattaggaatactgggggcttagtgtttgagttgcatatgttgatggtatgcttcctctattgggtggcaggatacatacgcccctcacgctggctctgtatttgggaacacaaatcctttgaaggttcaaaactggaagtagtgaccttaacttgatacagcaggcatttagaaaattttcaggggttatataagtagtagaatataataattacctttttcataattatatatgattaaattctgtaaattaaaacaaagctctattttcttttttgagggaaagaaagattatcattaattcagcactttagtgaaatacctatgaagttttctttaaaatctttctcaaattatatttacatctagacattttgcctacttctcaaatttacatactgagctagaagatttaaatgtgtaataaagcacctatgtgtgcaaggttagactgtaagaattgttttttttcaattttaagtcattgatagatatctttctttttttttttttttaggctattttggacatgacatattttgaggagaacaagctagtagatgaagattttcctgaagactcttcttcacagaaagtaaaagagctgattagttttctttcagaaccagaaattttagtaaaggaaaataatatgcatccaaaagtaagttttacattcctgttaattatgatggaatattgctggtacttgctgtcctgctttttggagtctatatttttttcttcttgattgtatctttgtttcttaaattaagattggaagagggagataaaagagcttaacacttcagaccaatgttgcaacaaaagtatcatattttactaaatgtatttcagaatatttgcataatagaattgtaatagctgtgcctaatcattttttttaatatagatattcccatttcgaccccctttacttttgcagatgctgttttcttgaaggtcactattaatctaattaccacgtctgttcttacagtccttattctctcgaacatttgctccccttcttaatgttgatcaccccctccctctgagaccctgcatgcttcttttccacttcttcatctctgaaatgtcttctcttgctagcaactgttctgccttccattctagaaacacaggtactagccagggatgtctctttcatcaccgatagtctctattctgtctttgcttgataacctgttcacaggctttgtactgtcatctctatttggataatcctatgatttgtatatctagtcctggatactctttgaagcaaataatttctcatctttaactgcctgctgactgtttacttagatatattttttttctctatttatttatcaggggaggctgtggaaacatctccaaatttcaatgacaagccactttaaaaattttgatttattaaaattatttttgggtgtaaattttcattattttattccagcggtagtagaaatagatatgatctcacttcaagtaatgtatttgtgaaaagttacctttttaatgagatgatgactgcttatattgcaaacctgttaggggaatttgctagtaaaaatattttttaaattattttgtaaaactactagtaaattgaagttattttaattttcatgtattaatagaattgcatatttataattgattgaaaataaggcctccctgtgtaagcagctaaacaaagggaacattttgtgacttgagaatgtttttaatcgatgagtttttgaaatttaacttcaacttttatagacatccagtttccctttttagctatgtctttttttgtgtgtttcagcactgcaatttgcttggggatgagctactggaatgtctctcttggagacgaggagccctgctgtatatgtattgtcattctcttaccaaaagaagagagtggctcttaagaaaatccagtttgcttaaaaaggtaagaagacattccttacacatttttcattgttgacatttagaggtttcaaaaagctgtctttgttgtactactaagagtagtggatcaaagggtctgagtttgtattctgtgtcttttatttactagctgggtaatcataaataaattgggcttgttgtgaagactaaatcagataacatgtgaaagcactttgtaatctgcgaagttctttttttaaggatttgtattgttttaaatataagataaactatattaatttctaaacttttaaaaaatttttgtcctgaaagaaacacttgactgtgagcctgtcagcagatcacttctaaggaactcacatgaccctgcttctagaaaattgtggccctctgattcacttgaccattatgactgaatcattaaatccaaaatatgagtcttggtattgtatcactaaggattctaacttgggttaaatgtacacacaatttaggtgggcttgaaatgcgaggccacacttgcagatataaaagtttgatcataatatttctaaattataaccacatacatgtttttaatacattgttgttgagcacatctttattatctttattcttttcttcctctgataacatctttaacaagtatattactgaaatgtgtttctggttaatgtcttctttttttttagtactcttttttactactagagcatttcaaggggtatatttatattagcagagtcttgggatggtgggtctttataccattgaaatagaatagctgtaagctatgcctatatattaaccaattttctcttgagtaaagaatggaaaatattagtatttgaagtttatatatctctgcatataatactttcaattctttggctctgacttttatttagtaccttcttgatggaatcagttacttgctacagatgctaaattatcgatgtcctatccagttaaatgaaggagtttctttccaagatctagacacagctaaattactgagtgcaggtaatgtgatctctcattaaattttctaagtgttttaaagcttcttaagattttaggaagtttgttagatttcactctgatttaaataaatgtcaaggtagattatagacaaaaaagtaataagtaataaagggtttatataaaattcaaagataaaatcttttgatgtaatacagaaaaatatttctaatcccttgtgtttagtaattttggaagttatgtattgtgttccttctgctcattttgcatcctcacacagccctgtaattagtctgttttcacactgctataaagatactacctgagactgggtaatttataaacaagagaggtttaattgactctcagttccacatggctgggaaggtgtcaggaaacttacaatcatggtggaaggggaagcaggcatgtcttaaatggcagcaggtgagacagagcatgtgtgagtgcaagaaaaactatcatttataaaaccatcagatctcatgagaattcactcactatcacgagaacagaatgagggaaaccaccca

SEQ ID NO: 8452 - DNA, 736 bp, Homo sapiens
actacagctcatttagaaccaaagggagtggcacaaatcacctgttttcctaattctcccatttccagttataaagtaagacattctcataacctggagttttttcttcaggaagcatgtaatattggtggcgtctctttgtcatactttgaatttactagctcctagtttcagttggttcttcaacaagggaattaaaagggtcagatagggtagcattttccaggcaaaaagacacagtataggcaccatagcagtttgctacatactgtcctaagtcctcttagggtgtcggccttttgttctcatctaaagaagtttgcgcttgaacctaggaggcggaggttgcagtgaaccaagatctcaccactgcattccagcctgggggatagagccagactctgtctcaaacaaaacaaaacaaaacaaaacaaaacaaaacaaaacaaaacaaacataagtttgcctcctttaggaggccaaggcaggatgatcacttgagaaaactggcgccaggagttcaagacatagtgagacatcatctctgcaaaaactaaaaaaaaaaaaaaaaattagccaggcgtggtggtgcatgactgtagttccagctacatggcaggctgaggttggagaatcagttgagcccaggagtttgaggctgcagtgagccctgatcgcacagctgcactctagcctgggtaacagagtgagaccctgtctgagaaaaaagaaaaaa

SEQ ID NO: 8453 - DNA, 259 bp, Homo sapiens
aaaaagtgttcctaagcagagaaatgggatccgtaaaggcccattggagtgaacatgcatagtatactcagggaatcagttgattgagtaaatatttatggaggccctactatgtgctgagccctgttccaggtgcagaagatacagcagtgaacgagacaaaaattcttaccaactggagctttctgatagacagaatcagccaaattagtaaggaaaacatacagcatacaagaggagagaagtgctacggagaaaa

SEQ ID NO: 8454 - DNA, 1254 bp, Homo sapiens
ctgagaccagggtggccacacaggcagggcctggctccagtctcatcctcccattgcccagtgagccctgctcttctctccccagccccctcccaccgctgcctcgtagagtgacctcggacagagcccccctagcaatacagggaggctcccggggcctggacaggcgggctcggaggctacccgctgtggccggtgccagctgcccttgcagggtgggtgagctctcaggccgagagccttatttacctagtgcaaaaactgtaaaagtgtacagactcttcacagatttttatcttaattgcaagtctgccgattttgtaaatgttcttggtgtttgactgtaatgtaactatctcacctaatggttgtacatatcctttggtcctggtgctgccgagggctggccgggactgctgctctcccaagggttttattttatttctgaatctagagaacagtattgggcaggaggaaaaggcttggtgtctgcggggggtgtcttccctgcctgtggcatttgtgtgttggctttgcagctgctgtctgagtagtggccactggggtgccttcactgggccagtcaacggggggctcctgcccaggccacagagaacctgagttcccgggagctgggccctgcctgcagccagggctggggttgccagaggccctggagggaaggacagtccctgctggggaagaacagccccggggccccctggtcaccgagactcagcctctgctggagaaagccacgccctccctgctagcacagaggcctgactgacttttttgcttaacttccatgttctgggtgatggaaactgccaaacctcctgtcagtgaggactctttccgactgcccagaaagtgggggtggaggaccgaggctcagctccacacgccccggtcccccagagcatctgccccaggtacacctccccctgcgccccgcacgactgcgggagccagactgtccagggaaacagcctctctcttttctacacactcagccacaaagccccccagctcccacaccgcgtcccagctcccctcttttgtaagtatgtgaaaaggaaaaaatgcaaacgttggagtttgggctggagctcctccctccagctgcgacttttaactatgtaataatgtacagaggaagctgttggtgttctaagactctgtgtggctgtgcaatttctgtacatttgcaattagaaatattaaagatttatttagctattttaagcccga

SEQ ID NO: 8455 - DNA, 318 bp, Homo sapiens
ctgagcactttttccaggggccagggtccattcaactgaccactatcaccaaagctgacacccacccacatgtgggcacctgcagcaggcctggagactgatttagtcagcctgtcacaacctctgccaacaccaaagtgaaatgcttgggttccagggggttgtcttgccactgctactgacatcaactatgccacgcctaccgcccagggcccagtaacctgcccactcattcaccccactactgccattcctggcacccaagcaagctgcctggaagcccaagaatcgacctgcacagacccactaactctggtg

SEQ ID NO: 8456 - DNA, 297 bp, Homo sapiens
ttttttttttttttttttttttttgagacggagtctcgctctgtcgcccaggctacagtgcagtggcgtgatctcagctcactgccagctccacctcctgggttcctgccattctcctgcctcagcctccggagtagctgggactacaggtgcccaccaccatgcccggctaattttttgtatttttagtagagacggggtttcaccgtgttagccaggatggtcttgatctcctgaccttgtgatctgcctgtctcagcctcccaaagtgctgggattacaggcgtgagccactgc

SEQ ID NO: 8457 - DNA, 12807 bp, Homo sapiens
  SITE (360): n equals a,t,g, or c
  SITE (363): n equals a,t,g, or c
  SITE (366): n equals a,t,g, or c
gtgttggggacggagccgtggatacacccatactcaacaggcagagggtaggaccgggtgccagagcagaagagaaatcccgaaagcagggaggagtgatgaggcgggaagggtgcactctcgggcgagggtagcaggagcggtgagcatagtggagccagcagcccacagggtgctggagggggaagtgggtgagagaagggaatggggcggggcgaggctgcaatgagcgggaaccagctccctttgtatattttatgcgagcttcgccccagcccacccactcacacccttccctgctttcattcctttgcgagccgggcctgggaagggaagggctggtggggaggaagcccccangangcnatggatgaatggcagccgtgggagccctggcagcgctggactctgtcctttgaatcccaggctgctctgggacttaattaacgaatagctcaggggcaccctctcctcttattcagaaagggacacagcaccatggtaacgtccccaggttcctgaggcaggccccatctaatggggctgcctcggggctgacactgggccctgctcccgggatccagtggggaggtgctggccaaaggccattagctggcacccacgcagagacacgccaccctgttctgcagcccgtcattcatattccaagcccgacagcagtgctgaaaggagcgagggactcagaggcttacttcttttttttcctatgtcccccagggaccttggaggaatctcatatttaaaactgtcttggcaagagcttgtggtgaccctcactcggtctttgaggaggccctcatgcactcagcgcacgtctgggagcaccaaaaaccagagggctggatggggaagaggaagagggttctccccgtgtgcctgtgcgcgtgcgcatggatgtccacgctcacatacttccatgtctatccataccccggcccacggtgggtggaggcctgaggttggaccttctctctcctcctctcgccagttctagctgagaagcccccacaggctgcctcctctctgctcctgggtctgaacccctaggggagatcacagctggcgactgcgggggcagcgagcttgcagcgggcgagtgcctggtgcaccatgctctccaatgccacaggctccctcaggccctaccagctcgtctgcaaagtgcaagtctgcaaatgaaccgcttgccaggacagcacacaggccatcggagtgtaaagatgggctcggggcaggccacggtggctcgcacctgtaattccaacactttgggaggccaaggtgggaggatcgcttgaggcgaggcattggacaccagcctgggcaacatagcaaggccccatctctaccagaaaaatatattttatttatttatttatttatttattgagatggagttttgctcttcttgcccaggctggagtgcaatggctcactgcaacctccaccaaaataaaattttatttatttatttagacggagttttgctcttcttgcccaggctggagtgcaatggctcgctgcaacctccacctcccgggttcaagtgattctcctgcctcagcctcctgagtagctgggattactggcatgtgccatcacgcccggctactttttgtatttttagtagagacggggtttcaccatgttggccaggctggcctcgaactcctgacctcaggtgattcactgcctcagcctcctaaagtgctgggattacgggcacgaaccactgtgccccacccctcaaattttgtatattagccaggtgcgtacctgtagtttcagccacttgggaggctgaggtgggaggatcacttgggcctagtagttcgactagcctgggcaacttagcaagtcctcatctctacagaatttttatttttatttttttgagacagagtctcgctctgtcgcccaggctggagtgtaatggcgccatctcggctcactacaacctccacctcccaggttcaagcaattctgcctcagcctcccgagtagctgggactacagacgcacgccaccatgcccggctaatttttgtatttttagtagagatggggtgtcaccatattggccaggctggtcttgaactcctgacctcgtgatccgcctgccttggcctcccaaagtgctgggattacaggcgtgacagaaattttttaaaaagtggttgggcacagtggtgcacacctatagtcccagctatctgggaggctgaggcaagaggattgcttaagcccaagagtttgaggctgcagtgagctatgactgcaccactgcactccggccagggcaagacagcaagaccctatctcaatttaaaaatatacatatattttcacacacacacacacacacacacacacacacatataagatcgatagagagaaaataggcttgggcaaatgccagagccaaccacagtaactgtggaggcttcggacaaactccactcaggatttagggccccagggcaggcagccacaagcacacaaagccacagatgctccttgttctatgcaacaaaatattggaaaacaaaacccagatatcagctccttttggtcgtttccatctgtgtttgattcctcagtaaattattctttccctgctcctgaaacaaaaatgaaatcaaatatggagaaataactccctcacgcacgcacatttttgtgtcctcatatctaaggaatagatattcgacgggggaccggggtgtcaacagatgtatccgagttcatgcgtggcagggagctggcggcgggacccgtccctccagctggctctccaaccccaagcctgcattacgaccacggcaaaatgccagaagcccagagaagcggggtttctgaagcggatcgtttgttcagcccgagtgcgtggggcaggaacacacctggaggtcattaaagagaagtcttcacggggcactcaaggcacactgcaaaacaactttttatttaaaaggccaataatgagaataatgagttgcacaagaatgaaaaccttatcccttccaaaagatcggcctatacattatgtataaagttagaataattctaaatacaaaatgccaaagaccagcgggtccactccttcctctcctaagccatcttgacagtttcacatttcagcttccagacgtcatttctgttgcttttaagggtgcttacccagccgtggtctgtaccagacagggtagttggcacagcgtaggcactgccagcaggcccttgggagcttggcgaggtgggagccttgagaaatagctggctcggacccatggcggggtttgtgtgtcaactccctggtcctcagagaatccgagccacgggagagcaaacgctgcttccaaaaccaaaggaggaattttgcaatcgtttagacgggttataatagaatctcattcagatcttgaaggttatcggtgctttctgcaggtttttattcctcaaaaatgcagccaagctttgctgtgcttatcttggtggatctgagctaggttgggctatcttttcctaattcaattgccttttttttgcaaggaagggggtttctggtccatcggagggatcaagggcatggtcctcacgtctcgtcaggagacaaaaatagacattcagcagacagaccacagccagcgcatgcgaccagcgtcgtttggctattttagtctcttcttaatacacagacaaacgagcaaagaaaaagctactttgtccaacaccgggccctgggttggagtttagccctgcttggctctgcccgctagtctcagtcaggtcactcaccccaggcctgcgggaacggtggtcttggtggtcttctctggcccttccacctcttctgccttgtggggaccacccaagccctctcccgacttgcccagaggctgcacgcctctctggcatcacagtccgcacggagcctggctgtaaggctccactgaaatccccccggcgctggcttcgtgccccaggcacacccacctcacttctgcctcttttctgctggtttctggcctgtttggtcccagcccctccctgcactctctccgcagctgtctggtgggtgatgtgaaccaagggacacccagggtcatggcactgcctggattcagtttggtaatcgtcggcagtctgtccctggcttctgagcctggggcctcctcctctttctccccatcctggatgagcaggacacgctggggagacagcgtcctacaaaggcctcctaagagctgtgccctgtgccaggaaagcctcctgtatctccaaggatgtccctggagccctccagctggtgcctctgctgaggtctgtgagcagcgggaataggcctctaggggaggagttggggacaggcctctaggggagagcacacctccgggtactgcacctgtggctcaccagccacctgcacggggccagcttcagcctcagcagtgtcagctcaacagacgtgactgctgtcaacacagtggggccaggccctggagactgacatctcctgtggctgcttgtttaaagggcatgggatagagaaagagtgtgttattttaaagctggactacctaacagcctctgatagcagatacagctttgctgctgttcttgaagttcaaggtgatgtggaggtgttgcagtgacaatcagtacaccgtgaacaacacctgccaccaacgtcgaccctgaagtggtagatggggcctgctttggcacttgacgctggggcaggagtccctttcttggggactcactctctacttcgtctcccccgggagttgtctactttcctaggccctgccagcagcccccacagctccgcccagcccactccaccagcttgctgctcccatggctcagccccactcacagctcacccctcccatggctaggccccatccacagctcacccctcccatgactaggccccgcccacagctcacctctcccgtgactaggccccgcccacagctcacctttcccatggctaggccctgtccacagctcaccccacccatagctagccccattcacagctcacctctcccatggctaggccccacccacagctcgccccgcccacagctcacccctcccatgactaggccccgcccacagctcacccctcccatggctccatgggcttctcttcccctcctgcctaagtccccgcaggccagaacccctggcccccaggccctggggcgtgggcaaggaggcctctccgcttggtactgtctccatggaacaaaaccacactgcagcgttccaggaccacagaacagccaggcaggctgtacccagcaaaggggactggtgaccagcactggacactgggcatcagctgaagacactggcttgagaatgcattgccatttacccagcgagcttcaagatggatgctggcttttaaaagagcagcccagctgcaccagaggacatggcggtttatgtatggaacattggcctccaagcctgaggcaggaaagccctctccatgcctgtaacccaaagctctaggccactggttcccaagagtgagcacgtcccgcagaaacagcttggtttaacaagtgggagcagctgccacaagagaacggagggtctcccccagcgaatgtgcaggtgtctcactttctcagggctttcgaggtggactggctcctaggacctgaagctttgagctggcaagcagggatggcttgggacagcgccccagggagtggacccgggcgggtggggtgaaggcaggggtctaaagagggcctgtgtcagttacacagtccatcaagttaccagccagttcagtggaaaaaaaaatggacttggcaacccacagaccaaataaggaaaacacgtacacaagccaggccccccgctgactcgcttccacccactgcagaaacagaagctaagtggagacaggggccaggcttcgaaccgcagggtggggcgggtcctgcactttgggtggccccatccctgagtgactgggagagaacaggctgggctggggacacctgtgtcctcctcccatagagcaggtggacatgcagagcctcctctctccctttcacaagccactgtgttggggccatcggccttctgaccgccacagagaatgacccaggctcagcttaggtgactcagaaggccgccatgctgcagaaaaggcgcccaggggttaagcctgtccccgtggacggaagccttgggagaagctgtcagctgtgtaaaaaggggctttctaaccattgggtctctcctgagacagcggccagccccggcaggagtccccacaggggtgctgtggaaatgcagacaccaggcctgggctgtgcaggggtctagatgcccctgaaggcccgcccaggtctaaggctcttcctcttgacgccccagcaagggctaatctcacacacaagcaagagatgggcactggacactgtgcgcttcccccaggaactccctcctaggcctctgcagctgctggctccacaggctccgcacgcccggcccagcccagcccagcccagcccagcccagccatggagcttgggagtgcagaggccgcacacatggggtgacggggactgtcccagacaccagatgcaacacgccccaccacgagcctatgctgtcccttggaacggcgagcctgcctcctcaccctcctctcctcctcttccccgggtggccccacacaggctaaggctcccgccaccagcttgggaacagacatcaccctgctgttctcagaagcaagtgtgatgctgcttttgtaattgggaattttaaaaaatcttggtctccacagtgacagaatccaaccaaattccttcctgggaagggcagctctggagggcagtgctccaggggatagcaagggtgacgggaaaggacggtgtgagcgggtggggcatggagtaagatcatttggggacctgggtgtctttagctcctcactggcttgggacaggccgtgttttgctgtggggatgggggaagccggtctcacaccttcctaaggcacagcggggtgtgtctgcctggcctgctgggctgagatcgagcaaatcctggttgttgagggtgtcaccaggaagagggggcatggtgtcggcgctggttgcggatagcagctcctcacggtcaaggtcgtgggcaggcggcaaggtgctgtcagagaacgtgtcactacagggctccctggcatctgcgagttcacggcagatgtgtctgttggcactgaaaatccaccatccgagctgcagctggagatgagggggatgcgagccgctggccctccccagagaataaagtaaaggcatttgggtctccttccacaaacaaaagcacaaagagacacgacgcagatgctgaggtgttaagtaggtatcatcgttcttctcctaacacgataaattatctttccagtcgtggttcctatgtcctcggcagcgctgccatcacggcgtggagacagtgacggggacctaaactggaaagttcttcgtgggcagagacggtgcaatgacaatatcgtcggaatcatcggagttgacgtcatccccaggtagaggtgccaaggcctgtgcactgagggagaggggtctgcagaaatgaaccacagggagaggggtcagccacgctgacctcaggggctgccaccacggacacccttacactgtctgctcttccccggcaggcaagacggcagccaccccgagaagcagtaagccatggggcacacaggccctcaggagcaactcacacacctgccagaaagcctcactctccgccctcaggaccaactcacacacctgccagaaagcctcactctccagcctcaggaccaacttacacacctgccagaaagcctcactctccagcctcaggaccaacttacacacctgccagaaagcctcactctccagcctcaggaccaacttacacacctgctagaaagcctcactctccagcctcaggaccaacttacacacctgccagaaagcctcactctcctcaccttcaaactcagctctgagtattctcaccatttcccccagtcaaaacacctgcaaaagcagacatttgccagcatggaggaacctcgagtccacactggagtcattccctgaaagccattcccacagcagcagtccaggagtctggggcctgggtgggtggctacccgtgtgtaggagcgtttctgctgggtgcagtggctcatgcctgtaaccccaggactctggaggccgaggtgggagggtggcttgaacccaggagttccagaccagcctgggcaacacagctagactgcacttcaaaaaaaaaaaaaaaaaagccaacttccctgttaactcgctggccactggtatagagggcaggagggggcaaggcacggatcgctgtgagcttgcaagctgctcggccattcccccttggatgctccttcctaagcatctagagcgttccaaacttttaatccattctagaatgggacgccacctacagacgggatggaggtgggtaccagagctgaagaagggacgggtcctaccacagcagcagccccagagctccttgccggggagcctgagtgtcgctgccttgaaagacgaaagtaaaaaagtaatgaactgctcatgtgagattttaaaaagggaaggaaatggcaattcggccatgccgcagatactgtaactgtgtcagcttttttttcctgcaactttcaagaaaattcatattaaaggggaaccttatgaaattaaaaacagctttcatggttatcttcaaaaacaaccaatcagctcaaacaaaagcttgatttatacttttcacagagacatttccttaggtcaataaagctgaatccctgggtcacggggatgaacttgcgtctttaaaatcacttgcgttgagcaagagaaaagggcagcatcaacgcacgctttagccctgatcaaagcctctaaaggtcaccaaaggcagggtctggcgaagccggtagaatcggctcccggagaacaactgaaagccttttgcagagcccacgagtcacaggccggcccgaccgctttgcgtgtctgtacattctccccgaaaccccaggctgctcatctttgtgttgagctttacaaatggaagttttggagagaatatcaaagttcaaagttttctagctctgacgaaactaggttaaaaaatgaaaataaaatgtgatttcatacgtggtatttccaggtcaaacgtggtatacggttcttagctcgtgcaggagactctctaaaacacagcccctagcgggaccccctggggagggaaggctctcgggctccaggtctgatgcgggcctcaaaacggcctcttcccaactccgtgactccgcgtcagcacaggagggatctcccaggaaagcgaggcctccgcccgccacgggcccccacacttactggagtggtactggggggctgccggctccctgggcccgtcctgaagggacattcaaattaaggcatgtgggtcctgggcaggcctcacccttccttcaccccctggccttcctcaccctcaccctttgggctcagaagagcctcttcctttgtggttttccttgctgttctctctcctccttccctgactccaccctggagacctaaggactcagcacagcaaagcccttcgcctgacacttcccacgtgaaacagccccgcacgccacactcccctcctcaacagggtcttaaggctgcccttctccatctcccgacagtcccgagtctcaacagcgtgcctccgcactcatcttccctttacaggaggtgtcaatggggggtttctaattgcaggataagacacgggatctcaagtccacgcagagcagcatagatttggggtggagagtggctttccagctgtctagcccgttctctactttaaacatgaagggactgacggccagagaaaggcagggcctgctggggcatccccgtcagctccgggcagagcagggatgaggcctcacaccagggtgtggcatcctgcagtgccagcggcttcttcactgactgtttttggactttaacaaagtagaaaaggaaacaataacacggttttactcaacaaacaaacaggagaaatgctggcctgaaggaggaagccacctcggtcctgttggagctgagagcaaaaaataaagacagcaaggacctcggcaattccaggcacaaaggacaagctgggccaaggcggggccctgttgtgggccttcctggcataaggcgacgcttagttcagaggcagctccagatgggacactcctcccttccgtcccgacacagcccgggcttcctggaggtggccactctttggctgagacctcagcagaccagctgccctggtgccagaatccaaatgaatgaaattaccaggaagagctgcgaggaagggtggggaggaggcgtccccgtgtgtggctgaagccgatctcctcctggtagaagctgcggtggtggttcttttaccggtagcactggaaaaaaacagaaaacgccagctgattctgcttttagagagtacaaacctctctgaggtttacagcagcctcagtaatttgcttggaggcaagtattccaatgaaagcaaacacagagccagtcccgagccccacgaccagcgctgtacccaatatgcacccagggtccagaaacgtccggcggtgaagagcctcagacacgtccccgtccatctcctcggggaccatgctgaggtcaggccggcatggttttataagctggcctcagacggctccgttccctgtctcctgtctgggtcagcccagctgccattccccggggacatgcttgcaggctgcatggccctccacctcctggctggggctcgccgcccagggatgggtccctgactcctgagcccacagtgtgtcccaggtcacatggggtcaggaccatgagatgcagatgcggccttggagggagaaactgcccactcggaagtgctgggtggccgcgcggctccaccacagaggctgagaaccagagcagtctgtgataagaggggaacaaaccccatgcggggtgaagcagacgggggtgacggagcggggccgtctcttccccttactgtaaactccccccggccaggctcacttcaaggggttttgatttctgcaaccgagagtcctagcaaacccaccaagaggcctgtgggaacgctgccatctagaccctgcacgcgtcgcctgtcatatgccgtgtccaacacggaggtcacaacacagttttctttcacagggatgacctatcagcacagccaaaagccaggccacagactgatggtgacctgagctacacggtgtgtgaagctcctcttctcatctcctcccggtagggaagaagcgactctggaaaggcctcccccgaggatcacaccttccagcccactccacgtccgtggtgcagcagggagtcctcaggatgtgaagcctttactctggctccaaaccgaggtcccgctggcaggcggcaggcgctgctccagtttccgccacatgccctgcacccagtgctccgggcccagtgcggtgggcagcctctcgtgccatgtctgtgtcccacgtccccgtgaccctgactcacctgtgcctggcccgggccaggtgtgcccgcagagcggactggatgatgacgatggcctcctcctgcacagggctgcccgtggcctgggcgatggggctcggaacgcggggcacaggagagctctggggtgcaaggacagcagggaagacgactgtttggcagccccctgctggctcccagcactcaacccccagggcaccctgggcgtcagggagacaggaagagctcagtttccttttcagatggccctgcctcccgggaattgctggtcagtgaacagcctcctggtggcaggttctgaatttttaaactgtagggattcttatttatctatttatttatttatttatttatttatttacttatttatttatttttgagatggagtctcgctctgttgcccaggctggagtgcagtggcgtgatctcgactcactgtaagctccgccttccgggttcaccccattctcctgcctcagcctcctgagtagctgggactgcgggcgcccgccaccacgcccggctaattttttgtgtttttagtagagacagagtttcaccatgttagccaggatggtctcgatctcctgaccttgtgatccacctgcctcggcctccaaaagtgctgggattacaggtgtgagccaccgcgcccggcctactatagggattcttaaacaaaaacctggtcctcaatacagaggaggggccgcaatggcctgcatctgtctttagtagtttttagctacatcttcatggagctacttgactctccggcagcttaacgcaatctggccctaacgccacatccatccggggcctgtgcagaggggcctgcgcagagaagcctgcatggcctgcgtggccagggatggagcgcaggggacgcctgctgggcgggcggggatgtggaggctgaggggtgccctacgctttctcgatggatggagtgcgagacgagcagctctgcagatggccactgggacgtccagcaccccgacattacctggtctgggaggcctggcacgctgggtggctctgagccatgtgctttgcttgctaagagctttgtccgcgtgagatgtcccctgaaagctgcctgaagcaccacagc

SEQ ID NO: 8458 - DNA, 152 bp, Homo sapiens
acccgccagagtgtggtgaccatgtggaggctgcccagaagcttccggtaaagtggctgccaggtacgggaggctctgcaccagccggaggggtgagaggggcacgcatctccgtcacgccacacactgcgcacacactggcaaaccccacg

SEQ ID NO: 8459 - DNA, 1661 bp, Homo sapiens
agtgtggagtccctggaatggaattcagtaacatttggagtgtgtattcaagtttctaaattgagattcgattactgtttggctgacatgacttttctggaagacatgatacacctactactcaattgttcttttcctttctctcgcccaacacgatcttgtaagatggatttcacccccaggccaatgcagctaattttgatagctgcattcatttatcaccagcatattgtgttctgagtgaatccactgtttgtcctgtcggatgcttgcttgattttttggcttcttatttctaagtagatagaaagcaataaaaatactatgaaatgaaagaacttgttcacaggttctgcgttacaacagtaacacatctttaatccgcctaattcttgttgttctgtaggttaaatgcaggtattttaactgtgtgaacgccaaactaaagtttacagtctttctttctgaattttgagtatcttctgttgtagaataataataaaaagactattaagagcaataaattatttttaagaaatcgagatttagtaaatcctattatgtgttcaaggaccacatgtgttctctattttgcctttaaatttttgtgaaccaattttaaatacattctcctttttgccctggattgttgacatgagtggaatacttggtttcttttcttacttatcaaaagacagcactacagatatcatattgaggattaatttatcccccctacccccagcctgacaaatattgttaccatgaagatagttttcctcaatggacttcaaattgcatctagaattagtggagcttttgtatcttctgcagacactgtgggtagcccatcaaaatgtaagctgtgctcctctcatttttatttttatttttttgggagagaatatttcaaatgaacacgtgcaccccatcatcactggaggcaaatttcagcatagatctgtaggatttttagaagaccgtgggccattgccttcatgccgtggtaagtaccacatctacaattttggtaaccgaactggtgctttagtgatgtggatttttttcttttttaaaagagatgtagcagaataattcttccagtgcaacaaaatcaattttttgctaaacgactccgagaacaacagttgggctgtcaacattcaaagcagcagagagggaactttgcactattggggtatgatgtttgggtcagttgataaaaggaaaccttttcatgcctttagatgtgagcttccagtaggtaatgattatgtgtcctttcttgatggctgtaatgagaacttcaatcactgtagtctaagacctgatctatagatgacctagaatagccatgtactataatgtgatgattctaaatttgtacctatgtgacagacattttcaataatgtgaactgctgatttgatggagctactttaagatttgtaggtgaaagtgtaatactgttggttgaactatgctgaagagggaaagtgagcgattagttgagcccttgccgggccttttttccacctgccaattctacatgtattgttgtggttttattcattgtatgaaaattcctgtgattttttttaaatgtgcagtacacatcagcctcactgagctaataaagggaaacgaatgtttcaaatcta

SEQ ID NO: 8460 - DNA, 1661 bp, Homo sapiens; identical to SEQ ID NO: 8459

SEQ ID NO: 8461 - DNA, 1032 bp, Homo sapiens
ttctttttccttttgccatggaatctgggtgggagaggatactgcgggcaccagaatgctaaagtttcctaacattttgaagtttctgtagttcatccttaatcctgacacccatgtaaatgtccaaaatgttgatcttccactgcaaatttcaaaagccttgtcaatggtcaagcgtgcagcttgttcagcggttctttctgaggagcggacaccgggttacattactaatgagagttgggtagaactctctgagatgtgttcagatagtgtaattgctacattctctgatgtagttaagtatttacagatgttaaatggagtatttttattttatgtatatactatacaacaatgttcttttttgttacagctatgcactgtaaatgcagccttcttttcaaaactgctaaatttttcttaatcaagaatattcaaatgtaattatgaggtgaaacaattattgtacactaacatatttagaagctgaacttactgcttatatatatttgattgtaaaaacaaaaagacagtgtgtgtgtctgttgagtgcaacaagagcaaaatgatgctttccgcacatccatcccttaggtgagcttcaatctaagcatcttgtcaagaaatatcctagtcccctaaaggtattaaccacttctgcgatatttttccacattttcttgtcgcttgtttttctttgaagttttatacactggatttgttaggggaatgaaattttctcatctaaaatttttctagaagatatcatgattttatgtaaagtctctcaatgggtaaccattaagaaatgtttttattttctctatcaacagtagttttgaaactagaagtcaaaaatctttttaaaatgctgttttgttttaatttttgtgattttaatttgatacaaaatgctgaggtaataattatagtatgatttttacaataattaatgtgtgtctgaagactatctttgaagccagtatttctttcccttggcagagtatgacgatggtatttatctgtattttt

SEQ ID NO: 8462 - DNA, 1032 bp, Homo sapiens; identical to SEQ ID NO: 8461

SEQ ID NO: 8463 - DNA, 1610 bp, Homo sapiens
tacacccctgccgccatgctgcccgcctcggtcctaggagcttgggggaggccgggcaggggtcctgaggggcagacagcaagcaagtccacaggcaaagctgggatcgttcactcgcccctggggtcacaagcccagacctggggcctgtgggatgagcagtgaaaacaaacgcaggcagggccgctggccagcaagcaaccgacgggcctgattcaggtctggggcccccggagcaggcagtgcccacggacctctgtggtgctcacagccccagagacaccactgaggtaggaagctgccctggagtgatgtccttggggcattggacagggaccctcaccgtagccctccctgcaggcatcaagcagatcctgccacaccagatgaccacggcagggcccgtgctgggtgagggccggggctccgatgccttcttcgacgcgctggaccacgtcatagacatacacggacacatcatcggcatgggcctgtcgcccgacaacaggtgggcctcttgccagtgtcccaggcggggtgcccgcaggcggcccacacctagcacagtgcccctcgcccaggtacctgtacgtgaacagccgcgcctggcccaacggtgcggtggtggccgaccccatgcagccgccaccaatcgcggaggagattgacctgctggtgttcgacctcaagaccatgcgggaggtgaggcgggctctgcgtgcgcaccgcgcctacacgcccaacgacgagtgcttcttcatcttcctggacgtcagcagggacttcgtggccaggtgcagggcgcggcgtggtgcagggcgggtgtgggcagcagcgggcgggcggccggctcacccaggcgctgttctgcagcggggcggaggaccggcacggctacatctgggaccgccactacaacatctgtctggccaggctgcggcacgaggatgtggtcaactcagtggtcttcagtccccaggagcaggagctgctgctcacggccagcgacgacgccaccatcaaagcctggcgctccccacgcaccatgcgcgtcctccaggcacctcgcccacggcctcgcaccttcttctcctggcttgccagccagaggcgctgaggtgtgctgggtgcactggagccaccgggaccccttgaggacatcgccaggctctgtggctttttcccgagcgggagaggtggagatgcttatagcagttacgccttaggaaggggacaaccaggccccgccacacgctcacacacaaacctgctcacgcagctgtgatgcttggcacggggtggccagtgcagatggagcccaaggccccctcggcctcctgggcaacttggggtacacaggatactgggggtgccgctcctcactcaaccccaggctaggggtacacctgacccagctggcctcggcccggggcaccttcggctggtcctgtggggccctggacggtggcccagtggtggcaggggctgctcctggctgtggttgtgcgcccggggcttgggagcggccggtcacgctgctgtgggcccgagtgtgttgcatgtccacgcaccacccgttcagggccctgaataaacagttggcaacagca

SEQ ID NO: 8464 - DNA, 133 bp, Homo sapiens
caaaaaattagccgggcgcggtggcggacgcctgtagtctcagctactcgagagactgaggtaggagaatggcgtgaacctgggaggcggagcttgcagtgagccgagattgcaccactgcactccagcctgg

SEQ ID NO: 8465 - DNA, 531 bp, Homo sapiens
actctgttgcccaggctgctcttaaactcctggtctcaagcaatctgcccacctgggcctcccaaagtgctgggattacaggtgtgagccaccacgcctggccctctgttaatgtattaattataactctttgttttgttatttgagggattactttagggttttacaactcgttaagtaaaaggggatcatcataaatgtattggaggaggaagggttggtcttgctgtgtcaggggtagcagaggtacatcttgacttaccacagtttctttctttcttttttattttattctttactcctggcaagctgtgacacagttattttcaagagatgtaatatactacttcatgcgtaagaactgtacaattatataccttttttgccagtcccaattttatgcagttgttttcatacattttatgttcatatatgtaataaaattaataatacgttgttatttttatttaaatgaccacttaggttttaatgtgtacttaataaacagtaagcagtctcttctgttgaccc

SEQ ID NO: 8466 - DNA, 531 bp, Homo sapiens; identical to SEQ ID NO: 8465

SEQ ID NO: 8467 - DNA, 2446 bp, Homo sapiens
ccactgtactacagcctgggtgacagagcaagatcctgtctcaaaacaagcaaacaaacaaaagatttgcctatttctgcttttattttttttttaattttattattattatacttaaagttttaggtacctgtgcacaatgtgcaggttagttacatatgtatacatgtgccatgttggtgtactgcaaccattaactggtcatttagcattaagtatatctcctaaagctatccctcccacctccccccaccccacaacagtccccagagtgtgatgttccccttcctgtgtccatgtgttctcattgttcaattcccacctatgagtgagaatatgcggtgtttggttttttgttcttgcgatagtttactgagaatgatgatttcgaatttcatccatgtccctacaaaggacacgaactcatcattttttatggctgcatagtattccatggtgtatatgtgccacattttcttaatccagtctatcattgttggacatttgggttggttccaagtctttgctattgtgaatagtgccgcaataaacatacgtgtgcatgtgtctttatagcagcatgatttatagtcctttgggtatatacccagtaatgggatggctgggtcaaatggtatttctagttctagatccctgaggaatcgccacactgacttccacaatggttgaactagtttacagtcccaccaacagtgtaaaagtgttcctatttctccacatcctctccagcacctgttgtttcctgactttttaatgattgccattctaactggtttgagatggtatctcattgtggttttgatttgcatttctctgatagccagtgatggtaagcatttcttcatgtgttttttggctgcctatgacaaacccacagccaatatcatactgaatgggcaaaaactggaagcattccctttgaaaactggcacaagacagggatgccctctctcaccactcctattcaacatagtgttggaagttctggccagggcaattaggcaggagaaggaaataaagggtattcagttaggaaaagaggaagtcaaattgtccctgtttgcagatgacatgattgtatatctagaaaaccccattgtctcagcccaaaatctccttaagctgataagcaacttcagcaaagtctcaggatacaaaatcaatgtacaaaaatcacaaacattcttatacaccaataacagacaaacagccaaatcatgagtgaactcccattcacaattgcttcaaagagaataaaatacctaggaatccaacttacaagggacgtgaaggacctcttcaaggagaactacaaaccactgctcagtgaaataaaagaggatacaaacaaatggaagaacattccatgctcatgggtaggaagaatcaatatcgtgaaaatggccatactgcccaaggtaatttatagattcaatgccatccccatcaagctaccaatgactttcttcacagaattggaaaaaactactttaaagttcatatggcaccaaaaaagagcctgcatcaccaagtcaatcctaagccaaaagaacaaagctggaggtatcatgctacctgacttcaaactatactacaaggctacagtaaccaaaacagcatggtactggtaccaaaacagaaatatagatcaatggaacagagcagagccctcagaaataacgctgcgtatctacaactatctgatctttgacaaacctgagaaaaacaagcaatggggaaaggattccctatttaataaatggtgctgggaaaactggctagccatatgtagaaagctgaaactagatcccttccttacaccttatacaaaaattaattcaagatggattaaagatttaaacgttagacctaaaaccataaaaaccctagaagaaaacctaggctttaccattcaggacataggcatgggcaaggacttcatgtctaaaacaccgaaagcaatggcaacaaaagccaaaattgacaaatgggatctaattaaactaaagagcttctgcacagcaaaagagactaccatcagagtgaacaggcaacccacaaaatgggagaaaatttttgcaacctactcatctgacaaagggctaatatccagaatctacaatgaactcaaatttacaagaaaaaaacaaccccatcaaaaagtgggcaaaggacatgaacagacacttctcaaaagaagacatttatgcaccaaaaaacacatgaaaaaatgttctgcttttctttctttcaatttttggttcatgtattttggggctctgttattgggggcatacacatttaggatttttatgtagtttaatcagttgatcccttatcactgtgaaattactttctttatccctagtaactgcccttactcttacatctactttctgtgatattaatatggtcactttttatt

SEQ ID NO: 8468 - DNA, 125 bp, Homo sapiens
gttctgctctgtcacccaggctggagtgcaatggcgcgatctcggctcactgcaacctctgcctcccaggttcaagcaattctcctgcctcagcctcccaagtagctgggattacaggcgcccgc

SEQ ID NO: 8469 - DNA, 120 bp, Homo sapiens
gttctgctctgtcacccaggctggagtgcaatggcgcgatctcggctcactgcaacctctgcctcccaggttcaagcaattctcctgcctcagcctcccaagtagctgggattacaggcg

SEQ ID NO: 8470 - DNA, 2446 bp, Homo sapiens
ccactgtactacagcctgggtgacagagcaagatcctgtctcaaaacaagcaaacaaacaaaagatttgcctatttctgcttttattttttttttaattttattattattatacttaaagttttaggtacctgtgcacaatgtgcaggttagttacatatgtatacatgtgccatgttggtgtactgcaaccattaactggtcatttagcattaagtatatctcctaaagatatccctcccacctccccccaccccacaacagtccccagagtgtgatgttccccttcctgtgtccatgtgttctcattgttcaattcccacctatgagtgagaatatgcggtgtttggttttttgttcttgcgatagtttactgagaatgatgatttcgaatttcatccatgtccctacaaaggacacgaactcatcattttttatggctgcatagtattccatggtgtatatgtgccacattttcttaatccagtctatcattgttggacatttgggttggttccaagtctttgctattgtgaatagtgccgcaataaacatacgtgtgcatgtgtctttatagcagcatgatttatagtcctttgggtatatacccagtaatgggatggctgggtcaaatggtatttctagttctagatccctgaggaatcgccacactgacttccacaatggttgaactagtttacagtcccaccaacagtgtaaaagtgttcctatttctccacatcctctccagcacctgttgtttcctgactttttaatgattgccattctaactggtttgagatggtatctcattgtggttttgatttgcatttctctgatagccagtgatggtaagcatttcttcatgtgttttttggctgcctatgacaaacccacagccaatatcatactgaatgggcaaaaactggaagcattccctttgaaaactggcacaagacagggatgccctctctcaccactcctattcaacatagtgttggaagttctggccagggcaattaggcaggagaaggaaataaagggtattcagttaggaaaagaggaagtcaaattgtccctgtttgcagatgacatgattgtatatctagaaaaccccattgtctcagcccaaaatctccttaagctgataagcaacttcagcaaagtctcaggatacaaaatcaatgtacaaaaatcacaaacattcttatacaccaataacagacaaacagccaaatcatgagtgaactcccattcacaattgcttcaaagagaataaaatacctaggaatccaacttacaagggacgtgaaggacctcttcaaggagaactacaaaccactgctcagtgaaataaaagaggatacaaacaaatggaagaacattccatgctcatgggtaggaagaatcaatatcgtgaaaatggccatactgcccaaggtaatttatagattcaatgccatccccatcaagctaccaatgactttcttcacagaattggaaaaaactactttaaagttcatatggcaccaaaaaagagcctgcatcaccaagtcaatcctaagccaaaagaacaaagctggaggtatcatgctacctgacttcaaactatactacaaggctacagtaaccaaaacagcatggtactggtaccaaaacagaaatatagatcaatggaacagagcagagccctcagaaataacgctgcgtatctacaactatctgatctttgacaaacctgagaaaaacaagcaatggggaaaggattccctatttaataaatggtgctgggaaaactggctagccatatgtagaaagctgaaactagatcccttccttacaccttatacaaaaattaattcaagatggattaaagatttaaacgttagacctaaaaccataaaaaccctagaagaaaacctaggctttaccattcaggacataggcatgggcaaggacttcatgtctaaaacaccgaaagcaatggcaacaaaagccaaaattgacaaatgggatctaattaaactaaagagcttctgcacagcaaaagagactaccatcagagtgaacaggcaacccacaaaatgggagaaaatttttgcaacctactcatctgacaaagggctaatatccagaatctacaatgaactcaaatttacaagaaaaaaacaaccccatcaaaaagtgggcaaaggacatgaacagacacttctcaaaagaagacatttatgcaccaaaaaacacatgaaaaaatgttctgcttttctttctttcaatttttggttcatgtattttggggctctgttattgggggcatacacatttaggatttttatgtagtttaatcagttgatcccttatcactgtgaaattactttctttatccctagtaactgcccttactcttacatctactttctgtgatattaatatggtcactttttatt

SEQ ID NO: 8471 - DNA, 7035 bp, Homo sapiens
agctgacagctttaaagaccagaccttctttctcagccaggtttcccaggatgccctgaggagaaccatcttccctctggggggattaacgaaagagtttgtaaagaaaatcgctgctgagaatagacttcatcatgtgcttcagaagaaagaggtacgagtgagcagttgcctttgattagtgcctgtttccctttcccgactgcatggcacggagcagctggacctgtgggtcccgcaccacttccccttctccaggacctaacatcaaaggcgggccttggagcaatagatggaggagtttgctgaggcgcacggtacagggctctgctgacatcgggagcagcctatacgagactccttgcttttttcctctcctctgcccctatgtggtaggcagctttccccacagccttagcagctggtggggtgctcttgggatggcctgcctgccaggtgagtgccaggcagtgtgatgcagccccgagacccctggaggggcaggtgctgtgccgccgtctgcacactcatgtgccctgtcacccgcttgcccggcacagactcgttcggtgccatctgttcgggcgctgtgctgctgggccgcgaggaattggtgacgcgcacacagttccatcttcgcctccatggagcccgcccgcgagtgggggacacaggcaggaggccaatcagtgtaaacctagaaaatgtctacggagggaggtgtaggaccctgggtgggaagcaccagtggggtctgagagtagggaatggagatgccaaaaacggcctcaaaagaagtcacatggaacctgagacctgaaggaggagaggatccggtgtcccagagagggctgggaaagtccagatgagggaacggcagtgcaaaggccttgaggcgaggagaagccagggagccgctgtgggggtgcctgcctgtggccccagctcctcaggaggatcgagcgcacccaggagtttgaggacagcctgggcaacacagcgaaactcgtctcaaaaagagagaacccggagtgttggcggaactaggatgaagcccgtgggagggccttggggatggagggcgagggcgctgtgggatgagcctcacctcttcaggggccagtgcggtgggagctgttgctccttcgtgtctcttcctggtaatggaaacggccatacctttcatcagagccatcttccctgaagagcacgcccaccgcccgtcctcctctcctcttgttttccgtttccggtgtcgctctgtggtgggagccgcagggatggaagggcagtcttgagagacacaaaccagagtaaacgatgcagcccctgatggggccacggtggagagcgcacgccacccaggctccccagctagggcagatgtgcttgaggaaggcgcctctctcctctgactcccctggagccctcccctaaggccttagcttcaggcctggctttcctgctacctgccccttctctggtccctgtctctcccccactcctcgcaggacagtggcctgaaggacctgaccgggttctgctttcttccccggggcagctggtgtgagggtctcccgcgcagggtcagaccccgcgggccgagacaatgaggcgttctctaaggctctggcatcgtgtgcgccggctgtgactggcggccgagggtgccggtgggcagccgggcccctaccctggaagcaaagtgtggggtgaggccgggaggccccagggcccgctcaggacgtctgggtacagcttgggccaccgccacttctgctcctctcacggctgccgtcttctcatttcagagcatgggcatgtgtttcatcgggaagaggaattttgaacatttccttcttcaggtgcgtgctgctctttgacacaaagagatggggctgcgtgtctgccctgggcctagatctccgtcggtaatgacatgtttgttttccagtatctgcagcctcgacctggtcactttatttccatagaagacaataaggttctgggaacacataaaggtgaggtgcagactctgccacttgtcatctgaaatgcctagagctgtggcgtttcagctctgggagactagaccagagttcctgtcgtcccttccacttggctggagaattgtagaaggctctgtggggcggccgggggcgggcacggcctagggtggaacagttgccttgatggtggctgggtgcacttccagatgtggcctcagctgagatgctggagttcatgaaaagcgcgcctctgacttggaaggactatactctgtgagttacgtatcaagtccctgtaaaaagaatgatttccttcctgtgtaaggaaaatgttaaactacacaaaactccactctgattcagggagtaaggtggacgtcccggcatggtgtgaatgattaaggaccacatgcagcgatgggatcaggcgtccgcgctggccagagtgctgctcgctcatgtgcagacccttactgcggtgaggcctgcgtgagcctgtgctgtgcctggtgtcaggggacaggctccgagtcagtcacagtgtgcagtcctgctgtggggacagagtgcagccattgttgggttagtacagtggcggggatgtgcctgccggcgtgatgatcaggcaggtcttgacacagcacagacctgagctgtgggactggccaggagagccaggctgcagctcaggtgtagggcgtcttgcagtgaattgcacttggagatcttccacctcttgtggaggggagacggcaggcggagccggggctaggcattcctgagacaggtggaggtgacagctttgcttgggacagaactgccagacaggattgcccatgtatctgccagccctggccccagcaggagccagttggatgactcatggcttccacctgcagttcacttcactgaagaaggctgccggcccaggccacgtggtaaatcccatgaggttctctctgcctgtgtgccccactgcaggggagggaggcagtgagtttgccatctgctgtgtgacattgtgagggtgcgcagagcagctgggggtagccctgatgcagttactgcattagatggacactgtgaagacgtgcagctatgtcatgggctcagcaagaagggcccctggcgtcacacagggcacccagccgcatcctgggcctagggtcaggggctcctacagctggaacctgcaccttctggggcacaaggtgccttctttgtggccaccacaccccatgtccagcccaggcctggacaatgatgagatgtgctcaggtgcttggtcagggctggctttggtggttggagaatcgtatcttcctagtgagttacaccattgctgggcctgctctgggctgccctcccagcatctgccttcatgatgaggcgtgacatgtgggctgtaacttgttgcccagcctcatggagaaactgtctttctgtaggttggttcctgtataccttgggccagagagcaaacataggtggcctgagagagccctggtacgtggtggagaaggacagcgtcaagggtgacgtgtttgtggtgagtgggccggcctctgagacagcactggggctggttctggcagggccagcagtgcttccagaccagggcttgagaaggcctccagcagccgtggcttcctggaggctgtgactaactctgttcctgtccttggtcccctgcctttcctgggactggccatggtggcaggagagttttaaggtattcattaggctgagttgtatgctggtctcttaatcatccctgaaccccgatacacagatacagtttctccaattttatgaaagaggacagcgacgcccagagcttgggtggctcatccggtggagagggcatggcctcagtgccaaggatggtgcccaccatggtaggatccagtgagttgttgtcaggcaggtgcagatggccaagccaggatcaaaccaagccttccaccacagtggggaccttaccactgtgaccctggcctcaaagcagggccgctcagtggcggcaagctcaccccaccttcaggggaccttgccagtgtctagaggcatttttggttgtcacagcttgggtggaaaagcaaggacgcgggtgctgctgcatctgtgggtcaggccggggatgctgcttgccgtgttcagcacagcctcttccctgagtgacccggcctccaccttggcgcgtggagctgagaaggcccactctcagcaccctggctgccggctcatgttctggcacgaatgctggggcgccttctcttagacggaggcgggggccagcaggccccacccaccgattccaggacatctccttactaggaagacctgtggggagaaaagcctggctgcgaatgaattaaatgatctagatttcagtttgctgtgagaagaccagaagggttaaccaacggcctcctgtccctggacgggtcttggtgcctgcttagaacccaaagcccttaacttcatgctcctcgtcctgcttcaggggcggggcttggcacaatcccaggaggtgccaggtctcaatggcccgaggccatgggtgggtgacagggagcaggggcctcagaaccaacctagggtatctggggccccccagaccagggccagtcctggggcacctgtgggaagccagcagctaccagtccctcctttctcctcagccatttggtgtgtggaggaattcctggggtggccttgagagaagagcccgtggtgtggctggcccctgtccctgcgaatagaaaaaccagtcctcgaggggggccgtgctgctgccccacaggtggttgcaggtagagggcctgagtcagacttgaacctgcagcattcactgtcatgggctcggatctcacccctgcctcttgcccactctgacatggtacttccttcctgggccttagtctcctcatctgtaaaatggggattcaaaggcccggcgggtgatgagatgaatttctgtgggtagaacacttcgagcggtgccagcaccgttacctgtgtgtgtgtgtgctggtaggacagttgttcccagggaccacactgaggccggccttggggccaggtgcccctcggcgtccccaccttcacattccattctgcaggccccccggacagaccacccagccctgtacagggacctgctgaggaccagccgcgtgcactggattgcggaggagcctcccgcagcactggtccgggacaagatgatggagtgccacttccgattccgccaccagatggcactaggtgactgacgggagggctcctgaggacgggccccttgaagctgagcttcctgaggccagatttgggccagggatgggagaccctggggtaggaaagtcccgttgtggagatcatttggagattacctaaagtatttagaactcccgtgtcctgtgcctgccctgagcgaggcctgggggtgctgggagcagatgcaggcaggccccggcgtgttgggctgaagcaagtgtgtacactgccccgcagtgtcctgctgcgtccagggcccaggctggtgccctgcccttcccctctaagcaggggtttttgaccccgtgggctggtgctcctttctccctgggggcctgaggtcgaccaggaaaggcctgtgccccctccaagggcccctctcttctacccagtgccctgtgtgctgaccctcaatcaagatggcaccgtgtgggtgacagctgtgcaggctgtgcgtgcccttgccacaggacaggtgcgtggggtgtgggggtgagcccggggaggactgtactgctctgcaccctgccagggcacccgggttacagaggaaggggctgaggcccaggagtagggtgtgctcgggtcacacagctggtgagggcagagtgccaccagccctgccctgggggctcctcccacagtgacaactgtgagaggatttccactctggtgtcaccaaccagccagttcctgctcgggccctgagaggctcagctgctgcccgggccccagaagcgaggacagaaaatggaaggggcatgaggacagtgctcaaagaggcagagggtcggggcccctgtgggccgagtgtgcaggagctcccagggtgggcgcctggtgggtgtaggcctgaggaatctccaggggcaggtggtgggagggaacctggggtgagggaagcggaagcatcctctggctgccaccatgctccttcctgtcacagctccacattcccaaggggtgcagagacctgccagtcccttggagtcccaggagaggcccctgtgactgtcccactcagggagaggtaccctgaagaccctccctagtgaagccactgggtgccccaggcctctcctctcctgttcagcagcagcagcagcagcaaaaccctgctcccctgggagctcagtgcctggtgctccgagcacaggccaggccccataggggagcactctgcccctgcctgccctcggctggctccctgtggcacccctgatgccagggtctctcccctacagtttgctgtgttctacaagggggacgagtgcctgggcagcgggaagatcctgcggctggggccgtctgcctacacgctccagaagggccagcgcagagctgggatggccactgagagccccagtgacagcccagaagatggtccaggcctgagtcccttgctctgacagagatggatctgctagaaggaacctggagagcaggacccatggctgggcggctggtgagcagtccaggtgcccaagggccagcttgctgctgcccaaagcagaggaagccgggctggctgagggtccgaaaagcctgcaggggcccggcgagccccaggaagagcctcagctccaggctggggctctggctgctggagcatctgctggctggtggggtggcccgagttccccttcaccgcccccagggagggtttcccacctcagagtacaccgaggggacctgcagagggggctgtcgggacagcgtggaataaacattatttcaaggacacata

SEQ ID NO: 8472 - DNA, 7035 bp, Homo sapiens; identical to SEQ ID NO: 8471

SEQ ID NO: 8473 - DNA, 875 bp, Homo sapiens
atctgacctgggtccctcgggtggcagagctggatttcagtgcacttccgctcactccccagcccctgctgcttctgctgggtcaggccccagctgagttctttcctcagcgttgctgagcccatcctgaaggctgcagtgatggggcagggccgtgcttggtcaagggagccctgagtgtgccaacagtcgtctgccgccctctgttccctcctcgccttccttccttatgccacagggtgatcaggtaactgtactgacttgagcccagagaagagcagcccactcccgtaagacagccccccatttcaggaagacatgggtttgaatgcagataagacagccccccatttcaggaagacatgggttggaatgcagagtcctgccacttgggaactccagggtggaattcaccaagtaattgtgcatttacggggcctgaggagatggagggttaatttccatgttgaatagatgcgcctgcttacctcctagaacattacctcctagaacactgtgtgccctgcagagccatcgacctttattataggccacgtgccctcggaaacttgggacagtactgatgcgttctgttgagtgcgtttggcatgtgggaattgtgatggtgcacagtgtcttggccttcactgggttttgtaggcacactaaggtttccatttcattcttcttcagttgccctggcccagcctgggtctctgggtagagcacctgcaggggcagtggacggcctgggctcagggtcggtcagcacctgagaccagcgctcctaggcctggcctgtgactgggctgattttcccccacacagcgtgctaccaccggcctggcagagccagcacggcagccggcgtgtca

SEQ ID NO: 8474 - DNA, 875 bp, Homo sapiens; identical to SEQ ID NO: 8473

SEQ ID NO: 8475 - DNA, 24983 bp, Homo sapiens; identical to SEQ ID NO: 5950

SEQ ID NO: 8476 - DNA, 24977 bp, Homo sapiens; identical to SEQ ID NO: 5951

SEQ ID NO: 8477 - DNA, 464 bp, Homo sapiens; identical to SEQ ID NO: 5952

SEQ ID NO: 8478 - DNA, 454 bp, Homo sapiens; identical to SEQ ID NO: 5953

SEQ ID NO: 8479 - DNA, 1964 bp, Homo sapiens
cagaggatcgccagggccagcggccagaccaggatccgacctcacacactaaacgtttcaccactttaccaaccattgcaggctgcgttttaaatattttacgcataaaaagggatgctggcccataaaccaccaatctgttggccacaaagacttgaaataacaacgttttgtgtcctccattgtgaaaaaaaaaaaaagacggaagttaaaggggtgaaggcaactcagtcgtaactattccaaatacaccaggaataagtggagatttatagccaaggagcaaggagcaggtgttcggaaaactgctaagaggaaacatcaattctgggggaaattctggctgaaccaacctaacaggagtcccagtgaaggcaggccagggggtcagatactaagggtaggagtaaagaattttgatcacatatggagggtgggggattcttgctaaactgccgtggcagtgttacttcctaacactgcatttacaaggaagtgcacacaaggacctgggagaagattcagaagcctaactgaagtttggccaagcaaagaatctttaacacagtctcttgattgttgagataattgctcgcatgatttttttttatataacagctttattgggatataactcacataccaaacaagtcaaccatttaaagtataccattcagcgatttttagtatatttccagatatgttcaacaatcaccacaatttgagaacattttcatcacatgtaaaagaaacccataccctctagctgtcactcttcctaactctaccctccaaaccccagccctagcaaacaataatcaatttcctgtctctatgggtttgcctattctggatatttcatataaatggagccatacaatatgtggccttttgtgtctggcttctttcatttagcgtaatgctttcaaggttcatctatgttgtagcatgtatctgtacagtacttcgttcctttagattgctggagcatattctgttgcattttgtttatccattcatcagttgatggacatttcagttgtttccacattttggctattgtgaataaggctgctgtacacagtcatgtacagtttttttatggacctatgtttccatttctgttgagtggaattggaatctaagagtggaattgctggatgtggaggcgaaagcagctccatcttggaagctaatcctccgtgttgacttctgattgaccccagttctgggaaggcctctaagatttctactttatctattgttccttgtgtaagagcaggtatctacccagtatgttctgtccttaattcaaacaacttgatgttattatacttcaattgtcctacacatcccttctgaaccacccctcccctatggtatataagccctaaggggctggagtgatggctcatgccggtaatcccaatgcttttggaagttgaagctggaggattccttgaagccaggagttcgagaccagcctgggcaacaaagcaagaccctgtctctacaaaaaataaaaaataaaaattacctgggtacagtggcacacacctatagtcccagctactggagaggctgaggcaggaggattgcttgaagccaggagttcgagaccagcctgggcaacaaagcaagaccctgtctctacaaaaaataaaaaataaaaattacctgggtgcagtggcacacacctatagtcccagctactggagaggctgaggcaggaggatcacttgagtccaggagtttgaggcttctgtgagccatgatcgtaccactgcaccccaacctaggcaatacagagagagagagaccttatctcaaaagaaaaaaaaaaaaaaacattgagtctgggggttaatagcacagcaatccaccatctcatcttgctgcccaagacacagatatggacatggcttctgttccttagtcgctattaaatgtttcttcccaaggaa

SEQ ID NO: 8480 - DNA, 445 bp, Homo sapiens
agtcgattttcttaactacatgaaatatgtaataattttatttatgcttaaaatatttatttccccataggatgtgtattatgtaggtgctgatgtcagcgactcacagttactaggtacttgggacaatctgaaagctgcaggccttgaggataaaattgaattacttaaaatctctgttataggtaagatactaaaaatgcaaaacaattgagaaaaggaacaatgtaaatatatttagaatcataatataaaacaagtctcactatgtaaaggttggttttaccctttaatatatctgtgggactaatactcagtttacttctaatagtctaacctttttattttcaaagtgttcataattgggaagcaacaattctatagttttcgtaagcatgtaaagcatgacttcttaaaatgtgtttgttaaaaaaagaaaaaaaaa

SEQ ID NO: 8481 - DNA, 653 bp, Homo sapiens
gtggtagtgacccacaatctaagtgaccccagtatccaacctgatccatttccctctttggagcttggtacccagagcagtacacagacagctcagccttgggtaaggccagtgccactaaaaatgaaatttaaaaatgggatgtttgttatttatcatgtttactataaactgttctccttcctacatatcataacaaggaaaatcaagttctataaatcttaattgttgttgtaagtatacagaaatacatctctacctcagcctgtgtctacaagtgtcatggcaagaaaaggtcctaaggtaaagtaaagccatctaaagatacttcaggtcagattatgtcattgaacacagaccatgggagagaaggagcacagcgtatggcacatttgagatcctaataaaaatgggttctcatgctattaacaattttcaacaaaatttgcatttaaatttttccttctgctccttactgccccttcatgggggatttgtgtgatattctctttaaaatttagtaccaggggaaggcttctgtctcttgaagaacattttgtttctttccattaggtaccatatggctctgactgaaacctggctgtgcactgaggactctgcttcctctgtagacatatcaagtggtggatgtc

SEQ ID NO: 8482 - DNA, 766 bp, Homo sapiens
tctttgaatttcttttgaataaataatatgaaatgttctgaattatcttactgtcttgcctcacattagacagtatccgtgagatacacaggagtaagctaaccacccatcccaatttgctaaaccaggacttttagtgctaaaatcagcaaagtctggagtaaaccaggacagttggccaccctgtgaggtagagggaaaacagtaccctgtttaatgaaggggaatcagcagtgacacacataactaggaatcaagtctattgaggccaatcaaaataatattttcctgagatccctggcgtttagacaatttttaaaaactattccttgtttttttcttattcccccagtatatgtctctcccttaaataatgagtgaatttaattcccaggtaagaacattgtattctgttgacagtgataggtagtagataggtcccagtatcagacctataatcaggaggaataaaatacgtttaagaaattttattgtagtggaaaagtagtaaagatgagtatcaacagaagaaaatactaggataacttgcataaaagcataataaagcatccccaaagaagaaattgtcttgttgattgagatctcatagttgtttgctgccagtgacttttatttttaagcctttctgccaaggtttttaataggactctgtgcaggagacacaagtttgtagagcaaactaaggggtgactagactgcaagctttcatgatccctaatttctttaagaatgctatttctttgaa

SEQ ID NO: 8483 - DNA, 4362 bp, Homo sapiens
tagatttcagggtgcagatgatgacactgtaaagcgaccaaagtctgaacaaagtgattggtacctcgttgtctgatgcacctaggctctcctggctctgggctccaaaagaatgggcccaggccaggtgaccccattttgcctctcccaggcttgaccactatgctatcatcaagtttccgctgaccactgagtctgccatgaagaagatagaagacaacaacacacttgtgttcattgtggatgttaaagccaacaagcaccagattaaacaggctgtgaagaagctgtatgacattgatgtggccaaggtcaacaccctgattcggtgagttgggcctcaagggatggggagcaggctggaccagcagtctggagccaaaaaaacctgcattccatgaagctttttgatgtttaggtagtcctggtaatgcaggactacacgtgtagtccgagctatgcaggaggattttttgggggccaggaatcacccatgattgccccattgtactccagcctgagcaaccaagcaaggccctttttaaaaaaaaaaaaaaaaaaaatcccctggacctttcagcaggggaaaaaggttccttgacttaaacttggtgtaggtttaacagggtgtgtgagccttgaggcaggaattacaggctgttttagttacagacctttgtgtggacctgaggctttctaggacttgattgggggttggtcctcattttctgggtccctacttctattgggaaaggcaactagagggcgacacgtggcaaattaccttggtttaagtcttaatgtggcctgtggtgtttcccataaaaaaattggctttgtggcttcatggtgtcctctgggctaatgatggaaaaatcattattggaaaagaatgacatgaacaaaggaaccactgaagtgccggaggactggaggaggaagggggagggtgtgggggcagtgagggtggcagggactaaggcttccttctctaccctaggcctgatggagagaagaaggcatatgttcgactggctcctgattacgatgctttggatgttgccaacaaagtaagtttccttcctacaaaccccttaatgctcaccccttgggtgcaaatgatgcatatgttagcgaccaaagcctgatctttgctgattagtcataattaactgactgcacccctatccttgacaaaccttatcctcacattcctcattttgctttctaaaaataacattccagcttaatcttcatatttcaactccagtaacgaggctcccttttgtttttcagattgggatcatctaaactgagtccagctgcctaattctgaatatatatatatatatatcttttcaccatatacatgcctgtctgtcaatttctggttgggctgggaggccacacacacacactgacatgacagggcttgggcaagactcctgttctacttatccttttgaaatacctcaccctgccactccaccatgtatgatcattccagagatctttgtgactagagttagtgtcctaggaaaaccagaactcagaacttgcctccatggttgagtaacaagctgtacaagaaccccttttatccctggaagaggctgtgtatgaaaccaatgcccagggtttgaagggtgttagcatccatttcaggggagtgtggattggctggctctctggtagcattttgtcctcacacacccatctactatgtccaaccggtctgtctgcttccctcaccccttgcccaataaaggacaaggacttcagaggagtactttcattagtgttttcaatagtgtgggcgcaggctcagaaggtggagaggctggcctcagaggacacccaggcttggggctaagtcccagtgtccatatgaagctgtttctggccttgtccgtttttgttgtcccaggctctgtgcccctcactcagtcaagaacttgtctttgtgttgctttttggggacatgctcagggcagaagtcagagcggaggaggcgggaaaagtagattatgatcatcacgtccagcatgagcaggatacccagcaggaaggtgcccagggtcctctggttcacataacgcaagaagaaatgggtgaggtaggcctgaggggccaggcggaagagaaagtacatgaccaggttcacatacttgttaacccggtagaggagatgatcctgggcattactgattttcatcatcatgcgaatggtgaggaagatgttgctgacttccaccagtagtgttaagacacccccaccgacaaagctgctccaaaagatgccggagaagaaggcacccatggcctagagggaagaaagaataggagttagggaacccagatgcagacgctttcctggaagtttggggggtgtggctatcagattgagggctggaaaatcccaaatttccccctggaataatagtttatagtgggtaagatgctttgttttgttagttcaacattactagattttgattgctgctcacagctggctgtgggtgatgttcagtctaaagaggcagtgaaaccatgggttgctggcctcagtgaacaagtacagactgccaacctccagcatcctagcataagaagtagcacacaggtcgggggtgggtggtaagaaaacacggccttctcccagattcagaaagacggagctgagactagattactgacaccaggcctataccacatagtctgcttctctcttaccatgacgtgatggacaaggtattcccaagaggctcgcgtctgtccgctagccacgatgtccaccgtatcgtggatgaaataccctagtggagggatggggcaagagatcatgaactgaacaagcagcttccttctccctgtccccaatttgcctcccgcttcctgggcaagacctacccgcagagaagcaaacgagcaaatagccagaaagtgaccacgccgtctcaatctccactaacatgtcaggagtctgccatacactggaaaggagggaagaggaggctctgcatttcggcaccctcaaggaccatcaacttctcggttacccttcgcagccccgggggatcctgggctcgcgctagtggctgactgggaagctaagagtggctgggcaaaacccaagagcctccagtttcccaggggcgatccccctcccctggggccactgcggcttttggttggataggataccaaacgggatcaggtgagactgcgtggcctcagcccgccagtgagcgatgggggtagtaacacaagagccggccccggctccccgctcaggatcccctggccacctcatttccacagtcgctcactcaccacagcagtgcccagatccccgacacaatggagtgagcgaaggagacgagcaggttgtgccagcgccaggtgcgcagggggtcggcgcgcacgtgcacgggtaggggcaggcgacagagcgcgcgccggagcgcccggaaggtcagcgtggcgcccaggagcagcggcagggcggggtgcagcagtcggggcatgctggccctccctgccgtccgccctcgaggccgcctcctaggtctgttctgggaaccgggatccctctcgggccagtccaggccggccgcctctcccgccggccgccagccccacacagttggcgaagccctctaggccccttggctcctcctcgccctccctgcgaggcctctgcccccgcccccagccgcccgcgcccccgccccgcccgcctgcccccgccccgtccgcctgcccccgcccctcaggcgctgctgccgcgcgagccgggtgtccccgtggcctctcggccaccggccggctcccgcggacttcgggtaactaggagctgtgctgggggcgtcgtcgccgagacacccctcgctggcgcctcccgactgccgacggagtccccgctgccctcgctcgcctggcctcattaacccgcgtccccacttttccccgggccaccggctaccccgccctgggcgggtaccgcgagagctctctccgccctctactttctgcgcagagctggacgggacccgacacgcccacgccccctaagtcctggtcctggggtgggctccggagccccgcgtccgacagtggtctccgtgcagacccagtgcccctaccgcaccactcgcagtcttctggccggagtcccgtgtttacctgtccctcccgcgcccgcgaggtgggcacttgggaactgctgagtaacccatcgccacctcttcccgccggctcttaaactcctggggccgggcggctgtcacagtcctccctcagacagtcccggccctcggcccggctccccggaggctgggcaagcaagacctccgatttgcc

SEQ ID NO: 8484 - DNA, 158 bp, Homo sapiens
tttttttttttttgagatggaggctcactctatcgcccaggctggagtgcaatggcacgatctcggctcactgcaacctccgcctcccagattcaagcgattctcctgcctcagcctcccgagtagctgggattacaagcgcgcgccaccgtgcccaa

SEQ ID NO: 8485 - DNA, 244 bp, Homo sapiens
gcggatcacgaggtcaggagattgagaccatcgtggctaacacggtgaaaccccgtctctactaaaaatacaaaaaaaattagccgggcgtggtggcaggcgccgctagtcccactactgagtcccgaggctgaagcaggagaatggtgtgaacccaggaggcggagcttgcagcgagccgagatcctgtcactgcactccagcctgggcgaagcgagactctgtctcattaaaaaaaaaaaaa

SEQ ID NO: 8486 - DNA, 2938 bp, Homo sapiens
ttataaagtgtcactctgttgctcagtctggagtgcagtgacatgatcttagctcactgcaacctcaaactcctgggttgaagcaatcctctgcctcagtctccctgagtagctagggcaacaggcacgagccaccgcacctggctagttttaaatttttttgcagagacaggatcctgctatgttgctcaggctggtcgcaaactcccggcctcaaataatcctcccatcttggcttcccaaagcgctagcattacaggtgtgagccactgcgcccagcctagaaatgtttcctagaaataaaagcacaagtttgtaaacataaatgtggaaggatgtatatggtggcattaacttaatgctgacttttttgttcttaatttggcacaaaaaggtgtttataagtgctctacttgtttctgaacatttatttctcctcatagttaattcctaaacaaatcttattccctttacctacaaaatatgttctagatctgttcactcctctctaccaacattgtttttcctagtcaataaacatagatcaacctaataaaaattgcataatactcttaattttggatatatcataaatatgctaccattgttttttaagtcttttgctactataattaacagtatgaattacagtggagatttaatgtttaacttcaaaaagactccatagagtctgacgaatgcaaacatatttacagtaacttttcttacactcactagattactttgattttcggttttattggcaagagtgattcgtgaaaaccatgactagatgaacattggaggaaacattcccaagcattaatcacttaattttagttttgtacatttttttctgtctaatgttacctttgttgtaaaattatctttttttaaggaatgctttgtaaagcttagttctaatattacagaattcatagttatgtaattaatctcaaaatcactcaccattgaagacccttgctatttttatttcctataacacgaagtctattatctccttaataatttttaatttccatccttagaacttcttcagctctgctactttttccttaaggccagggtcataggcagcacactggtgataactcactgtctagaaatattgcattttgtttacaaagttattttctatgttcagcattttgctggctgccttgggtacagtacctcaattgaatgtctacacctgcatatttgtggacattgaaatcatctaccatttttcagagacactaccttgtgatataaaaaaacagaagccaaaaaaaaaaaaatccaaaggaatttttgaaggagcctttcttcactactctgctcttgttagaataatgagtaacactggtataacattctacaatttacaagaatatttatctgcttcatgaaacctcaaaacaaacctttgagactatcaggatcctaaccactttacagatgaagataacttacataatagttatggggtttcctggatctgactcctttattcttcacattacattatgttgccttccccacaactaatcaaggactccgttttttcttttttctttctcgaaaccatttcctccatattagttccctttggaatagaagcctttttaaaagtccaccttagtatatcttcagggaatcacaaattcactatgctatttataattcatgagtttctctaatggtatcaaggcagcaaatacaggtgaagtaataattatccacctgatagtacttaacacacataccccgtgtaaaaatactgctggtgtacagtgtgtgtgttggtgacgccggaggaagtggccgtgaacaggcttaatgccgcattgagtaacttcaacctcatcttgctcaggttcatatctctcctgaatttcccctggtaagcgcaagattcaggatccgttctcacagttttttgtttaccagttgatgttggctgcattcaggaacgccttgctctcttaagccacagtgccttcctggtctcttcttcacagggtcttccacaatcgctctttttcctgggcacggtggtttgctgaaagtcggggtggggggcggggcgttcccaagtttccaggccaattacctacctgccttagagcaattacgcacttctctctggtagtccctgaaatgttctaatcatcagatcgccccagcttctcctgaccgtttcttgcttacggctcagttcagacagtatttgttccgggacgctcagcgggaggcggtttttaccggctcactcgagaccccaattccaggcgccctgcagcttccctcagactccccgggaccgtgtttggccttcccattcgtacgctgcggctgcgctttcctctcgtaacaccacgctggcgaacctggaaaggatcaaatagtcccactcgccaacctagcgcggcgggaccggcccaaaagggcctttgcagcctgcgcatgcggactcggcggccgccaccgactccccgtctgcttccctccgggcggcagccgcggtttggagcttgctgacagctctgcgaccggcgggcgcagcctcgtctcgtgcttccacgttatcctatcagggacggggcggggcggcggcctccgcagcctatcagcgcgaaccacgaccccggcgagcccgggaggaaagccgccagaaagaaggcgattggatggcggcggcgctctggggcgtagcgtcgcccgggccccgcccaccgctgccttcctctgctgggctccagagccactgaggcctgagcgagagccgacggcgggcgggcgcagctgctgccggagcgccggcgcgtgctggtgggccacacacctttcctcctcttcactcgcgagccctcggacatggtggcccccggctccgtgaccagccggctgggctcggtattccccttcctgctag

SEQ ID NO: 8487 - DNA, 2939 bp, Homo sapiens
ttataaagtgtcactctgttgctcagtctggagtgcagtgacatgatcttagctcactgcaacctcaaactcctgggttgaagcaatcctctgcctcagtctccctgagtagctagggcaacaggcacgagccaccgcacctggctagttttaaatttttttgcagagacaggatcctgctatgttgctcaggctggtcgcaaactcccggcctcaaataatcctcccatcttggcttcccaaagcgctagcattacaggtgtgagccactgcgcccagcctagaaatgtttcctagaaataaaagcacaagtttgtaaacataaatgtggaaggatgtatatggtggcattaacttaatgctgacttttttgttcttaatttggcacaaaaaggtgtttataagtgctctacttgtttctgaacatttatttctccctcatagttaattcctaaacaaatcttattccctttacctacaaaatatgttctagatctgttcactcctctctaccaacattgtttttcctagtcaataaacatagatcaacctaataaaaattgcataatactcttaattttggatatatcataaatatgctaccattgttttttaagtcttttgctactataattaacagtatgaattacagtggagatttaatgtttaacttcaaaaagactccatagagtctgacgaatgcaaacatatttacagtaacttttcttacactcactagattactttgattttcggttttattggcaagagtgattcgtgaaaaccatgactagatgaacattggaggaaacattcccaagcattaatcacttaattttagttttgtacatttttttctgtctaatgttacctttgttgtaaaattatctttttttaaggaatgctttgtaaagcttagttctaatattacagaattcatagttatgtaattaatctcaaaatcactcaccattgaagacccttgctatttttatttcctataacacgaagtctattatctccttaataatttttaatttccatccttagaacttcttcagctctgctactttttccttaaggccagggtcataggcagcacactggtgataactcactgtctagaaatattgcattttgtttacaaagttattttctatgttcagcattttgctggctgccttgggtacagtacctcaattgaatgtctacacctgcatatttgtggacattgaaatcatctaccatttttcagagacactaccttgtgatataaaaaaacagaagccaaaaaaaaaaaaatcccaaggaatttctgaaggagcctctcttcactactctgctcttgttagaataatgagtaacactggtataacattctacaatttacaagaatatttatctgcttcatgaaacctcaaaacaaacctttgagactatcaggatcctaaccactttacagatgaagataacttacataatagttatggggtttcctggatctgactcctttattcttcacattacattatgttgccttccccacaactaatcaaggactccgttttttcttttttctttctcgaaaccatttcctccatattagttccctttggaatagaagcctttttaaaagtccaccttagtatatcttcagggaatcacaaattcactatgctatttataattcatgagtttctctaatggtatcaaggcagcaaatacaggtgaagtaataattatccacctgatagtacttaacacacataccccgtgtaaaaatactgctggtgtacagtgtgtgtgttggtgacgccggaggaagtggccgtgaacaggcttaatgccgcattgagtaacttcaacctcatcttgctcaggttcatatctctcctgaatttcccctggtaagcgcaagattcaggatccgttctcacagttttttgtttaccagttgatgttggctgcattcaggaacgccttgctctcttaagccacagtgccttcctggtctcttcttcacagggtcttccacaatcgctctttttcctgggcacggtggtttgctgaaagtcggggtggggggcggggcgttcccaagtttccaggccaattacctacctgccttagagcaattacgcacttctctctggtagtccctgaaatgttctaatcatcagatcgccccagcttctcctgaccgtttcttgcttacggctcagttcagacagtatttgttccgggacgctcagcgggaggcggtttttaccggctcactcgagaccccaattccaggcgccctgcagcttccctcagactccccgggaccgtgtttggccttcccattcgtacgctgcggctgcgctttcctctcgtaacaccacgctggcgaacctggaaaggatcaaatagtcccactcgccaacctagcgcggcgggaccggcccaaaagggcctttgcagcctgcgcatgcggactcggcggccgccaccgactccccgtctgcttccctccgggcggcagccgcggtttggagcttgctgacagctctgcgaccggcgggcgcagcctcgtctcgtgcttccacgttatcctatcagggacggggcggggcggcggcctccgcagcctatcagcgcgaaccacgaccccggcgagcccgggaggaaagccgccagaaagaaggcgattggatggcggcggcgctctggggcgtagcgtcgcccgggccccgcccaccgctgccttcctctgctgggctccagagccactgaggcctgagcgagagccgacggcgggcgggcgcagctgctgccggagcgccggcgcgtgctggtgggccacacacctttcctcctcttcactcgcgagccctcggacatggtggcccccggctccgtgaccagccggctgggctcggtattccccttcctgctag

SEQ ID NO: 8488 - DNA, 124 bp, Homo sapiens
atataaacagctgataggaatagaaattattcctttagggaaagataatctgacaacgcatcttaaaagtttaaacaaattctttgattaagcaagttcaaaaacctagttttttttttttttt

SEQ ID NO: 8489 - DNA, 815 bp, Homo sapiens
atgtcagttgtggcctaatactccagcctaccaagatatttttatatcttgagattgtcactcctgtcccttcaaaagtttgttccatctgaatatttcaccatacaaattttcaatatcttcatctaagatgttgacaagtttttgaagagctcagagccccattttaggcctcctgagaccaccttctaggtggacctgagctcaccaatcagccccacttaaatattataattcacttcattgttctagtatctagcccacattttcctatcttattcccaaaggtattatgagaggcctttttggataatgcattactgaaatctgtaaagaaccacacttctctgacccctgtcaaaatagaaagtggcatgactattcctcctatgaaagcatcctgtatggaggatcagaccaaatgctaaaacactttagtaggtttacctaaatacagcttgtctttcatatatcatgccttgacacttcttctgcaagaccagttttttctgtaagactaattgatattgagatttcaatatatatagaaatgggactaaattttatccaaagctatttttgcctctattttgggggcattcaagttaatttcccccacttacactaaactgtcaaatactagaatgtggaagcttgaatattagagataagtaagtgcccagttccattccaccagttcacagccctgtctatccctccatcccaccctcaccaccaccctcctaaagcaagattattaacactgaactggactgctaaaacttcttcctagcatctttcaggtgcttttgtgg

SEQ ID NO: 8490 - DNA, 815 bp, Homo sapiens; identical to SEQ ID NO: 8489

SEQ ID NO: 8491 - DNA, 436 bp, Homo sapiens
aacatccagttttataaaataaagtcttatatttgtttatattataaatttattactccttgatttacatgcttaggaatataaatctgagaaaaatacatggtaggattttcctaccacattctaaaagcttaagaaatatctgaagctaagcatggtggctcatgcctgtaatcccagcactttgagaggccgaggcaagagggttgcttgagctcaggagttcaacaccagcctgggcaacatagtgagaccttgtttctaccaaaaaaaaagattatttacatgtggtggtgcacaactgtagtcccaggtactgggaggcgtaggtagaaggatagcttgagcccaggaggttgaggctgcagggagctgtgattgtgccactgcactccagcctagatgaccgagcaagatgctgtctcaaaaaaaaaaa

SEQ ID NO: 8492 - DNA, 228 bp, Homo sapiens
tccacattcagacagacgataaaagaaatatcttcatattgcctagcattgaatttgataaggaatagaggaacagtattgtccttctgaccgggctctgtctcttgctgcctaaaattttattatcattgcatttaaaaaaatcaaagttcagtcttactagaatggatagaatgggtaagtgtagcttctagtttggtgagtccttcactgtttcttcctactaac

SEQ ID NO: 8493 - DNA, 436 bp, Homo sapiens; identical to SEQ ID NO: 8491

SEQ ID NO: 8494 - DNA, 228 bp, Homo sapiens; identical to SEQ ID NO: 8492

SEQ ID NO: 8495 - DNA, 4307 bp, Homo sapiens
tcaaattgactgtatcatggaccaatggatctgggagggaccctcagtgtcccctagtttaatacccctgtaatacaaagaaggtacctgacatccagagaaatgatgtgccttgtgtaaagttgtggttaggaagggacagagccaggactctaaattctgtcctccggccataattccaaaactttctccaatgttaggtatgtaggctaaaatgtgctaacagcacttgtgtttttgtttccttttgttttactttttattatggcaaatttcaaacatatacagatacagaatagtttaatgaactcccatgttctcatcatgccagttcaaacatgaatacatggtcaaccttgtatcacttaaactcctgcggacaagccctgccccatcctgttgttttgaataaaatccatcattgtatctcactgtaaaaaggcctgttctttaagaaaaaataaccataatacatgattgcagctaaaaaattaagagtaatctagacagctaatcaatattcacatttcggggggaggagccaagatggccgaataggaacagctcccgtctacagctcccagcatgagcgacacagaagacgggtgatttctgcatttccatctgaggtaccaggttcatctcactagggagtgccagacagtgggcgcaggacagtgggtgcagcgcatcatgcgcgagccgaagcagggtgaggcgttgcctcactcgggaagcgcaaggggtcagggagttccctttcctagtcaaagaaaggggtgacacacggcaccgggaaaatcgggtcactcccacccgaatactgtgcttttccgacgggcttaggaaacggcacaccaggatattatatcctgcacctggctcggagggtcctacgtgcacggagtctcgctgattgctagcacagaagtctgagatcaaactgcaaggcggcagcgaggctgggggaggggtgcccgccattgcccaggcttgcttaggtaaacagagcagccgggaagctccacctgggtggagcccaccacagctcaaggaggcctgcctgcctctgtaggctccacctctgggggcagggcacagacaaacaaaaagacagcagtaacctctgcagacttaaatgtccccgtctgacagctttgaagagagcagtggttctcccagcacacagctggagatctgagaacgggcagactgcctcctcaagtgggtccctgatccctgagcagcctaactgggaggcaccccccagtaggggcagactgacacctcacacagccgggtattcctctgagacaaaacttccagaggaacgatcagacagcagcattcacggttcacgaaaaaccactgttctgcagacaccgctgctgatacccaggcaaacagggtctggagtggacctctagcaaactccaacagacctgcagctgagggtcctgtctgttagaaggaaaactaacaaacagaaaggacatccacaccaaaaacccatctgtacatcaccatcatcaaagaccaaaagtagataaaaccacaaagatggggaaaaaacagagcagaaaaactggaaactctaaaaagcagagcacctctcttcttccaaaggatcgcagttcctcaccagcaatggaacaaagctggacggagaatgactttgatgagttgagagaagaaggcttcagaagatcaaactacgagctacaggaggaaattcaaaccaaaggcaaagaagttaaaaactttgaaaaaaatttagacgaatgtacaactagaataaccaatacagagaagggcttaaaggagctgatggagctgaaagccaaggctcgagaactacgtgaagaatgcagaagcctcaggagctgatgtgatcaactggaagaaagggtatcagtgatggaagatgaaatgaatgaaatgaagtgagaagggaagtttagagaaaaaagaataaaaagaaatgaacaaagcctccaagaaatatgggactatgtgaaaagaccaaatctacatctgattggtgtacctgaaagtgaaagtgacggggagaatggaaccaagtcctactctgcaggatattatccaggagaatttccccaatctagcaaggcaggccaacattcagatgcaggaaatacagagaatgccacaaacatactcctcgagaagagcaactccaagacacataattgtcagattcaccaaagttgaaatgaaggaaaaaatgttaagggcagccagagagaaaggtcgggttacccacaaagggaagcccatcagactaacagcggatctctcggcagaaactctacaagccagaagacagtgggggccaatattcaacattcttaaagaaaagaattttcaacccagaatttcatatccagccaaactaagcttcataagtgaaggagaaataaaatactttacagacaagcaaatgctgagagattttgtcaccaccaggcctgccctgaaagagctcctgaaggaagcactaaacatggaaaggaacaaccagtaccagccgctgcaaaatcatgccaaagtgtaaagaccatcgagactaggaagaaactgcatcaactaacaagcaaaataaccagctaacatcataatgacaggatcaaattcacacataacaatattaactttaaatgtaaatggactaaatgctccaattaaaagacacagactggcaaattggataaagagtcaagacccatcagtgtgttggattcaggaaacccatctcacgggcagagacacacataggctcgatataaaaggatggaggaagatctaccaaggaaatggaaaacaaaaaaagtcaggggttgcaatcctagtctctgataaaacagacttttaaaccaacaaagatcaaaagagacaaagaaggccattacataatggtaaagggatcaattcaacaagaagagctaactatcctaaatatatatgcacccaatacaggagcacccagattcataaagcaagtcctgagtgacctacaaagagacttagactcccacacattaataatgggagactttaacaccctactgtcaacattagacagatcaacgagacagaaagtcaacaaggatacccaggaattgaactcagctctgcaccaagtgaacctaatagacatctacagaactctccaccccaaatcaacagaagatacatttttttcagcaccacaccacacctattccaaaattgaccacatagttggaagtaaagctctcctcagcaaatgtaaaagaacagaaattataacaaactatctctcagaccacagtgcaatcaagctagaactcaggattaaggaactcactcaaaactgctcaactacatggaaactgaacaacctgctcctgaatgattactgggtacataacgaaatgaaggcagaaataaagatattctttgaaaccaacaagaacaaagacacaacataccagaatctctgggacacattcaaagcagtgtgtagagggaaatttatagcactaaatgcccacaagagaaagcaggaaagatccaaaattgacaccctaacatcacaattaaaagaactagaaaagcaagagcaaacacattcaaaagctagcagaaggcaagaaataactaaaatcaaagcagaactgaaggaaatagacacacaaaaaacccttcaaaaaattaatgaatccagaagctggttttttgaaaggatcaacaaaattgatagaacgctagcaagactaataaaaaaagagagaagaatcaaatagacgcaataaaaaatgataaaggggatatcaccaccaatcccacagaaatacaaactaccatcagagaatactacaaacacctctatgcaaataaactagaaaatctagaagaaatggataaattcctccacacatatactctcccaagactaaaccaggaagaagttgaatctctgaatagaccaataacaggagctgaaattgtggcaataatcaatagcttatcaaccaaagagtccaggaccagatggattcacagccgaattctaccagaggtacaaggaggaactggtaccattccttctgaaactattccaatcaatagaaaaagagggaatcctccctaactcattttatgaggccagcatcatcctgataccaaagccgggcagagacacaaccaaaaaagagaattttagaccaatatccatgatgaacacttgatgcaaaaatcctcaataaaatactggcaaacaaattcagcagcacttcaaaagcctt

SEQ ID NO: 8496 - DNA, 575 bp, Homo sapiens
tcaaattgactgtatcatggaccaatggatctgggagggaccctcagtgtcccctagtttaatacccctgtaatacaaagaaggtacctgacatccagagaaatgatgtgccttgtgtaaagttgtggttaggaagggacagagccaggactctaaattctgtcctccggccataattccaaaactttctccaatgttaggtatgtaggctaaaatgtgctaacagcacttgtgtttttgtttccttttgttttactttttattatggcaaatttcaaacatatacagatacagaatagtttaatgaactcccatgttctcatcatgccagttcaaacatgaatacatggtcaaccttgtatcacttaaactcctgcagacaagccctgccccatcctgttgttttgaataaaatccatcattgtatctcactgtaaaaaggcctgttctttaagaaaaaataaccataatacatgattgcagctaaaaaattaagagtaatctagacagctaatcaatattcacatttcggggggaggagcaagatggcgaatagaacagctccgtctacagct

SEQ ID NO: 8497 - DNA, 6684 bp, Homo sapiens
tcaaattgactgtatcatggaccaatggatctgggagggaccctcagtgtcccctagtttaatacccctgtaatacaaagaaggtacctgacatccagagaaatgatgtgccttgtgtaaagttgtggttaggaagggacagagccaggactctaaattctgtcctccggccataattccaaaactttctccaatgttaggtatgtaggctaaaatgtgctaacagcacttgtgtttttgtttccttttgttttactttttattatggcaaatttcaaacatatacagatacagaatagtttaatgaactcccatgttctcatcatgccagttcaaacatgaatacatggtcaaccttgtatcacttaaactcctgcagacaagccctgccccatcctgttgttttgaataaaatccatcattgtatctcactgtaaaaaggcctgttctttaagaaaaaataaccataatacatgattgcagctaaaaaattaagagtaatctagacagctaatcaatattcacatttcggggggaggagccaagatggccgaataggaacagctcccgtctacagctcccagcatgagcgacacagaagacgggtgatttctgcatttccatctgaggtaccaggttcatctcactagggagtgccagacagtgggcgcaggacagtgggtgcagcgatcatgcgcgagccgaagcaggtgaggcgttgcctcactcaggaagcgcaaggggtcagggagttccctttcctagtcaaagaaaggggtgacacacggcaccaggaaaatcgggtcactcccacccgaatactgtgcttttccgacgggcttaggaaacggcacaccaggatattatatcctgcacctggctcggagggtcctacgtgcacggagtctcgctgattgctagcacagaagtctgagatcaaactgcaaggcggcagcgaggctgggggaggggtgcccgccattgcccaggcttgcttaggtaaacagagcagccgggaatcacctgggtggagcccaccacagctcaaggagacctgcctgcctctgtaggctccacctctgggggcagggcacagacaaacaaaaagacagcagtaacctctgcagacttaaatgtccccgtctgacagctttgaagagagcagtggttctcccagcacacagctggagatctgagaacgggcagactgcctcctcaagtgggtccctgatccctgagcagcctaactgggaggcaccccccagtaggggcagactgacacctcacacagccgggtattcctctgagacaaaacttccagaggaacgatcagacagcagcattcacggttcacgaaaaaccactgttctgcagacaccgctgctgatacccaggcaaacagggtctggagtggacctctagcaaactccaacagacctgcagctgagggtcctgtctgttagaaggaaaactaacaaacagaaaggacatccacaccaaaaacccatctgtacatcaccatcatcaaagaccaaaagtagataaaaccacaaagatggggaaaaaacagagcagaaaaactggaaactctaaaaagcagagcacctctcttcttccaaaggatcgcagttcctcaccagcaatggaacaaagctggacggagaatgactttgatgagttgagagaagaaggcttcagaagatcaaactacgagctacaggaggaaattcaaaccaaaggcaaagaagttaaaaactttgaaaaaaatttagacgaatgtacaactagaataaccaatacagagaagggcttaaaggagctgatggagctgaaagccaaggctcgagaactacgtgaagaatgcagaagcctcaggagctgatgtgatcaactggaagaaagggtatcagtgatggaagatgaaatgaatgaaatgaagtgagaagggaagtttagagaaaaaagaataaaaagaaatgaacaaagcctccaagaaatatgggactatgtgaaaagaccaaatctacatctgattggtgtacctgaaagtgacggggagaatggaaccaagtcctactctgcaggatattatccaggagaatttccccaatctagcaaggcaggccaacattcagatgcaggaaatacagagaatgccacaaacatactcctcgagaagagcaactccaagacacataattgtcagattcaccaaagttgaaatgaaggaaaaaatgttaagggcagccagagagaaaggtcgggttacccacaaagggaagcccatcagactaacagcggatctctcggcagaaactctacaagccagaagacagtgggggccaatattcaacattcttaaagaaaagaattttcaacccagaatttcatatccagccaaactaagcttcataagtgaaggagaaataaaatactttacagacaagcaaatgctgagagattttgtcaccaccaggcctgccctgaaagagctcctgaaggaagcactaaacatggaaaggaacaaccagtaccagccgctgcaaaatcatgccaaagtgtaaagaccatcgagactaggaagaaactgcatcaactaacgagcaaaataaccagctaacatcataatgacaggatcaaattcacacataacaatattaactttaaatgtaaatggactaaatgctccaattaaaagacacagactggcaaattggataaagagtcaagacccatcagtgtgttgtattcaggaaacccatctcacgggcagagacacacataggctcgatataaaaggatggaggaagatctaccaaggaaatggaaaacaaaaaaaggcaggggttgcaatcctagtctctgataaaacagacttttaaaccaacaaagatcaaaagagacaaagaaggccattacataatggtaaagggatcaattcaacaagaagagctaactatcctaaatatatatgcacccaatacaggagcacccagattcataaagcaagtcctgagtgacctacaaagagacttagactcccacacattaataatgggagactttaacaccctactgtcaacattagacagatcaacgagacagaaagtcaacaaggatacccaggaattgaactcagctctgcaccaagtgaacctaatagacatctacagaactctccaccccaaatcaacagaagatacatttttttcagcaccacaccacacctattccaaaattgaccacatagttggaagtaaagctctcctcagcaaatgtaaaagaacagaaattataacaaactatctctcagaccacagtgcaatcaagctagaactcaggattaaggaactcactcaaaactgcttaactacatggaaactgaacaacctgctcctgaatgattactgggtacataacgaaatgaaggcagaaataaagatattctttgaaaccaacaagaacaaagacacaacataccagaatctctgggacacattcaaagcagtgtgtagagggaaatttatagcactaaatgcccacaagagaaagcaggaaagatccaaaattgacaccctaacatcacaattaaaagaactagaaaagcaagagcaaacacattcaaaagctagcagaaggcaagaaataactaaaatcaaagcagaactgaaggaaatagacacacaaaaaacccttcaaaaaattaatgaatccagaagctggttttttgaaaggatcaacaaaattgatagaacgctagcaagactaataaaaaaagagagaagaatcaaatagacgcaataaaaaatgataaaggggatatcaccaccaatcccacagaaatacaaactaccatcagagaatactacaaacacctctatgcaaataaactagaaaatctagaagaaatggataaattcctccacacatatactctcccaagactaaaccaggaagaagttgaatctctgaatagaccaataacaggagctgaaattgtggcaataatcaatagcttatcaaccaaagagtccaggaccagatggattcacagccgaattctaccagaggtacaaggaggaactggtaccattccttctgaaactattccaatcaatagaaaaagagggaatcctccctaactcattttatgaggccagcatcatcctgataccaaagccgggcagagacacaaccaaaaaagagaattttagaccaatatccatgatgaacattgatgcaaaaatcctcaataaaatactggcaaaccaaatccagcagcacatcaaaaagcttatccaccatgatcaagtgggcttcatccctgggacgcaagcctggttcaatatacgtaaatcaataaatgtaatccagcatataaacagaaccaaagacaaaaaccacatgattatctcaatggatgcagaaaaggcctttgacaaaattcaacaacccttcatgctaaaaactctcaataaattaggtattgatgggacatatctcaaaataataagagctatctatgacaaacccccagccaatatcatactgaatgggcaaaaactagaagcattccctttgaaacctggcacaagacagggatgccccctctcaccactcctgttcaacatagtgttggaagttctggccagggcaattaggcaggagaaggaaataaaaggtattcaattaggaaaagaggaagtcaaattgtccctgtttgcagatgacatgattgtatatctagaaaaccccattgtctcagcccaaaatctccttaagctgataagcaaattcagcaaagtctcaggatacaaaatcaatgtgcaaaaatcacaagcattcttatacaccaataacagacaaacagccaaatcatgagtgaactcccattcacaattgcttcaaagagaataaaatacctaggaatccaacttacaagggatgtgaaggacctcttcaaggagaactacaaaccactgctcaatgaaataaaagaggatacaaacaaatggaagaaaattccatgctcatgggtaggaagaatcaatatcatgaaaatggccatactgcccaaggtaatttatagattcaatgccatccccatcaagctaccaatgactttcttcacagaattggaaaaaactacttgaaagttcatatggaaccaaaaaagagcccacattaccaagtcaatcctaagccaaaagaacaaagctggaggcatcacgctacctgacttcaaactatactacaaggctacagtaaccaaaacagcatggtactggtaccaaaacagagatatagatcaatggaacagaacagagccctcagaaataacgctgcatatctacaactatctgatgtttgacaaacctgagaaaaacaagcaatggggaaaggattccctatttaataaatggtgctgggaaaactggctagccatatgtagaaagctgaaactggatcccttccttacaccttatacaaaaatcaattcaagatggattaaagacttaaacgttagacctaaaaccataaaaaccctagaagaaaacctaggcattaccattcaggacataggcatgggcaaggacttcatgtctaaaacaccaaaagcaatggcaacaaaagccaaaattgacaaatgggatctaattaaactaaagagcttctgcacaggaaaagaaactaccatcagagtgaacaggcaacccacaatatgggagaaaattttcgcaacctactcatctgacaaaggaaatatccagaatctacaatgaacacaaacaaatttacaagaaaaaaacaaacaaccccatcaaaaagtgggtgaaggacatgaacagacacttctcaaaagaagacatttatgcagacaaaaaacacatgaaaaaatgctcatcatcactggccgtcagagaaatgcaaatcaaaaccacaatgagataccatctcacaccatttagaatggcaatcattaaaaagtcaggaaacaacaggtgctggagaggatgtggagaaataggaacacttttacactgttgggactgtaaactagttcaaccattgtggaagtcagtgtggcgattcctcagggatctagaactagaaataccatttgacccagccatcccattactgggtatatacccaaaggactataaatcatgctgctgtaaagacacatgcacacgtatgtttattgtggcactattcacaatagcaaagacttggaaccaacccaaatgtccaacaatgatagactggattaagaaaatgtggcacatatacaccatggaatactatgcagccataaaaaatgatgagttcatgtcctttgtagggacatggatgaaattggaaatcatcattctcagtaaactatcacaagaacaaaaagccaaacaccgcatattctcactcataggtgggaattgaacaatgagaacacatggacacaggaaggggaacatcacacactggggactgttgtggggtgggggaggggggagggatagcattgggagatatacctaatgctagatgacgagttagtgggtgcagcgcaccagcatggcacatgtatacatacgtaactaacctgcacattgtgcacatgtaccctaaaacttaaagtatgataataataaaaaaaagaaatgctttaaattttaaaaaaaa

SEQ ID NO: 8498 - DNA, 1364 bp, Homo sapiens
ggtgaaactccgtgtctactaaaaatacaaaaaatagctggatgtggtggtgggcgcctgtaatcccagctacttgggagtcagagccaggagaatggcttgaacccaggaggcggaggttacagtgagccaagatcatgctactgcactccagcctggtcacagaggaagactgtctcaaaaaaaaaaaaaaaagaaaaaaaagaaaaggaaatatctgtcctctattcctggaggcaactattttgaactaacttagcttaaaaaaaaaaacaaaaaaaaacaaaaaaaacccaaaaaaccctgacattaactttcatatttctaagtagtatacttatattatttcttgacttatcaacttgaaactactaatttcctattaggtggatggatcactttgtctgttatattactaccctctacttctcctcctcttttcccacagtttaaaaaaatcttggataaatcagtggtccgtgtaatatgtaaatatgtaatgtcaatgtaactatggtttggtgatgatcctattcgttgtatattttatcttgtacaaatttttattttttctggaattaatagtttaagacattatgtattccatgtacctatctttaatgtttcctgaagtggtccatctgctctgtcaatttttgagggtttttttcccccaccatgctgaagcatattaggtaattgatcgtttccatattttcttggagtcctccctcccacagtgcctttcccactgctgcagcctggaccaggtgctgcaaagccctagtgcacaagctgtcaccctgagatcttctgtactaccacactgtttcttttctgttggggctcctttttctggatccagtgaattcttttccttggtttggtccacgcacatacttgattcatggtttggctgggtaattttaagggcagtactccactatcttccactatccagttgtgttgagaagtcttatggcactctgcttcttgttattttgttattttagaggtgagagcgctttcttagaaaataatggtagtctcgccgggcacggtggctcacgcctgtaatcccagcactttgggaggccgaggcgggtggatcacgaggtcagaagatcgagaccatcctggctaacacggtgaaaccccgtctctactaaaaacacaaaaaattagccgggcgtggtcgcgggcgcctgtagtcccagctactccggagtctgaggcaggagaatggcgtgaacccgggaggcggagcttgcagtgagccgagatcgcgccactacactccagcctgggtgacagagcgaaactgtgtctcaaaaaaaaaaaaaaaaagaaagaaaaagaaaaaa

SEQ ID NO: 8499 - DNA, 3172 bp, Homo sapiens
cagggaagctattctttgtctcatgtttatacaccaaatgatgtccgtatggtgattgaatatgccagattacgaggaattcgagtcctgccagaatttgatacccctgggcatacactatcttggggaaaaggtaaggagttgtattttatttcattttatcttattttttattttttgagatggagtcttgttctgtcacccaggctggagtgcagtagtacaatctcggctcactgcaacctccacctcccaggatcaagcgattctcctgcctcagcttcctgagtagctgagactacaggcatgcgccaccatgcccagctaatttttgtttttgttttgttttgttttttgagacggagtctcactccgttgcccaggctggagtgcagtggcatgattttggctcactacaacctctgcctcccaggttcaagcgattctcctgcctcagcctactgagtagctgggactacaggcgcccgccaccacgctaattttttgtatttttagtagagacggggtttcaccgtgttacccaggatggtcttgatctcccctcctcatgatcggcccgcctcggcctcccaaagtgttgggattataggcgtgagccactgcgcctggccaggagttgtattttataagttgcaaaagtgaatatttgaggtattgcatttcttattttatgacctagtgtttgctcattttgttcttaattgtgattggcctatcagtaatactattgacagatacaattcaatagctactctgtgtctattgtgagcaagtcattgtgattaggtactgcctaaagtataaaaaagggaatgaaagaaaacaaaaagtgattacaaaaagtagaacatgataagtgaattcaagaaatggtttcatagatgaggtaacacttaaaatgcttttgagtgatcacagaatatattcatgtttctggtagaggaaatggcataaggaaatgtgtgcaaaaagtgtaagatatgcttgacaagtatgtagctggagtagagtgtagcagagtaggaggcattatagggtggtgattaagaactttggctttggagccagacagcttgggtttgaatcttgcttctgccattataaactaggtgaccttgggcaagttacaatatctcatcttcagtttctccatctctaaaatgagaattagtagtagctatcatgtaatttttttgagaattaaataatgtaaagcacatagcacagtaccaagcatttataattgctcaatattattagagtagacatggggaatagtgagaggtaaatctggaaaagcacattagcgggcctttggtgaggaatgtgaacttcatcaggacacactggaaaccagtgaaaatttctgagcagaggagtaacatgatgggaaccacactttgggaaaacctttgggaaagtgacagattggagttctggaccaggagggtgatagtgggaatgtaaaataatggacagaactgagagacattctggaaatatccatagaatttggcaactgatggactccaggagagaggaggtatatactctaggatgacgatggtacccttattagaatacgaaaatcaggagaagctagagaagggagcttaaggactgcagatgttgttttttgttagcttgtatttgaagtacagctaggatattcagttgtatccagcagggaatttgaaatatgaattgaagctcaagaaaaagcgttgaggcaaactgaagatttgggagttactaacatttgacatagataaaatctcagatataatgggaaacaaagaggcaaagagacaggattcaggaaacccttcttatctggaagaaattactagctcttagtaaacatgttcatcttttgtgtataaaatcttgtagcttcaataaaatgacgtagtaaaatcatgtggaaaaccagatctttataatgagtacacttcttttaaaaagaatcttaatattttcttctaggtcagaaagacctcctgactccatgttacagtagacaaaacaagttggactcttttggacctataaaccctactctgaatacaacatacagcttccttactacatttttcaaagaaattagtgaggtgtttccagatcaattcattcatttgggaggagatgaagtggaatttaaatgttggtaagatgattccttaaaacccctttaaaaaaaaaaaaaagagaggctgggtgcggtggctcacgcctataatcccagcactttgggaggcagaggcaggcagatcacctgaggtcaggagttcaagaccagcctggccaacatggtgaaaccccatctctactaaaaatacaaaaattagctgggcgtggtggtgggtacctgtaatcccagctccttgggaggctgaggcaggagaatctcttgaacctgggaggaagagattgcagtgagctgagatcatgccactgtactccagactgagtgacagagtgagactccatctcaaaaaaaaaaaaaaaaaaaaaaaaatggaataaaaaacctgttgcattgaagtagctgtagagggctccacaccataaggaagacttaagagtaacatgcctgcttgtaagggtttaaactgggcaacatgactcctgagatggtagatttgtggagaatgtacattttggtatggcaaagtaaagcttgaggaaaaacaagatgcagaagaaaatggagattcaaaaaaagactactgtgaaatgagaacacctttagtgaaagagggcaatcaatgattaaataggaaagatttttcaaataaaaattctctctgcaaatagctttagatggaggagaaaggtggtaaggtaaagaaagccatttttaaaggaaatcagcttcttgaaaaaattgtttgcaatggataattaagataacttgtaattaagtttttaggcttctttttactacctacaaactttaatagttttaagtctgcacaactgatgttaggcatgtatactgctctaaataataaactgagcatatcaaacttctaatgaaattttaatcactttttgcttcagggaatcaaatccaaaaattcaagatttcatgaggcaaaaaggctttggcacagattttaagaaactagaatctttctacattcaaaag

SEQ ID NO: 8500 - DNA, 715 bp, Homo sapiens
cagacttgtagaatggaagataattgctgtcaggggctgtgtctgagtgcagccgtacattgaaggaggcgtctcgctgagagattcaaggcacgggtcccaggggaccgattttgttgaagtggaggtgagagggctcatttgccaggaggaggagaggtgggcccagagacatggcaggcagagagacggcgtgtgccgactcagtggcccaggagggcatggcgggtgctggggaaatgactaatttaaactcagaggagccagaagagtgaggggtgggagagctttcaaagcagctgggtgggaggcagggccatgctgagaaggaagtcctgggtggaaggaggctctgatttaccctcttctatttcagtacactctcctgccctgccctgctctgccctgccctgctccgccccaccctgccgcacagctgatacctcagagtttatcattgacttccttttcacgactccacccccaacccctgtgtatcatcattccctgagcgcctcctatgttccaggccttggggaccccgagctagtgaaaggcccacaggctagtggaggggagtggatggcgcttggttgagtgtgagcaccagtggcaagggacccctctccccatcaggagggagccctttgtaacctgatagtatcattaaataaaagtttattgtgtttttttgttttgttataaaagcagtatg

SEQ ID NO: 8501 - DNA, 11960 bp, Homo sapiens
cggcggcggcagcggcagcggcagcggcagcggcgctgagttttgtctcccgggccgtctgggcgcgcgcgggtgtcccaggtaccccgccgcctccctccttcccgcaggactcgtccctcctggccctgggccccaacggtgcccgcctgcccggcggtcggtcagcgcacagggcacggcttcctctgcttctcccggaccacttagtctcaacccgggtgtgtttgcactactagaggtgaagcatccatcatagagagaatgggacctggggtcttggaccagggtgtttttacttttcccatcaggtggacgcgcatgggcaggagatattatttgcagcatttcctcctagaggacgcctttgtcattgtagtgcaatctaagaatgggtgtccttagacaacagggaccgaccaaatcgtcatgcagctgtttggatgctttaaaaaaataaatccccacactcattacgcgttttatgctgctgacttttttatttttaagacatctgctcccgaaagctcagagccctttagcatttcattttctaaacgaatcctaatctttcctgtgactgaatcggttcagaggatatcttttcaataaggaaggaagccctcccctgctcactggggacgtcgcaggatttttaaacctaaagatttactcttttgtgcacagacgctggaagcatttgggtgaggcagtgcagtgctttttgggaaatgcatcagatcttttctgttcttgaaacgccaaatctaacttggtctttttttggatgaattaccgccagtattatgaaggttactgtgaaggaacttgagaccactgaactttttgagttcttgcggtagattttaaatcgtttttccgtcttcaactctgactttgggatcactgtcaattggctacattctttaccctcttctagttataatttaatgcgatttatttgttgtgggttttgaatttcgatagctacacttaatagaattgtgtttaaaagaaagataagtgaggaactcgtggctttttacttttatataacttaatttttcattttacaaaatgcccatttaaaaaaaagtagctaagcaaaagaaaggaaattaaaatcatctagaatcctactatctaaagataaccattgctaacattttggaatagagtgttaagttttaaaatacatgaaatttgtaaaaaacaaaaaatgaaatcatagtgtatactgtttgagtataatttgcttgacgtatcttgcctggcttccatttcacttattttttttctttgcgcatttataatagctacagaatgttctattgtgctaggcactcataggtatagtgggaaacctagtgcataaaccttgtgccatctattttatcagctcagagaacttttaacttatatcttggtttttagccaagatgcataggtgagatagttgcagaactgagttaaaggaaaaatttaatattgggtcctatgcaagggtacatcatattgaaaaggtggagaacatcattgaaaattattctaattcttgactctttgtttctagactcacttttccccttcgtctttctctccctttctgtctttctgtgtctcctccaagaatgaaatatgactgaggactctcagagaaactttcgttcagtatattatgagaaagtggggtttcgtggagttgaagaaaagaaatcattagaaattctcctaaaagatgaccgtctgggtgagtacttttaaaaattaatctcattggttctcaatcactccacatgttctgaagtaaatattttcttaaaagacatccagaagcattggttacttgctgtattttttagtgatgtggtgaagcagaatggtgtattttgagaaaagatttttcaaatttatatttcactgagcgtcagaagtttttgaaaggtttcttaagaaagtcagtagtatttttttcttttattgaacccatatgttttcatgtattatctaggtaaatttgcttctgggtaaatttgcgataactctggtcatgattttctttttttttttttttgagaccaagtctgactctgttgcccaggctgtagtgcagtggtgtgatcttggctcacagcaacctacacttcctgggttcaagtgattctcctgcctcagcctcccaggtagctggaattacaggcatgtgccaccatgcctggctattttttgtatttttagtagagacaggatttcaccatgttggccaggctggtctcaaattcctgacctcaagtgatccacccacctcggcctcccaaagtgctgggattacaggcaggagtcaccatgcccagcccatgattttcttttatggaaatactaagagtgcattgtatattgacattttagtttgagccagtctgaataaggtctgttgttgactaaagtaaaataaactgaaccgtagttaaagataatactttatttgcatagagtacttttaaagtttctgaaacatttctcaccttatctttgatcttcaattgtgcggtctttgctttagtatgtctggtattctcctttgataagtagaggaattgagggtcagggaagtcactgtaatttattggaaaatgtagggatttgaaggcagactgtaccacttaatagctatgttagtttgatcaagtcatttaactgctttgaacttcagtttctgcatttttagaacaagaactacctaacaggcttgcagtgtgaattaaataaaccctgtgattaataactaccactgttatagggaatgtagtaatatatgcaaaatgcatctccaatgctgtaaaatgcaaattgtttttatttttattattatttttaacacagagtctcactcttgcccaggctgcagtgcagtggcacgatcttggctcactgcaacctctgcctcctgggttcaggcgatccttctgtctcagcctcttgactagctgggatcacaggtgtgtgccaccatacccagccaatttttgtatttttagtagagatggtgttttgccatgttggccaggctggtcccaaactcctgacctctagtgatttgcctgcctcagcctcccaaagttctgggattacaggcatgagccaccgtgcctggccgcaaattgtttttaaataacttagttggcagaagtcttgggctagaaatcagactagtattgcctctcctaaacttactgaccatatggtagacttcccctgaagaaatgtcttaactattctttgagttttaaaaaatgaaatgtgccttgacatactgtgatcagcatgaaaagcttctaacaattgttttcttcttcctctagatactgagaaactttgtacttttagtcagaggttccctctcccgtccatgtaccgtgcattggtatggaaggtgcttctaggtatgagacccaggagttggaagatttatcttaaaaaatattgaataaagggatcatttgctatcttatcagtcagaaaaaggagaatttgtttaggccttttactgaatattggatcttccccaggaggttcaattaccactcattattttctgttctattaatgatactatagaagagaaaatagtttatgttcctgagacaagatctgggaagagcattggagtaggagaaatgagaattggtttaggctttgctatcagctgggtaacctggaggaaggcgacccctctgggactcattttttgcatctataaactgaagcttttgagctaaattactcctagtttttagctctaaatttgtaagattttgtgattctcagctatagaggtataacttcctaatctgtcaaagaggaattggagacttactactccctagaagtgtgaatgactaaattccagtggtgcgagtggctgagtgagaaggaaaactgatcttacttagtttctatggaagaaaatgtgaattaagtgccatgagtaactggcagcatcccttttgagcccaagattttctttcccctatcattgctgagcctgctggagcatataattcctatccattaccatcctccttttctttcttaaaaaaagtatttttggctgggcgcggtggctcacacctggaatcccagcactttgggaggccaaggcgggcagatcacgcagtcaggagattgagaccatcctggccaacaagggtgaaaccccctctctactaaaaatacaaaaaatcagctgggcatggtggcatgcgcctgtagtcccagctacctggaaggctgaggaaggagaatcgcttgaacccgggaggcagaggttgcagtgagacgagatggcaccactgcactccagcctgggcgacagagcgagactccgtctccaaaaaaaaaacaaaaaacaaacaaaaaaaaacttacagtttgttcactgtaagatagtggcgagtactaaattacctgaagaatataaactatgattgctccttattgggcatccctgtatgcctgtcagtaggctgagtagtttacatagattatacagagtaatcctagaatccctgtgaggcaggtattggtatcctaattttgcagatggggaaaagactctctgaggctaaataacttgcctaaggcattatagcctgtaagtggcagagctaggatttgagcttacgtttgtggaactcatttgaaggtaagatagattgtggacctcattttctttccaaaatgtagtatcttttcagggcttgagaagcctgcagccctgtctggttatgtaatatggaggcagcgagggaatataagcggtactaggaaggcctgcagaatgacttgtttcttgttcatcctggcagtctccgtgcacttttatgtctggtaggtcaacgtgcagttacaatctggagaagcggtgacaactattttagtttttcccagagcacttttctttaaatgttactgttctccgtgccttctggggtacattttaagtggtaatgtcaacagtgtcgatttatgggaggtgctgtgtgtctattaataactgcagtggattaatgggagttgtgcagttgtgctttccctcacttcttgagtgctacagcctatctggcttattcctcacttctactcttcttaacctttctttctttttttttaatttttttattttgagacagagttttgctctgtcacccaggctggagtgcagtggcgcgatctcagcactgcaacctctgcctcccgggttcaggcgattctcctgcctcagtctcccgagtagctgggactacaggcgcgcacccccacgcccggctaattttttgtattttagtagagatggggtttcactgtgttgcccaggctggtcgcaaactcctgagctcaggcagtccacctgcctcggcctcccaaagtgctgggattacaggcatgagacaccgcgctcggcccacctttctttatcatgtcatagttattttttgaggacaaggcactggaagtttagagctgtcgcctgtgtaggacacagcctgactcttcccagcacagagttttgattacttagggatctttacttcaaatgcctacttcctgatactattttagttaaatatcaaaaagagacattttaggactagctcttagaaaacaggtttaagggttaatgtgctgcctctagcagggtgatgagggtttggtcacagctgtttaatctgtattagccgagatgtaggagacactttagtgtgttcccttggcttttctggaagcctggcacacagtctcatagcatgagtaaagatttctttcagggaaaagaacatttaagcaagttttttttctaacattaactggtatcatgttagctactattgtttttgttttctggggtgttctttagaatactaaacctgtggcattttgcaccaaagagggattcatagtcaaatgtactagctaacacttatacagcttagtgtttgctgagtactcttctgaatgctttgtgtgtgttgatttgtttattcatctcaacaactgtatgatattagatattgttattcccatttttcagatggggaagctaagacataggagataaagtaattgctaaaggtcaccacccagccagttaattgtagagctggaatttaaacccaggaactttgctccagagtctgtacttctgtagagcctcattaagtttaatgaggcttgagtaaataaaatgtttttttttgttttgttttttctttttttttctttgagacagggtcttactctgttttctaggctggcgtgcggtggtacgatcacagctcactatggccttgacttcctaggctcaggtgatcctcccacctcagcctcccacttcagcctcccgggtagctgggactacaggcatgtgccactggacctggctaattttttgtagagacagggtttcccaaataccttcacccagttgcccaggctggtcttgaacttctgggctcaagtgatctgcctgccttggcctctcaaagtgctgggattataggcgttagccaccatacctggcctaaaatgtttttctttatggcaaaacttagtgccatgaaaattcattgtcaccatttcccaaatctgtttgatgagggcatttttttttctcttggggttagcattctgtggagaagcatttggtgaaatgcttatcccatttcctgcctctggcaggtggggaaaacaagtgcccagaaagacacatttcagagtcctagtattatccagtccgaggctagaacccaggatggctggcctgtctagtggtctttccactgtgtttcctcagagccatttgtttgtaaaaaagatatgacaccatgtttaaatgggttaaggagcttaatgtgtcatagaaatgtcctgtaaggtgacctcaccaatgaagattaaggacttttgtgacctggaggataggatacttagtgagcaagttttaactgttggggaagagaagaattcaatgggctgttggtggttctgagatgtaggggccaagtacaaagactagggtgagacctctaggagctaaagccagcctgaggctgccataaattaagttaaaccattgttaggattgatgtggttgctaatcttgaatgtatgcggcatacttattcaagggctttgccagtgttgtttcatttctctctcatatcagtgatgcatcagcactcaaacattgataatatttcacatttaagattgttttatagtgagaatttctaaaagagattctacatggtacttgaatgtctgcgtgaattctagcctaattgtgtgggtcgcttctcacggcatcctctttcatagatgagggatttggagtgatggctcagtattttgtccttttttcgtttttcctgttctctctaggaatctggcctccacaccacgagtcccatgccaaggtgatgatgtatcgtaaggagcagtacttggatgtccttcatgccctgaaagtcgttcgctttgttagtgatgccacacctcaggctgaagtctatctccgcatgtatcagctggagtctgggaagttacctcgaagtccctcttttccactggttagtggtcacttttgtctgacactaagctcaactctagactgtcccatcttgccggcctttgattacatcatgttttgccttaaaaacttttggtggctccctgttgttattagaataaaagtgacacatctttacttggcattcatggccatgcacattctgacccaaccttcttactttttgtttttttaaaatacgttttattttgaagtaatttcaaacttccagaaaagttgcaagaatactaccaagaatttgcatataccctttacccagattctccagttgttaacattatgcaacttttttctacatccaacattatttaaaaagttaaaaaataaaaaattgtaggtgctaagtagctttaagcatctgttttgctttgtgtgcatctgttttgctttgttgttttaaaacgtatttttttaaacacattttttttttcctaaatcatttgagagtaagatgcagacaggattccctattacctcagattccttcagtgtacacttcctaaagacaggacacccctgtagatagccatagtacagtcctcaaaactaagacattaacattgatacaatattaacgtaatctaccagctccatttgaatttcaccaataatgccttcacaaataatcaaacggtcaaagttctgggtgaggactggatcctggtttaggcattgcactgggttatcatattgctttagtctcctttgacttgggacagttctgtctttttttatctttcatgcctttgacatttttgaagggcataatcagatgctttgaagaaagcccctccctttaggtttgtctggtgtttcctcctgattagattcaggttattcatttttggcagggataccaagtaggtgatgctgtgtccttctcagtgtctcttatcaggaggcacatagtgtgaatttgccccataagaggtagtgttaacttggatcacttggcgagggtgctgcctgctggagttttccgctggaaagtttttacttttccctttgtaattgctatttctctttgtggggagacactttaaaactgctatgtaaacatcctattccttattaaacttttgctcatgagtattctcatttgacgatttctaaaaaatttttattttttaactttttaaataatgttggatgtagaaaaaagttgcaaaaatagtgcagtgttctgaaataccttcacccagtgtcctcaaatgttacatctcatacaaccgtaatgtaatgatcaaaaccagagaatcacaatactgacagctactctgtaggcctcactgggattttgctgatgtcccactgatgctcttcttctgatccaagatccagttccggatcacacattacatttagctgccacgtcttagtctttaatctggaagagttctttttttttttttttttcttttttttgagacagagtttttctctttttgaccaggctggagtgcagtggtgcgatcttggctcaacgcaacttctgcctcctgggttcaagcaattcttgtgcctcagcctccagagtagctgggattacaggtgcgcaccaccactcccggctaatttttgtatttttagtaaagatgggatttctccatgttggtcaggctggttttgaactcccgacctcaggtgattcacctgccttggcctcccaaagtgctgtgattactggcgtgagccactgtgcctggcctggaacacttcttcagtctttgtctttcatgaccttgacacttttgaagagccctggccagtagagcatttctcaatttgggtctgtctcatgtttctccatgattaaactctggtcacgcattattggcaggaatatcacagaagtatgggactcattactgtgctgctaactttgatcacttgggtaagatggtgtctgtggagtttctccactgtaaggttactattttcctctttgtaattaataaataactgtggagaagtactttgagacttgtaagtagccatccactaatgattcttgcctgaaccaatttttactatgctgattgccaaatggtgatctaactccttcattctttctgcatgtattagttggcattcttctctaaggaagagttttcccttctccttctttatttatatcagtatgaaattaaagtgttatttgtttggctaaaacagtgaattgttcaaatggatttgctggaacactcctattttacaaaatttatttttattgcagatctaattttttttgacgttaatgatggggtatccatggacaaaccttagagctaataaagatcatttatatttcttacgtttatcgagagagaaggtccctaaaaaataattggaataatttaagcaatcatctttaaatttcacttattggcaaagtgaagttgatagtactacacaagttcttaaattatatatcaaattaaattagattaggaattgagatgacagggtataggttccgcctcaccgctactcagcttgtctgtgttccaagctgagacacctttactgcagcctcaggcagacgtgcttctgagtgtgtgttttggactctgccatcccacgtctcccagtcatgatcctcattgtattagtctgtttttgattgcttataacagaatacctgaaatgggataatttattttaaaaaggaatttatttcttacaattctagaagctgggaagtccaggattcaggggctacatctggtgaaggccttcttgctgatgactctctgcagggtcctgaggtggcacaggctatcacatggtgagggggctgaacgtgccaacgtgcgcacccaggactctcttcctcttcttaggaagccaccagtcccgttcctgtgataacccattaatctatgaattgacccactgatgagggcagagccctcatgatccagtcacctcttaaaggccccacttctcaatactgccacaatggggattaaatttcaacataagtttcggaggggacagatatttgaaccgtagcacctacttagcgcccactctgcctcattttttaatccattaataagagggtgcagcagtgctcatcacagggccaggaaggacgacatgggtcctcttcccttgacctgtcagtggtcaggagcagtcagtgatatgccacctttcggggtgccaagcacagtggcacagaactgcacgggagtccaagaaaggagatttcctgtcccttttcttcctacttattatccattctccttagacacatttatagattgccctgagaaaaactgattccctaggatttaaattatgtttttcttgacattttatagaatattaacaagttgaaagaagggcttagaatgaaataatacattaaaataacaattttgatttaagtcggtactttttaagggaaagtgtgatacttcttagtttctttttaacattaaaatccttcagctattaaatcctagatgaaaatgtaaagctttttgtatatgatatggtgtttgaaagcagaagaggttttcaaataaggtcccggtttttctaagatttctctgttgaaatttacctgagagtttactttcgcattctgagtattgacacaaggtttgagaaatgccattcttttgattcctaaaattctgattctaggaatattttaacttttgtactgcttaagatagaacaaaattctgaaggtatgcatgaatgctttgaaataaagcaaatgctttattagtctttttggagctcttcaatatttgcaaattactgtgctgaaaaatgtctccagttactgatggtgctgtttattacacccttttcaaagacatcctcacctagtactgagaatatttttgggtggagagagtcagtgacttgcttatgatttatgttgactctgtgaggggcttaatgttagaagctggggagtgtctgtacactcagcctgaaacctggtcattcataagcagcactgaccctgtagttactcatctttttctcccccttgctcccctcttcagggagggactctgtgctttttgatcctactttgatttattaatgtagccttttcaaaatttagggagcaaggtttcattttttgttaaagaaatatgtattcctctctttcactgccttcctcttgagatttattattaatctttcaggagccagatgatgaagtgtttcttgccatagctaaagccatggaggaaatggtggaagatagtgtcgactgttactggatcacccgacgctttgtgaaccaattaaataccaagtaccgggattccttgcccca

SEQ ID NO: 8502 - DNA, 1168 bp, Homo sapiens
ttgaaaatttttttagttttaattttaaatatcataaaaactgacggctgtaacccatataaacaaaagttctttgggctcctcaataatttctcatgtaaaatttgagaaccactgttctaaaggaagctttgtaaagtactcgagatttctgggagaaaagcattctagcaagaaccaatataagctatgttgtttgtagctcccaagtacaatctaaggtcaggggtcatagcttcctgtaatatacatggcaagacagttccaaatatgaattacatcagtgaacccagtgcccaggaggcagggcgcgcgaacatgtttaagtcttctgtagttgatggctcatatacttgtcaagagcatatcatgattctcattctttagaaaagaatgtttttactctttaggttatgttttttggaagttagccactctggaaatattaaagatcatttttaaaaagcacttctccccatcaggataaaataggaatagaacgaacagagggccacccagcaggaaagttgtttcactcttcaggcttcagtctgggtctgctgactacctagtgacatatcggctttgctgctccacttaccaccttaatgacttaccaaggtcactgccctgaagatactgatgaaaatacatgcaaaggccatgtatttgacatggaaaggatgagatggttagatagattctggtcctcatgatattgctgtactaaatttagtacttttataaaattgcagagatcaacttgcttcaaaatagaaatgatgggagggaattaaactacttttcttgccttctgtttattgcattccatgtggtttgcttattacatgccctggttataacttggctgattttgccctttcttttctgtttttccatgcggctgtcattttgtgtgtaatgcgactgtcttgcccttttcttggtctgtggattgcagtggcaccctgtgctgcgcacactaaagaaccgcattgaagagaacactggccacaccttcaactccttactctgcaatctttatcgcaatgagaaggacagcgtggactggcacagtgatgatgaaccctcactagggaggtgccccattattgcttcactaagttttggtgccacacgcacatttgagatgagaaagaagccacca

SEQ ID NO: 8503 - DNA, 104 bp, Homo sapiens
taattttttttttttttttttttttttttgcgacagagtctcgctctgttacccaggctggagtgcagtggcacagtctcagctcactgcagcctccgcctccc

SEQ ID NO: 8504 - DNA, 4842 bp, Homo sapiens
aggatcagattttattaagacctctactggaaaagaaacagtaaatgccaccttcccggtagctatagtaatgctgcgggccattagagatttcttctggaaaactggaaacaaggtatattattgccagcaaatctttcttcagagtaaagataatgttatttataatactagttacagccacaataactgtctttatatggagaagttgtgaatgaattacctttattaagataaatgtttaatttacctttcattataaaagaacacactgatggagaaaaattgtgatgaacagaaagtgagttgtgagtgtgggagtgagtatgtgtgatcaagatgtaaactcactttatgtccttttgttaaccgaagacaattttgtcactgacaagagattcctaaatgggttctttaacgaactaattctgctgcaacacagaggctttctcacaaggtgttggccagtgaaaacaggttaatgcagaaattaaacttccttgaggaatggaaagaattgcagagtaacatttattgaatgataagctgtggtggtgatatgaaaggtatgcaatataatgggaaacaatcttttcctgtcattattgaaggacacacataaattggtttttctgttgggaaacccccggtccagaaaaacttattacttttaataatatgaggtgaagagaaaattctcgaggagatgaacttattaaacaaaataatgaaatgctgtgaaacagcagggaaaaggtagctagacgttatatagctcttgaattaaatatcaatttttgcgttttatggaagttggatgtgctctttggaagactgttaagctgaggagggtgtatactagtttttgtcagcttttcgaaaaatgatacatattttttgaaacatatgaagttaaaaggaaaaatgcgtatgagttgcttttttaaaaatgagtttggattttccttttcatctcaagttacttgtttagctgcaaattatctcaaaggatttttttttttacatgattggagagcaaggttgtgtgtgtgtgtgtgtgtgtgtgtgtgtgtgtgtgtgtgtgtttaatgacactttcccttcctgagaggcatcttttaaatccagtctcttgatttgtgccaaatagaaacccaaaaaagacctttaatcctttgtccattggatgtgatgactttatatgtaagtgtagcttcagtttattttggaatagtgaccttttttttaatatactgttttatgagaggaaataaactccttccagaattttctcacttaaaataacttcacatcttaattacgaataggataaatatctattgtgaactacatgagaaagctgacccaactcgaataacctctacctggtatcctttctgcaacaatccaaataagttaaaagagtttttgtttagataagctgtaaaaatgataaatctatctttggtcctcagttgaaactaccaccactcatttgattgtgattctcattcttagccaaagaatatcaaaaccaaatgtgaagcttttcatacttacagatgcctgggcccccatccctggtggttttgggtctggcatagtcttcaggcatctgtttgcattaagttccattgccagggttcagacctgccattggggacccagtcctgttttgttctcaacaaacatttattgggtagttaaccatgtgccatgttaacctgtgttaaatgctaggaatggaaaaatgagtatgttccttctcaggagagctcttagacaacaagcaaagaatgtcaatgaaatttttaagtgctcagtgttccaggccagagtacagagggagggacactttgctgtctttcagtcctttctttttaattgtattgattcttttcctcggtaataaataagtccatcctagttttattaagaaaaagacaggtacaagccaaattgtattcatttaatcatattcgatttcaaacaaataggttctgtgtatgtgtttgcaaatcaggtgcagcctttcgggttgcttgacaagttgcttgggcagcccttagactataaagtttctacgtcattgatttaagggtgttttaaaatgcgataggctagcttccagaccatgattagtgtcactcctgagaagcagaggtttaatatttcataactgatttcattgcagatttatgtcttccatattctctttaaaaaaaaaaaagataaacttatgttagaacctctctggaaacagacttgctgacacaaactgaactgtataggaaatctgtaagaagcactgcctaattgacaaaaatggtcctatgattaacatgtatgctaatatcaactaattgatttttttggcttattctcaacaaataacctcatcctacttaaccccctactaccttacagcttgggctccagagtaatagcagatatggttggaatccgtgcactgctactgcttagttgtgtgacgttgtgtaattgaggcagggaaaccagttaaaagacttttactgatatttcctgtgagaattgataagggtctaaactgaaacaagtgagagtgcagtggaaagagtgcatgtgagggggtaaggaaggtaaggaggtagaattgtcaggacttaaatattgattgggtgtggtgtggccagggaatggtggagtttggattaaactataaggtttcctgcttgggttgataatagaatatattcatttaatgtctcccttctctagcattctgttagcagtcatctgctggtgcaaccagtcatagccctgagtgataaaacgtgagagatttagtactcaggctctgaggtgttgttttgaccactaccatctacagattcccaactctactggatagtcaggttcctgaaacatgtaaatccagataatcagagttttattgtatatggaacatatctttcatttcctaatggatccagggacatcatttacgaatatcagatattggctgaattcagctgtgttatgatcaaccttaaagactactggactatgaggagcccctcacggtgtttttctactgcccttatgtaactggtctgccagctttttagaactgtgtgtgcctgcaacttagaaaaaaaatcccacagttaaattggttaaaacaactgtcaactttccttgcttttttgctgccagtttggttagggtaaccttgcagccttgctgattctgtcctttgattttaaatgcacgtgtcttttgaacctcaagatgaaggctgagaagtgactctacaggcttacttgtggaaatgtagaatgagtgggctttgcttttgtgatctgttttcctatttattgacaccttccttgtttattccaggttcacagctatagtctagatggtggaggtttatgactttccaataagtgaaatgttaatgagggttattaaccctcactagtgtctgtttggaagtagtgacattcttccaaaaatcttggaaaagttgttttgtagtgtgaatgagcatgagtcactgatctaagccctttcactggatgaagtgaaaagattttttttcaacaaaagagggagagagagaatcaagactctgataaacatagtactatttttaaaagaaatccaataacaataaagattgttctattctctgccttcccatttagatagggtttaaaccagcaggaggcatccgcagtgcaaaggattcccttgcttggctctctcttgtaaaggaggagcttggagatgagtggctgaagccagaactctttcgaataggtgccagtactctgctctcggacattgagaggcaggtgagtaatcatctctgtctttggaataaattaacaagtgttttttgagaaaggaattgaaaagtcaaattgagaactggagataaaaactcatctgattgacctcatcctacccaatcctctaccttttcttccaagcaaaccgccatcagaagtgagtagggtggagattctgctgaagcacatactagtgaggctttctaatgaaatgttcattaaaactatttattattatttgatagtataattattaactgatgtgtataattatagaatgattgttaattaaactctgcttttcctcacagatttaccatcatgtgactggaagatatgcagcttatcatgatcttccaatgtcttaaatcagtcaccagttccagaaaagttctttacgacaatgtttaaaaattatttttctacgtaattgctaaaattatttaattaaaaaattgggcagtaggtaactggcattcctctctttaaaatttctaccgaacttaatggaatggaaaaagcaaactcatccacatgtggtactcatttcaggcacatctgaaatgatcttaattactagaagatctgcactattaactttgtgaagagtttctcctaaaaactttaagtaaaatgttaatggtagctttgataacatcaaattctaagggagaaaaaaacaatattaaaccgcccaagcagtgtgccctagcagaggaaaatgcaacatctcgcaagcgctgctgtaacgacttcaggagtcactgattcagcactaatttcctgctgtgaaaactcatctttcatttttgccgtggataggcgcttttattaattgttgtcctaatgaaatttctgacattgtcatatacaacgatgaatatcattaaaatttttaaaataataaagttcctatagtttatttttttaaaaaacttaaaaattgttacaatacataatgaaaaaataatccattaaacataaaaagaggtttgatcagtga

SEQ ID NO: 8505 - DNA, 4842 bp, Homo sapiens; identical to SEQ ID NO: 8504

SEQ ID NO: 8506 - DNA, 684 bp, Homo sapiens
ctggacttttcttcatgtgtcatgaagtttcctcctgattttcagagacccttccaggcctgcaagcgatttgacagccatccctcagtgccaactaaacctcctgggcagcctgaccccagggtaggaaggaagcgcctacaccaaggggccctctgggagctgagatcatcctggggttttgtcgcctggtctgacttgtgcactgggatcttctcgtgccaggccaggccccgccccctccccgggactgggcagaccccctccctcatgcatctgtgtccactgaggcttccctcacctagaatggcccatccttcaggacccagctcactctcatcttctttccagggacttatcccccaaggctgtcctctgttctggtgagctcagggctcttggaacttggtctgcagtgactctggggttcctggttaggacccatgttctctaggtcccagcaccctgcacggggcagtgtttgtgacactgggcccagctattctgagagaaggactccaaccttccatcaggtgtggcccgagatgtgggtggccctgggcatggggcatggatgcattgtgactttcatgggcctcttctgcaaaaaaaaaattaaaattatactttatgactattggtagaaagataaatatattaatacattaaaatttctctttgagt

SEQ ID NO: 8507 - DNA, 4099 bp, Homo sapiens
ctctggcccatggccagtggcagggttgtggtgccaactccactctgctgagagtgagcctagggtcttggtgtgtgagtggtgctgtggccacccggtgctcaggtcaccagggcggaggccttgccctcttgccagctagtttgctttactgggttttgctttggggaaggatcttctataaataccagtccatagagcacttcatcctgctttctgggacgtaagaactcatccctctaagaagagcctctgcaacagaaaccgaaacagtgcatctgcttaggaacaaagccactctctgtctggtgtggtcagagggtcccggatgtccccccctccactctgctgggcaggggctgtgcctgcggagcttccttccaggatctgtccttctcagcttccccagccgagccgccaggggtcctgaggaccaccatggcccctgaacactcctggagctttggtgtcagccctgccacccgagagagagagagagacatggtgagtaactgaggcacagacaggttcaggcacagtcctggtcacaagtggccaccatgcaactctgggccccaggtctctcccagcacctgctctgccctaagcgtgtggggccgggcgctgcactgttgactttatgtcccctgtccccagccttggtgttacttactgcacttgagcctgtctcctggagggaaatgaaggtgagagggacactgtttcatctaagaggggaagctcgggaatgggtttgaggacttaaggggccaggagtcaaggtaaggaaagtgaatggcacagcgaggcgaagctgtgcagccctggtgggtcactgccaccgtccacgtccccaggtggcgtctgacacaaggtgggccaaagtggccctctccagcctgtctgcctcccatagcctccgtggggaaagcactgaggcaggatcagatggaaccagagaagcccatcccccacctcctgcccactcattccttaaagacatcagtctcggccgggcgcggtggctcaggcctgtaatcccagcactttcagaggccaaggcaggcagatcatgaggtcaggagatcgagaccatcctggctaacacggtgaaaccctgtctctactaaaaataaaaaaagttagccggatgtggtggtgggcacctgtagtcccagctactctggaggctgaggcaggagaatagcgtgaacctgggaggcggagcttgcagtgagccaagatagcaccactgcactccagagcctgggcgacagagcgagaccctgtctcaagaaaaaaaaaaaagacatcagtctctcccaaaacccagctaggttgctggcttgacggaggtcctggccctcagaaatcccgttgtcccaggacgggggcaggtggtctgagggcgccgcagcacccgtgagccatcctcactaggagttgtaccgtcctggtctggtcgtctcattctctcatgagctgggagctggcagcagagccaggagcggagctgcagagcaggctccccacgatgcccgtgtcgggatgttcctgccagtggcagtgggggcagccgggcctgtctggagcgactccaggctgctcagacatcaaagggaaaagcacccgattgtgttgtttgcggggctagttccttcttgtccctcaggtcttagcacagatgccccctctggaaagagcccttccctggcccccaccccaccgccccctgcccgtctccctgttgtttcctccatgggtcactcactctcagcctgtatccgtgtcgcctctcgcctgctccacgggagcaagggctttctctcttattccactaggtcccagccaggcacgcagcagcccctcacacaagcatggcatgagtcagggaggaagggacagagggaatggccgtgtgaccttgggcagtaacttgggctggtttttcatgtacaaaatgaggcgacgacccacttagattgctgaacacatcgagtggccatagccgtgagaagtgagagctgcccctgccctactgatggggagacaggtacaggtgacgggagcgttagccgagatgtccacccatccaccacacgcctatgggcacccttgtgccatgagggctcagcctgggccctggtggaagcaggtaccgggtcgatgctacctgcagcctcatcagagcctagctcttgggcagcgggcgtggttctggcctcttcacagccgaagtgcagacaggggctgtgggccaagctcctgaaatttccgccgacaagggcatctttcatgagtcttccttctgggccccctgttttgaaaccaaacaaggatgcagatttctgccaatcccgatgagctcggcatgagcacaggctctgttcccacgcggaggtgatgtcagccccgagcagagacaggcgcttggcattccacgagcctgggcggccgcgtcagggacagacacagtgtctgacagctggctttgagaaatactgacaccagttcacagactccattcctaccttcagggacccccagaaaggtgaaaggaccccaggttgtgtgaccagtcacctgatccagccccttcttgtcctggttctcccatcacagaggggccagggcagggcaggagtgggcctgagagcccatggctggtttccacatgcgccatgattaagctcctgcactcggcatttcagtaaagccatcttgtggtacagacagtgctgacatcagaaccttccgtggatccagcctcctacctccgggtacctgctgtgtgggagtcactcccctcccccagccctggatgctcctccagtcatcccagtagctcagggccagcccctgggatgtgtctaagaacatgagtggacaaatagatggactgcccagagcagggtttctgagacttcgctgcaggatatgtcatcgccctgcagaaaactacccccaccctaggaccccccgagttttggggtttgtaagaaattacatgtctcatttattttgaacaggtgaattttgcagtcaaattcttgtgttccattttagtacaaaaatagcattatcttttcaaaagtaacattttgaaattactcatcaaataaattgatgcttcaggaagagctgtgtcaatcctgtaggtttatagatctgcgcttcacaggaaaccccagcaggtccccggctgccgggcccaggtgatcctaatgaaactctccactgctcagggccaggtgccttgctgggagcttgcaaagccttcactcccgcggccctcacccagcccctgaagggcagcgatttgtgtctgaaggttcgctgggtcctactgctggcgcccattttacagatgtggaaaagcaagcacagaccagttaaggagcttgggcagagtgactgggagacagttcagctccgtatcagaaagggctttctaagcgtgcgtgctgtcacatgtaagcggctccctgtgggtggtgggcccccttccccaccaccaccctgacatcacaggtgtgagcagccaccgcacacactgggcatcacatgggccggggagcctggctctacagcacagtcctttggccatgaagagggggtggtagtgaagatacagagtccttggcttgataggaggtggggctgacagcctcccatcttccagcctgccccaagaccacgtgacctttcctgacctggtgcttctgtaagtcccacctcccgggtgcccctgggcgaccttggcccataaatctctttgatccccatctcatcttcaaatgaaggtttacagctcagctttttaaaaaaataaaaataactagtaggttctggctgggcacggtggctcacgcctataatcccagcactttgggaggccaaggcaggtggatcacctgaggtcaggagtttgagaccagcctggccaacatggtaaaatcccatctctactaaaaatacaaaaaagtagccaggcgttgtggtgcatgcctgtagtcccagctactcaggaggctgaggcaggagaatcacttgcaccctggaggcggaggttgcagtgagtggagattgtgccactata

SEQ ID NO: 8508 - DNA, 2879 bp, Homo sapiens
tgcaggtgagcaagaggatgctggcggggggcgtgaggagcatgcccagccccctcctggcctgctggcagcccatcctcctgctggtgctgggctcagtgctgtcaggctcggccacgggctgcccgccccgctgcgagtgctccgcccaggaccgcgctgtgctgtgccaccgcaagcgctttgtggcagtccccgagggcatccccaccgagacgcgcctgctggacctaggcaagaaccgcatcaaaacgctcaaccaggacgagttcgccagcttcccgcacctggaggagctggagctcaacgagaacatcgtgagcgccgtggagcccggcgccttcaacaacctcttcaacctccggacgctgggtctccgcagcaaccgcctgaagctcatcccgctaggcgtcttcactggcctcagcaacctgaccaagctggacatcagcgagaacaagatcgttatcctactggactacatgtttcaggacctgtacaacctcaagtcactggaggttggcgacaatgacctcgtctacatctctcaccgcgccttcagcggcctcaacagcctggagcagctgacgctggagaaatgcaacctgacctccatccccaccgaggcgctgtcccacctgcacggcctcatcgtcctgaggctccggcacctcaacatcaatgccatccgggactactccttcaagaggctgtaccgactcaaggtcttggagatctcccactggccctacttggacaccatgacacccaactgcctctacggcctcaacctgacgtccctgtccatcacacactgcaatctgaccgctgtgccctacctggccgtccgccacctagtctatctccgcttcctcaacctctcctacaaccccatcagcaccattgagggctccatgttgcatgagctgctccggctgcaggagatccagctggtgggcgggcagctggccgtggtggagccctatgccttccgcggcctcaactacctgcgcgtgctcaatgtctctggcaaccagctgaccacactggaggaatcagtcttccactcggtgggcaacctggagacactcatcctggactccaacccgctggcctgcgactgtcggctcctgtgggtgttccggcgccgctggcggctcaacttcaaccggcagcagcccacgtgcgccacgcccgagtttgtccagggcaaggagttcaaggacttccctgatgtgctactgcccaactacttcacctgccgccgcgcccgcatccgggaccgcaaggcccagcaggtgtttgtggacgagggccacacggtgcagtttgtgtgccgggccgatggcgacccgccgcccgccatcctctggctctcaccccgaaagcacctggtctcagccaagagcaatgggcggctcacagtcttccctgatggcacgctggaggtgcgctacgcccaggtacaggacaacggcacgtacctgtgcatcgcggccaacgcgggcggcaacgactccatgcccgcccacctgcatgtgcgcagctactcgcccgactggccccatcagcccaacaagaccttcgctttcatctccaaccagccgggcgagggagaggccaacagcacccgcgccactgtgcctttccccttcgacatcaagaccctcatcatcgccaccaccatgggcttcatctctttcctgggcgtcgtcctcttctgcctggtgctgctgtttctctggagccggggcaagggcaacacaaagcacaacatcgagatcgagtatgtgccccgaaagtcggacgcaggcatcagctccgccgacgcgccccgcaagttcaacatgaagatgatatgaggccggggcggggggcagggacccccgggcggccgggcaggggaaggggcctggccgccacctgctcactctccagtccttcccacctcctccctacccttctacacacgttctctttctccctcccgcctccgtcccctgctgccccccgccagccctcaccacctgccctccttctaccaggacctcagaagcccagacctggggaccccacctacacaggggcattgacagactggagttgaaagccgacgaaccgacacgcggcagagtcaataattcaataaaaaagttacgaactttctctgtaacttgggtttcaataattatggatttttatgaaaacttgaaataataaaaagagaaaaaaactatttcctatagctagtcggaatgcaaacttttgacgtcctgattgctccagggccctcttccaactcagtttcttgtttttctcttcctcctcctcctcttcttcctcctttctcttctcttccccagtggggagggatcactcaggaaaacaggaaaggaggttccagccccacccacctgcccaccccgccccaggcaccatcaggagcaggctagggggcaggcctgggcccagctccgggctggctttttgcagggcgcaggtggaggggacaggtctgccgatgggggtgggagcctgtctgctgggctgccaggcggcaccactgcaaggggtgggagcctggcttgggtgtggctgagactctggacagaggctggggtcctcctgggggacagcacagtcagtggagagagccaggggctggaggtggggcccaccccagcctctggtcccagctctgctgctcacttgctgtgtggcctcaagcaggtcactggcctctctgggcctcagtctccacatctgtacaaatgggaacattaccccctgccctgcctacctcacagggctgttgtgaggaattgatgagatgatgtatgtgaaacactttgtaacctgtaaagcgctgtgcacacgtg

SEQ ID NO: 8509 - DNA, 4002 bp, Homo sapiens
atttaattcacctacaattgataatgaacaaattcagtatgttatataaaaaacaagtagaaagaaaatggtgatgatcgtatagttttttataatgttctttaaagctcagtttcatgtgttaatccttattttatgtggaatttattattattataccctttcagcttgtatgagttcttctatgaatagtcaagcttcattggacaacacagatgatgaacaaccaaaacaaccaattaaaactacaatgttattgaaaattcagcaaaacataggtatttaattttacttcttttataacactgaaaacatatttagatttgagttttcttgttactttaagatctttgtatttcatttctctttcttaagattgctagacttaacagtatttattgggtattatggaaagtaccaggccctagagataggaagatttataattcatacattgtcatctaagtgccctcaaagatgacacatcctattaatttttaaaacgttcttaaaagaaaaagctgcagagttttgggaatcagttaatatagtagggctaatgttttacaaacgggtgttcttagaattactattgcaggagattttgataggtgttctatgacaaacaacgttaaattcaagtcaggaattttataatgtatttttatattttaaaggctctaagaattactttaacagttttcagaatttttgaacaaggaacatgcagactattgtttagtggagtaacaatttgagaaatactaagttttaagacttctgactgagagttaggagccagaagatttaattgtagttcttgtcattcattagataaatttaattaatttttttgtacatgtgtgtgtgtctgtctgtctgtctggactactatggtcattttctttctttctttttttttttttttttttgagacggagtctcgctctgtcgcccaggctggagtgcagtggcgcaatctcggctcactgcaagctccgcttcccgggttcacgccattctcctgcctcagcctcccgagtagctgggactacaggcgcccgccaccgcgcccggctaattttttgtatttttagtagagatggggattttctttctttagcttactataatcaggaaaaaataaaagttacaacttagatgtactaattattagattttataatggtcgaacatggacttctgcagttttcagtagctacacaagttacacaggtggctttatattataatgattgagaactactgcctactggagctgccgttttcttttaacctacgtagcataagacagctggtatgccaatataaatatttatataagccctttaaagtgtttgttattttttctcttagatacgtctcagtgcacatgtgtgcaagagagatactttgtccaacatttgaaatctagtttttcaactaattgctgtatttttctctaagatgttgctgccttttagtatatacatatgtatgtctatgtatgattgtgtgtttgtgtattgttttttaggcccatcagttacccacatttcagagcctaggattagtttggcctttcttttgctcattccattttcatttgttctgtgtttgttttacttttaggtgtgattgcagcatttacagttgcagtccttgctgcgggtatctcctttcattacttcagtgattagggtgaggcacaaagagtttcttgatcatccagagaacattgacagacaattatgaataataaagatgttaacaatccatctgtatttaaaacactagcagccagatctgctgccatgatgcctatttggtgtgtttctgattaaaatgaaatcacaagctgccttgtttagcctgctttacattgtaggtggcccgcatttccagaaataacgttatgcatctagatggaagctgcatgtaacaaatcattattatctatttttaaaagcttcaaaatgatgggatatgatcatagattttagtcttactaatctgaatcacatattaatcaggacattaaaaactttaacagaggcatgatggctcacacgtataatcctaatgctttgagaggctgaggtaggagcatcacctggggctgggagggagttggagaccagcctggatgacataatgagattctgtctctactggaaaaaaaaaaaattagctggacatggtggcaatcagctctagtcccaactacttggaggctgaagcaggaagatcacgtgagcccaggagtttgaggctgcagcgagctatgatcacatcactgtactccagcctgggtgacaaaatgagacattgtctctaaaatacataagtaaatttaaaaaaaaaagaataataatttgaacagtgaatgttgatgtaacatcttaataatagagcaccagaaaaatttctaccaaatgagacaacaactttaggataagttcatcctctaggagctttctaatgtgcactcagttcctgtatactgtgtgttttgttctgatcaaggggtagggaacctttccagagaagtcccattagtaagaaatgacataaaatacgtgctttctcaggttactgtataactgttataatatatttaatatataaaattaagacttttgcttccagcaagtatgttagactagatattataaaacaactagatcctgaataaaatctgcttttaataggttcactggaagtaggagaattttcaagaaccatacttcgacatttcctctgccacaaaaaatgaacgcattttaagttaggagtcatgaatactgtattgaccatacaagtggattatggttgtctggatggcagataccaatagcaacattgtcatatgcagtttgcctcaaatcagaaacaagaagacatcggaatctgagatgctgccctagagaggacagttaaagaaggttcagtggtcctcagtttgcagtgctctagctcctggcagaagcaagagggaaacattcctaatttagttccaagattcctacagattattatcaagtagtagtattttatgactagagatcacaggcacaagttgaaacaaactaacatgacaagaaagctatagaaaaaataaacattgaactcagttcttcaaggtttcatcaccaacataaggaatgaagttggaaccacaggcagatctgaaaaagaaccaaatagagctcctaaaaatgagaaatatttattgaaataagaaaaaagccctcagacatgttgaatattttattagactcagctgaagagacaagtgaactaaactataagctggatctaaagaaattacccagtgagcagtgaggagaaacaaggagctagaaaacattggaaagttaagagagttcgagggaagaattataaagactaggagtcctagaaagagaaaatttagagaataaaggagaggcagtacttgaaagataacacaattttacaaatttgttggaaaaacatgaattcataaattcaggaagcacaatatataccaaacatatatttaaataaaatccaggcctagactcaaggtattgtaaatgacaagataccaaatacaagattttaaaagcaaccatggggagaaaaagatcagtgaaagcaagacagtcaaatacttagtaggcttcctaacagcaacaatgtacccaaaagagggtagaattctgagaaaaactattagcttagaatttgcaacaagcgaaactgaaacaaacagatgctcagatgaaaaacagatgttatcctcagcacaaattcagtaaagagactacaaaaggatgatcttcaagaagggaaatgattctaaaaggattatctgaaattgaaaaactagtaagcaaataaatgataaacataagtaaatttaaactgttgtttgtataaaacaattataatgaagtgtttataagaaattgtaaacaaatgtaaaactaaataaacattgttatgcaacattaataa

SEQ ID NO: 8510 - DNA, 3688 bp, Homo sapiens
atttaattcacctacaattgataatgaacaaattcagtatgttatataaaaaacaagtagaaagaaaatggtgatgatcgtatagttttttataatgttctttaaagctcagtttcatgtgttaatccttattttatgtggaatttattattattataccctttcagcttgtatgagttcttctatgaatagtcaagcttcattggacaacacagatgatgaacaaccaaaacaaccaattaaaactacaatgttattgaaaattcagcaaaacataggtatttaattttacttcttttataacactgaaaacatatttagatttgagttttcttgttactttaagatctttgtatttcatttctctttcttaagattgctagacttaacagtatttattgggtattatggaaagtaccaggccctagagataggaagatttataattcatacattgtcatctaagtgccctcaaagatgacacatcctattaatttttaaaacgttcttaaaagaaaaagctgcagagttttgggaatcagttaatatagtagggctaatgttttacaaacgggtgttcttagaattactattgcaggagattttgataggtgttctatgacaaacaacgttaaattcaagtcaggaattttataatgtatttttatattttaaaggctctaagaattactttaacagttttcagaatttttgaacaaggaacatgcagactattgtttagtggagtaacaatttgagaaatactaagttttaagacttctgactgagagttaggagccagaagatttaattgtagttcttgtcattcattagataaatttaattaatttttttgtacatgtgtgtgtgtctgtctgtctgtctggactactatggtcattttctttctttctttttttttttttttttttgagacggagtctcgctctgtcgcccaggctggagtgcagtggcgcaatctcggctcactgcaagctccgcttcccgggttcacgccattctcctgcctcagcctcccgagtagctgggactacaggcgcccgccaccgcgcccggctaattttttgtatttttagtagagatggggattttctttctttagcttactataatcaggaaaaaattaaagttacaacttagatgtactaattattagattttataatggtcgaacatggacttctgcagtttttcagtagctacacaagttacacaggtggctttatattataatgattgagaactactgcctactggagctgccgttttcttttaacctacgtagcataagacagctggtatgccaatataaatatttatataagccctttaaagtgtttgttattttttctcttagatacgtctcagtgcacatgtgtgcaagagagatacttgtccaacatttgaaatctagtttttcaactaattgctgtatttttctctaagatgttgctgccttttagtatatacatatgtatgtctatgtatgattgtgtgtttgtgtattgttttttaggcccatcagttacccacatttcagagcctaggattagtttggcctttcttttgctcattccattttcatttgttctgtgtttgttttacttttaggtgtgattgcagcatttacagttgcagtccttgctgcgggtatctcctttcattacttcagtgattagggtgaggcacaaagagtttcttgatcatccagagaacattgacagacaattatgaataataaagatgttaacaatccatctgtatttaaaacactagcagccagatctgctgccatgatgcctatttggtgtgtttctgattaaaatgaaatcacaagctgccttgtttagcctgctttacattgtaggtggcccgcatttccagaaataacgttatgcatctagatggaagctgcatgtaacaaatcattattatctatttttaaaagcttcaaaatgatgggatatgatcatagattttagtcttactaatctgaatcacatattaatcaggacattaaaaactttaacagaggcatgatggctcacacgtataatcctaatgctttgagaggctgaggtaggagcatcacctggggctgggagggagttggagaccagcctggatgacataatgagattctgtctctactggaaaaaaaaaaaattagctggacatggtggcaatcagctctagtcccaactacttggaggctgaagcaggaagatcacgtgagcccaggagtttgaggctgcagcgagctatgatcacatcactgtactccagcctgggtgacaaaatgagacattgtctctaaaatacataagtaaatttaaaaaaaaaagaataataatttgaacagtgaatgttgatgtaacatcttaataatagagcaccagaaaaatttctaccaaatgagacaacaactttaggataagttcatcctctaggagctttctaatgtgcactcagttcctgtatactgtgtgttttgttctgatcaaggggtagggaacctttccagagaagtcccattagtaagaaatgacataaaatacgtgctttctcaggttactgtataactgttataatatatttaatatataaaattaagacttttgcttccagcaagtatgttagactagatattataaaacaactagatcctgaataaaatctgcttttaataggttcactggaagtaggagaattttcaagaaccatacttcgacatttcctctgccacaaaaaatgaacgcattttaagttaggagtcatgaatactgtattgaccatacaagtggattatggttgtctggatggcagataccaatagcaacattgtcatatgcagtttgcctcaaatcagaaacaagaagacatcggaatctgagatgctgccctagagaggacagttaaagaaggttcagtggtcctcagtttgcagtgctctagctcctggcagaagcaagagggaaacattcctaatttagttccaagattcctacagattattatcaagtagtagtattttatgactagagatcacaggcacaagttgaaacaaactaacatgacaagaaagctatagaaaaaataaacattgaactcagttcttcaaggtttcatcaccaacataaggaatgaagttggaaccacaggcagatctgaaaaagaaccaaatagagctcctaaaaatgagaaatatttattgaaataagaaaaaagccctcagacatgttgaatattttattagactcagctgaagagacaagtgaactaaactataagctggatctaaagaaattacccagtgagcagtgaggagaaacaaggagctagaaaacattggaaagttaagagagttcgagggaagaattataaagactaggagtcctagaaagagaaaatttagagaataaaggagaggcagtacttgaaagataacacaattttacaaatttgttggaaaaacatgaattcataaattcaggaagcacaatatataccaaacatatatttaaataaaatccaggcctagactcaaggtattgtaaatgacaagataccaaatacaagattttaaaagcaaccatggggagaaaaagatcagtgaaagcaagacagtcaaatacttagtaggcttcctaacagcaacaatgtaccc

SEQ ID NO: 8511 - DNA, 99 bp, Homo sapiens
ttttttgtattttagtagagacggggtttcactgtgttgcccaggctggtcttgaactcctgagctcaggcactctgcctgcctcagcctcccaaagtg

SEQ ID NO: 8512 - DNA, 99 bp, Homo sapiens; identical to SEQ ID NO: 8511

SEQ ID NO: 8513 - DNA, 6158 bp, Homo sapiens
caagctgaagtctttctcagccaagatcgtgcagctcctgaaggagtggaccgaggccttcccctatgacttccaggatgagaaggccatggccgagctgaaagccatcacacaccgtgtcacccagtgtgatgaggtgagtgctccctgggctctggccagggtctttgggtgtgtgccagggtctgccctcgggagggtgggggcttcggggacaactctgtatgtggtccccttccatgttactcccccaggagggttgctggctggccccattcaacctcccttcccccagatgacagctcagctggccagcagtgggccagggtcacccatgatactgcaagcagggaccttgcagcccggttgcgggcctggcaatcattgtctcaaccctctcctggcccttgctgtccttgtccctggagtgggagcctattgagagtttgtaaggctctgcctgtcttggattagtgagaggaggtgggggtaaggctttaaaccggtctcccatttttcaaatgtcttcacctttgcctttggtggagagagaactggagatgcctgggccaactgggcctccacagtggaagcattccctgtgcttagcagctcctgttcaccccgagtactccaggaggagccagggaccccaggctgctcccaactagggggcagagactcctggctttggcagaagcctttcccatgccttaaactgttctatgggctgctcctgcttcaggaagcagctcagtgggccgcctctgaaaaagccatgcttttcagacccagaagctcagtcttgagcctgtctctgcccttagcctcgtcctgcagcaggacagcccactgagacccctcctcagcagtcctcagaggagcccatgctgtgccccactttgtccttgaaggcctgaaggctgcggtttagataggggctgtgggctcacgttggttaggcacatccctggaggtgagatggatcctacccacagtggtggtggccttgctgccagcccatgctggcacccttattgcccttgaccccacaggagaatggcacagtgaagaaggccattgcccagatgacacagagcctgttgctgtccttggctgcccggagccagctccaggaactgcgagagaagctccggccaccggctgtagacaaggggcccatcctcaagaccaagccaccagccgcccagaaggacatcctgggcgtgtgctgcgaccccctggtgctggcccagcagctgactcacattgagctggtcagtgctgccttatgccctgactgggggtgggggctgtgggaccacagtgcctctttcagcacagcacttcaggcccctgctagtcacactgagccatcagggaagtgcgcttgccagccctgactggccacacttcatgccagatgtgtgtccgtctgagtggcgggcacctctgtgcctggcactcacgtcctcaggaacacagcagtgctgtgtcagtgggaggagctggagcagtgtcgtcctgcagtggggactgcagtggccctaggatggaggactggcctgggaggaggtgaaggtcctgtgccctgggcagctcctcctctccctgtccgcatgcctatgcagtgctgtcccttctccaggggaagcttgtcaccttccctttgctatcttccaccccaggacagggtcagcagcatttaccctgaggacttgatgcagatcgtcagccacatggactccttggacaaccacagggtaagtgggccaaggcctgtggcacccctgccagccctgtctgcccagcacttgcgctccatgcagggtgggtgtgggcctcactcagcacgccccgagcgtctccggagtgctgggccatgagccccgatggatgtggcactggacctcctagcacctgcttcaagaggcagcacctgctccaagatggctgtgctggtcatggatgatgaatgctgggagaggtcacagatttgggccagggagccagcctggcctgccagccctgcactgggcagcaaggagcacgcaggcatgattgaggctgctgcggtgcaggctgagccatagctggggaccagggccagctgtggggactaagttgtccagccatggtcctccaggccccctatgacctgctgtgtcctttccagtgccgaggggacctgaccaagacctacagcctggaggcctatgacaactggttcaactgcctgagcatgctggtggccactgaggtgtgccgggtaagtgcccatggcagacatggtggggtggctgccatgcccacacccagtgagaccctgatcttgccccaggaattagatgatggaactttaagagtgaatgcacaaagtccctgttgcattgtcagggccttggtggtcccccaaccccgacatacagcgattccttcaatgacaacagacaccccatccgtggagtgctccccttgtgcccagcaccatttttcttgcctgtgtgaggctttgccagccctcacagccctctggggcagatggtgccttccctttgatgactgaggagcctgagcataggccgtgcacatgtctggacctcccagacgcagccatggacctggatcagcccgctgtggccagaagctaagtcccgaggtcctccctgcccctctgttcctctgcccggcggccccagctcctgctgtcccccggcagcgccatgctgaggtcacctgccaccttccaggtggtgaagaagaaacaccggacccgcatgttggagttcttcattgatgtggcccgggagtgcttcaacatcgggaacttcaactccatgatggccatcatctgtgagtgactgggcacccagggtggggctgctgcatggcccacccccccggccctgaccctacctgctgtcctctgcagctggcatgaacctcagtcctgtggcaaggctgaagaaaacttggtccaaggtcaagacagccaagtttgatgtcttggaggtaggcacctgagccccgtcacagctgcgagctgcacccatttcgtcccgcaatggcccgaagggggccctgacagtgggggtggggggctgccctcctctccctggggctagcacctacagtgctggctgagctggcctggcatgttcgtcctccagcagtggggacttaagttgtcctcggttacttcaggcagacccggcatcacctaaggcgagttccagagtggaatgcggttaagcaagagtttgacaagagtggggttgtgttggaagacactgccttttccttggtcagtgtctccaggtcctggctggtctagatggcccagaggctggcagacagggtcacctgcagccttcctcagatgtgtttgaccacagagtccatttttgcaaagcatgtgtcttgtggagctggtcaggtctgggaggtgttgatctaagtagaggagcaaagggaagtcttgaaggaaggagggcgagggtcaggcctggcaggcagggcagtgacacttctgtggctttccagaggatgccaggacctgaactcagaagccctggccccagggctcagccaggcacccttgggcgtcccctcccccgtgctaactcccaggctgcccaggggccaggtgccttctctgtctgctgcctcctgctctgcagaggggcatctggagcaggtcggaggggcatggggctgtgatgctcaccaggtcctccctgtgcccacagcatcacatggacccgtccagcaacttctgcaactaccgtacagccctgcagggggccacgcagaggtcccagatggccaacagcagccgtgaaaagatcgtcatccctgtgttcaacctcttcgttaaggacatctacttcctgcacaaaatccataccaaccacctgcccaacgggcacattaactttaaggtgagctcatcccagcacagggcaggccaggcggaaactgtctgagctactggagccgccaggcattagccctgggtcgggatctgtgggtttcctgagccctgcctgaggttcacaagggccttcaagactgaaagcctcatagtgggtcacggggtgctgtttgactgcaaggtatgaggtgcgcctgccggtacttctgggtggatggcctagttgcagagcttggagtcacagggaattgtatttatccaggaccgtggttccagcctggccctaccagggagagagccctgtccacccctgtgggattggaggtcaggaggggtttagataggaagggacttgagcagggaggaggcggcagagaattctagatggaagtgaagagcctgcctcgtgggcctgagggcacctggtgaggatgggagggtgggacataggtggcagggcaggtgtaggtggctgtgggctgccggatgcctacctcacacaggtgaggtgtgggcaggagctgggatccttccgaaggtcccagagaagggacatcatgacacgttctggttggcgccgctgggctgggtttggatggggtgcctgcctcaggctggagttatcagtggggccttctttgggtccctgcacagacaggcagagaccctgctgccggcctgatggcccaggtggagggccagacagagtggccttgggggacacctgctggctctgaggctgcatggcgtgccaccatggccacggggtcagcgtgcagggccactgtcccatcttgctgggaccagtgaagtgagcaggaggctgaggccaaaacctacgtcccctgccctgaccgagggtttggtgcttaaggtgacagatgaacatcagttggttttgctcccttcagaaattctgggagatctccagacagatccatgagttcatgacatggacacaggtagagtgtcctttcgagaaggacaagaagattcagagttacctgctcacggcgcccatctacagcgaggaaggtgagggctgcctcccaacgcagcatgcctcccaccccacctgactccttgtccaggcccggtgctctttggggttgccctgggagatggcctgctggctgctccatgccacacagggctggctctgctcgcaggggcgagtgtgcatgagggtgggtcatgggatggatggaagagaaggacaagagactcagtttccagcagccactggagagggtcacatgggcttaggtcaggtgctgcaacacgaggaaccttcctagagtccccaacaggcagcctgagagccccgcacagcagagaactgtgttcagcccagccagaggtcactgtccccttgtgctgggctgtactcctgaagggacagctgggttcaggcagacactgcatggggacacaggctctgagggactttcccatctctcagctctcttcgtcgcctcctttgaaagtgagggtcccgagaaccacatggaaaaagacagctggaagaccctcaggtaggagggcgtcaggaacatgggagtctgtaaggaagagggaggactcagggtgggcacgagggttaccctcctggaaagggagcctgggcactgccgcgtccctggtccagggtccctggtgcatgtttggtgggaggctgaggatggcttggacccaagccgccctgctcgggcctgagcactgcttgtcctgtccccctctaggaccacccttctgaacagagcctgaggcggatgcagcccgcgacgccagaggaagcacgtgcactaactgggtttaaattttgactgatgtgggttgagatgaggaggcctcactggttggggtccattttgtatataacttttatgagaaaaaaatggtaattatttcacgcatcaacctttggcacttacaaagttttttttgtttattttaaataacagggcagggccctgctttggggagggggaggggagagtatcatgggagatggtatccatgataacatcttattctaatgaaatgtagatttttattttctacttttgattattaacatcttatgaaaaaaatattttaaaaaacccagccaaaaccaacgtgagccctgcctgctcggacgcctttccagccagtgtctctgacgtcggggttagtgccttagagggtactggggtctggtcttcctgctctgtggtttggg

SEQ ID NO: 8514 - DNA, 1098 bp, Homo sapiens
cagggatttgtggggtcagggaggggcagggggcacctggcagcatattttctgtgacaatgtgtccagcaaatcattcttcaactacattttagaaaggaggaaatctaaaataaggtaagggagggaagcatggagttgtcagttttctgggctgtgactgaaagacacactgagctgtgatgaagaaaaatacatggccgactccagggtggtgacatttagagctagtcttgaaacctatcatctacagaggggagggcagccaacagccctcttcccacctgggtaggcagcgccctaattggaattggaaacagaaaattcgccaggccatactgctggagcccattcagataaaactgcccaatactgagaggtgttttctacacccagctagaggagcacactccattttcccatgtctgacttcgtggtgtgagccctgggccctactgaccatggcgcaggacagctgtccttcagaaagcacacggtcaatccacgtggaccgtctccctcgcaggaactccgcatccttgtccctctgcattcccagtttccgcaggagccttgatcaatggggaagcctgggtgaggatgggccaggtcccaattcccaaagctcctggaagagcctgaagacattgggaaaggctgggcctggggaggaggcagccctgggcccgctgcccatgcctctggtcctgggtggagcaggaatagttccactgtattgtcacagtgtgtttgcactttctgaggttctagctagtacagattgtatattgatagtacatattgctttgtttatgtctttgagatgagaaaggcttaaaacttgagaatatatatttggaatacagccttagaacggtttctgtacacacccacgtgcacttcacgggtgatcagttctagtacctacttgaaacagtgtctgtctgctactttattttcccaatttgatacataccctgatttgatgttttggtatttgagatgaactctgagtatgaagctgtaccataatgcaggacgtcagttttggtgtgactggacatacttgcttcaataaaagaatacatcactcccctc

SEQ ID NO: 8515 - DNA, 1512 bp, Homo sapiens
agtgggaacagaggggcaggcacaagcagcccctctcctctcagcatccaggcccttgtgcacctggcccccacccggagctgtctctagcagcctgctcctggggagctgctgtccccgctctgcagggctcccgatctgccaatgcttggaggtggaggccctccaaccacttccttgctccccttgccctggccaggcatggaccacataccccttctggtgctgtggtcttgccagctctcacttcacttccactggactctcctgcgggccaccagaggtcccaaggcccagcagcttcagggaattaggggacagttttggctctgggtctccagcgctatcgtgtagaacccactgcagtgtgggccacgtcgtatgtctgccctgtccagttgggagccttgagggcttggaacgtggcctgcacggccgaggggctgcaaccaggtcctgcatggtggcggccatcttccatgtgaacactccacatggaaagggttcgtgcttgggcttccatgtgcagaacctcgctccgtggggcggatcctcgtctggactctgaagtagggcccagggtataggttgaagccagggctgagggaggcgaggagggataaagaaagccaaccacagagaggaggtcgcagccgttgcaacagctgggcagacttcaaacccgagagaggggctgggggcggcagggctgtggtgtgtgacggttctacttccacaggagagaggctgaggcggagctgagtggagagctgtcggggctgggagccctgcccgctcgcagagacctgaccttggagctggaggagccgccgcagggacccctgccacgcgggagccagaggtcggagcagctggagctggagagggcactgaagctgcagccctgtgcgagcgagaagcgcgcccagatgtgcgtatcgttggccctcgaggaggaggagttggagcttgcccgcgggaagcgagtggacgggccctccctggaagcagagatgcaggccctgccgaaagatgggctggtggcaggaagtggccaggagggcacacgtggcctcctaccactgcgtccgggctgtggggagcggccactggcctggctggccccaggtgatggcagagagtctgaggaggcggcaggagccgggcctcgccgcaggcaagcccaggacacagaagctacgcagagcccggcccccgcccctgccccggcatcccacggcccctcagagaggtggtcacgcatgcagccctgtggagtggatggggatattgtcccaaaggagccagagcctttcggcgcgagcgcagcggggctggagcagcctggagcccgggagctgcctctgctgggaacagagagagacgcctcgcaaacccagccacggatgtgggagccacccctgaggccggccgcttcgtgcaggggacaggctgagaggctacaggccattcaggaagagcgagcacgaagctggagcaggggcacccagg

SEQ ID NO: 8516 - DNA, 489 bp, Homo sapiens
tgtgaggtacatgtgaagtgaccacgtctgttcttgttgggggcatctgaggtaggagaggaagtgcctggtcatcgcagacaggctgctgctcagctggcacccactgtcctgtggagagcattggccccggcttagaagaggacgggccctcccaccacactggccaggccacccccagcctgacagaaagtcatctttccggccggatgcggtggctcacacctgtaatcagcactttgggaggccaaggcgggtaaatcacttgagctcaggagttcgagaccagcctggccaacatggtgaaaccctgtctctactaaaaacacaaaaaattagctgagcatggtagcaggcgcctgtaatcccagctactcgggaagctgaggcaggagaatcacttgaattcaggaggcggaggttgcagtgagccgagatctcgccattgcactccagcctgagccacaaagtgagactcgtctaaaaaaa

SEQ ID NO: 8517 - DNA, 23544 bp, Homo sapiens
caggagagggtccttgccatcccacctccagctcgcagacccgcagggttcctggcaggagcagcttgctgccccagaagagggggagaccaaaatagcgctggagagagagaaggatgacatggaaaccaaacttctacatctggaagacgtcgtccgggctctggagaaacatgtagatttgagagagaacgacaggtttgccttctactcattcttaaaactaaacacttcaaactaaaaatgcagaactaacccactgacccctgttgctaatggtgctatgtggcccttcctgccgacaagctcgcagcccctgatgggggctgtgtagcccttcagcctgagtaggggttgtgagcccagccccgtcccggaatgccacggtcatctggtgctctaccactgggcagagggagggcaggactgcctttcggggtcctgaacccaccttccgggttcaagatattcttgtgcatcagcctcccaagtagctgggattacaggcacctgccaccacgcctgactaatttttgtatttttagtagagacggggtttcaccatgttagccaggctgtcctcaaaggtgatctgcccgccttggcctcacaaagtgctgggattacaggcgtgagccactgcgcccggccctcgcttccaaagatttttcattgttgttcccagaagaggctgtatacccattaaacaataacttttgctagtattttgttgaggattttagcatcaatttttgcatcataagggattggtctgcagttttcttttctggactgtagtgtccttgtctggctttggtatcaagtaatgcctcatagaatgagtttggaagtgttcccttctcttcaattcttggaagagtttgagaagaggtggtggaagttcttttttaagtggtagaattcaccagtgaagccatcagctcctgggctttgttaggaggtttttttgttttttgttttttgttttttttgagacagagtctcgctgtgtggcccaggctggagtgcagtggtgctgtctgggctcactgcaacctctgcctcccaggttcaagcgattctcctgcctcagcctcctgagtagctgggattacaggcgtgcaccaccaggaatcaggaatttaaaacctcgtaacaactagggcacggtggttcatgcctgtaatctcagcactttgggaggccaaggtgggtggatcacctgaggtcaggagttcaagaccagcctggccagcgtggtgaaaccccatctctactaaaaatacaaaaattagtgtggtggcgtgcgcctgtaatcccagctactcgggaggctaaggcaggagaatcgcttgaacccaggaggtggaagttgcagtgagttttgagatcgcgccactgcacttcagcctgggcaacaagagcgaaactctgtctccaaaaaaaaaaaatacaaaaattagccgggcatggtggcatgcgcttgtagtcccagctacttgggaggctgaggcaggagaatcgcttgaacctgagaggcagaggtttcagtgagccgagatcacaccactcactgcactccagcctgggtgacagagcaagattccatctcaaaaaaaaaaaaagttcctttagtgaaactctgtttagagtaaatttcctgtttttgcttatctgaaaagtatcttaaatgttccttcatttttgtaagacagtattcttaggaacgcacatctagccattaaatggccgcctctccacccttggaatgtctgctgtccgtgtcagagacccggttgctgacactgcatggttggcccttggtccgtctgttcttccttcgtgtgcatttccacggacttggtggcttaacaaggcacaaaagtgcgatgttttagttttagaggttggaagaggaaagggtctccttgggctaggaatgaggtgctggcagggctgcagggccatccagaggccccgaggggagctccctgcctcaccttctccagtggccttgacttgaggcgtccttccatcctggaagccagccctggatggccgagtcctcctcatgtcaccttactccaacactgactcttctgcctccactttctacctctaaggacacttgtgattacgttgggttcctctggagaatccagaataatctacagtcagagaacgagcagccttcattccccctgctgtgtaatgtcacatagtctctgttagaggccagtattgtgccatccacagtaggtatctgacttttgtgctctggttacttctgagacctgtatctttagtggtttttatttgctgtgtgcatttctttctttttaactttttatttatttatttatttatttttttgagacggagtctcactctgttgcccagactggagtgcagtggtacaacctcagctcactgcaacctttgcctcccaagttcaagcaattgtcctgcatcagcctcccaagtagctgggattacatgtgcccaccaccatgcccagctgatgtgtgtgtgtgtgtgtgtgtgtgtgtgtgtgtgtgtgtgtgtatgtgtgtatttttactacagacggggtttcaccatgttggccaggctggtcttgaactcctggcctcaagtgatttgcctgcctcatcctcacaaagtgctgggattacataaggcctgagccaccaggcctggccactttgttttattttattttattttattttattttattttatttattttattattttattttatattttattttattttattcattgtagagatagtctctcactattttgcccaggctggtctcaaactcctggcctcaagcgatccttctgcctcagcctcccaaagtggatcctccttgaaattacaggtgtgagccaccatgcccagcctctttttaactttttattaaagtgtgatacacataagaaaatgtatatatttgtacaattaggagaattgtcaacaaattgaacacgtctgtgttaccagcgcccagaacaagagatggaattcaccagagtccccggggtaaccacttcttacagcatagattcagtttgcttgtttttgtactttatggagaggaatcatgcagtgtgtactcttctgtgtctgactttcttggctcaacctggttgtgcgattgatctgtgttgttgctgtagttcatacatttgcattgctgtgtggtattctgttgtgtgaacataccacagtttattcttttctcctgttgatgggcatttgggtagttcctagtttttggctctcacaaatggaactgcactgaacgttcttgcatttgtcttttggagcattatgttgggctgtacctagaaatgggattgttatgttgtgggtataggcatagttttctttttgttcatcctacttagaaaacattgtcccagccaggcacagtggctcacacctataatcccaggactctgggagcccaggagttcaagatcagtctgggcaacataaggagactgttttctacaaaaacttaagaaaaattagtcacacatggtggcacgcacctttggtcccagctatttgggaggctagatgggaggatcacttgagcctgggaggttgaggctgcagtgagctgagattgcaccactgcactccagcctgggcggcagagcaaaagggaaaaaaaaaaaaaaaagaaatattttccctgttgaatgtatggattgcattggtgtctcatgaaaatctctcagccattactattaaaatattgcctctccggaggttgcagtgagccaagatcgcgccattgcactccagccagggcaacaagagcaaaactccgtctcaaaaacaaaaaaaaagtatatatatatatatatatatatatatatatatatatatatatcctctcctcccactattttcttcaattagatatgtgactgttagagcatttcactttatgtctcaacctctcttttatattttccatcttctgtctgtatcacatttggggtattttttacatacctatgtgttccaggtcagtatctctttctttcagctctgtgtaatctgctatttaaaccatcccatgagtttttattttgacattgactttttgttcatttctaaaaattctgtttggtcctgtctgatcattgtcaatagtttcttgttgcttgttcattgtttgttgctgtcttttatttatgtaaacatttcataacacttatttttagtttgtgtctaataagtccaatacctgcagtttctagaggattgaattctggcttctggcttctgctgtcatttatgggtggctttgctccatgtatgttatggtgatctttgattgtgagctcatatttgcttgatgttaatctctgggaatataaagagccttatatgggatgctattgcttttgcagagaagtgagaaggtgctaatctgggactgtctgaacctccttccagggccctgtctggtgcaggtgtccacagtgcagcttctccattctgctaatagcagtgctgacacataggcattggttgcaaggtccccccagctttgtgttgcatagtgctcacgcgttggtttcagcttccaggattttgttttgtttggagattcttgcaggttttcttttctttccatgaggacagtcacagaggttgcgatcagctttgcgcaggatctagttgtttggtggtcatgtgggggatggggtagggcacccctcagctttcggccttgcatcaacttgttctccattctagagccagagtgatagtttaaaaacacagaactctcctgcttgaaaccctttgctgcctttaattccagtgactatttatttttgtctttagttcctcatgagataaaatgaaggcatatgaagaagatacttatgtttactattataagtataatacataaagcgggctgggcgtggtggctcacatctgtgatcccagcactttgggaggcctaggtgagaggatcaccaggaattcgagaccagcctgggcaacctatcgagaccccatctccaccacaacaaaaattatccaggcgtggtggcgcatgcctactgtagtcccagctcctgggcctgggagttcaaggctgcagtgagccatgatcgtgccacagtactccagcctgggtgacagaatgagaccccatctcaaagaaaaaacaaaaaaatacatgaagtgaacatggtgagatcatgtggctttcagtattttcagactgaaaaaataagaagctagtaccatatggagacctatttggggaatacacgttagccttaccagtcagtattaagaatgcattctctgggtagcaagtatgggtcttaagctacttcactggtgatcttttttgttttttcacagacaaggtctcactatgttgcccaggagggtctcaaactcctgggctcaagcagtcttcctgcctcagcctccccagtagctgggattacagatgcatgccgccactcctggctcccattagtgatcttcattggtaaattgccatcttcatctatcaaatcaatggcattacccaagcagggactccctgagttgtcagagaacaaagacggcccaggcagacttggttcacatagtggctgtctatccctgccttttcccactttgagattcacctagcagaggtttcccatatatcttggccttctgattcctgtgtttcttagctccacactgagttcactgccagggcatgagtaccctgcagtacctgaggactcacgcccagcactggcaaccaggacacacgtttggtgagaggccatagatgcaggagcagttcagctataaactcagcataagcaaaacccaaggttctgagtgcatttgtgacttgatggcgtggcagtgtagaagctaagaaagttccgttttctgtggcttggctcatgggagatgtaagacgttaacacctggtgcaggaagagggaaaggaatggtgtctggcgccacctccagggacggggagatggggacgcacagttctcaggactccccgctgcagagccagcctccgtgaccacatgtggctccccaagtgctcaccggtcttttctcaatttttacgcagactggagttccatagactttctgaagaaaacactttgttgaaaaacgatctgggaagggttcggcaagagcttgaagctgcagaaagtactcacgatgcacagaggtaagggccacgcccctacccagaccttctgggggtgcgttttgccctccgtagagtgaccttatgcagtctccatatagacagtgggaagtgttctcagattagccctgcattccagaaaaccctaaaccatgagccttgttaacttctgaacgactcggcagatgtgggaggctctggcctccttcctcgtgtgggcggcacctgaacgccccagctccttggtgtgggaagtgaggcagagtgcccacagcatggtcgggactgcgagcagagccctagcacaggcgccgttcaccccacagagatgatgcacgtcgcacttaggggttgggggaggccacaacagtgtctgtaggggtcagaggtgctcctaggatcctctcctgataacagcttcagctctgccttcctcagagggtcattgctggtttatcagtttcagtgaacaagagctgggggaggggatgggcgtggggagggtcaggaacctgagcactgaggcaagagaggatgggggtgggggcaccagtgagagtcaggggacagggcagtgggccgcccaccaatgagagtcaagacagggcagggggccaccagtgagagtcaggggggcagggcagggcggccaccagtgaaagtcgggggacagggcaagggggtactcaccagtgagagtcgggggacagggcagtggggcgcccaccagtgagagttgggacagggtaggggggtgcccaccaatgagagtcagggggacagggcaggcgggcgcccaccagtgagagtcgggggacagggcaaggggacactcaccagtgagagtcgagggacagggcagtggggcacccaccagtgagagtcaggggacagggcagtggggcacccaccagtgagagtcaggggacagggcagtggggcacccaccagtgagagttgggggacagggcagtggggcacccaccagtgagagtcgggagacagggcaaggggggactcaccagtgagagtcaggggacagggcagtggggcacccaccagtgagagtcaagggacaggacagtggggcacccaccagtgagagtcaagggacaggacagtggggcacccaccagtgagagtcgggggacagggcggtggggcgcccaccagtgagagttgggacagggtaggggggtgcccaccagtgagagtcagggggacagggcaagcgggcgcccaccagtgagagtcgggggacagggcaggggggcgcctaccagtgacagtcaggggacagggcagagaggcgcccaccagtgacaggggacagggcagaggggcacccaccagtgagaattgggggacagggcaggggggcgcccaccagtgagagtcaggggacaggacagaggggcacagaccagtgacaggggacagggcaggggggtgcgcaccagtgagagtcgggggacagggcagggcagtgccaaccagtgagagtcgggggacagggcaggggggtgccccccagtgacagtcgggggacagggcaggggggtgcccaccagtgagagtcaggggacaggacaggggggcacccaccagtgagagtcgggggacagagcagggaggccaccagtgagagtcagtggggacagggaggccaccagtgagagttgggggaccagacggggggccacccatcagtgagagtcaagggactgagcaggggggtgcctgtcagtgagagttggcggggacagagcagggggcatccatcagcgagagtcaggggacagagcaggagtgtcccctcagtgcaagctggggaagggctgggactgaggaagggagaatgtgtgttctggggagggtggctttctgctgtcactactgtagccatatccaaggacaattgtttggcctttttttttcccaattatgcatctcaaggtgagcttagttctcatagacagtaattctgaaatgatggaattgccatggtgattaaagtagcgagtcccaagcaggtacccagggattgcccttccatgacagcacttccgaaatctcaaagctagttttcctttagaaaccattttttctctggttttcttgagtctgtgaggaccctgctgatggcatacctccggagatgcaggctgtttcggtctctattcactctgctgagtgtgaagtgttatgtgttttacaaaagaaatattcatgtatttgattgaggaatgtcatgcagggtgtgcgttcttacagtgctggcagtgtagattactagaggctctctagtaatccgacagtttcacattcctaaagtcttcgtggtttgggataaaccatggaagacgggatcgtcgtcttcattagtagtggcaacagcagggactgagaggggctggagaatgccaggggcaggtgtgggcgtctctgctgtggctacaaacccccatgctgctcttaccctgggtgctgaccaggaaagaaggcactggttggtcacaagtggtatcactgttaattgtgcttcttcaacaggaaggaaattgaggttttaaagaaagacaaggaaaaggcctgctctgagatggaggtgctcaacagacaggtgacgtatcgacgcctggcatggagctcatgccaccattcctttttttcattattttgaaatcattttaaacttacaaaaggaagtagagaatattcttctaaaagacttgacagtgagttgctgactggcccccaggccccatcaaagtcagacactaaacacggctgtgaagacccctgccccagtcaaatctgccggtggtcccaaggatgttcagaatcatgtggcacgcagtagttgggaccacaggcatcccctgcagggtccctttggtgttttgatctagaaactgtgagcagcttctcatagacgctggcaggcaggcactgtctgtgttgtgagtgcctgaggctctgcactggcccgaggcccagctgcttgtggagatgacctgcctggggagccgcacgccagcatgctcagcccatcttttgtgtttttagtagagacagggtctcactatgttgccaaggctgctctcaaactcctggcctcaagcaatcctccagctttggcctcccaaaatgctgggattataggtgtcaaacactgcctggacactccccaaattttgggggttttttttgagacacattatcactctgtcacccaggctggagtgcagtggtgcgatcttggctcactgcaacctccacctcccaggttcaagcaattcttctgcctcagcctccagggtagctgggattgcaggtgtgtaccaccatgcgtggctaatttttatattattagtagagacagggtttcaccatgttggccaggccggtctcgaactcctgacctcaagctatccgctggccttggcctcccaaattgctgggattataggtgtgagccactgtacccggcttaccccaaaaattttaccatgaaaaactttaaacacaggaaagttgaaacaatatagagtgatcatccacatacatccacaacattaatgcaactgttatccgcattgccacctgcactttagttctgttcatatctatatatttcacgtgtgcatgtgtatgtgtgtgttctgaaccatttgaagacaagttacaggccgggtgcagtgcctcatacctataatccctgcattttgggaggccaaggtgggcggatcacttgagcccaggagttcaagaccagcctgggcaacatgacaaaaccccatctctacaaaaaaaagaaaaatcagctgagtatgctgccatgtgcctatagtcccagctactcaggaggttgaggtgggaggatggcttgagcctgggaggttgaggctacagtgagtagagatcgtaccactgcactccagcctgacagagtgagaccctgtctctcataataataataataatagaaaataagttccagatgtcatgatactccacttctcaatatttcaacaggcatctcttaaaaggaagtgcatctcccgcctcgccacactgaaggagtgctgtcacacttaagaaacttagcagtagttacctcatatcagtattcagaccatattctcattttttcagttattaaaaagtgtcctgcacaacaaggttgctggcagtagggtgcagctgggggtgccacattgtgtgtaactatgactctgttcagccatgtttagctatcagatcaacttgctggcataaaccagccacttgagtgcattcatggcacctgtgggtcaggcattcagacaaacacagcgttgacggccgtccctgctctgtgatgtggggtctcggctgggaaggctggacagttggggtgacctaatggccagggttggagtcgtcggggaccccttctgcttgtgtctgtctggggcctctcctcatggggctggacctggaaggagtgtcgtggggggtgtcagggagctagtgttccagggcagctggtgggaggcgcatggctcccaagccctcctcggaagtcacactctacgttattcccactgagtccctggagccgcgggggaggcttctctgatgggcaagtgttcaggtcacatttcagaagaggatgtgggatggaagaggcttctggaggcttctttggacaacacatcccctgcatggtccctttggtgttttgatctagaagacctgtttttccccatgacactggcttttggaagagccccagtagtggtcccgtgggccatcccacattctggatctgtccagttgttttctgagagtgtaggctactctggtcgtatgtcacttgtctgccttgtaaactggaaattaggcctaaaggctggagcagatgcagagtgaacatattttgacacagatgtcatttgttttaacacacacccaggagacagctgctgacatctcatgttggcttctgcagtgaaagccagatgaatgcaagttcaaaattaagaggtggccagcgtgaacgccaccaggaacagatagcatctctgcctcctgatgcagctccctgcacagtgtctgcccaggaacttgtcactcgagtcacaaggaagcaccagacaaaccccaaatgggagggggtggaactgtatttgtcaaaaaatgtcaaagtcatgagacacagaagctgaggagacattccacatttgaggaggctgaaacagctggacagggcccagctgatcctgtgccgggaaggatgctgccaggctcgttgacaaaatgaagtgtggggacatcaaggccactgtcctgaagcagtagctgcacagcagccgcgtgagagctgctgtccccgggaggcaggcggctgtggagaagggaagacatcatgtgtgcgcctgtgtgtgtagggggcaaagcagattgggggagtgttgtcggctaggagctgggatggaaggcaggttggtttccctggtgatgttctagtcttgcaactgttcaagtctgaaattatttccaaatgaagagtttgttgtgtgtttgtttgtttgtttgtttgtttgttttgagatggagtcttgttctgtcactctggctggagtgcagtggtgcaatatcagctcactgcaacctctgcctcccgggttcaatcgattctcctgcctcagcctcccaagtagctgggactacaggcatgtgccaccaagcccggctaatttttgtatttttagtggagatggggtttcgccatgttggccaggctggtctcaaactcctgacctcaggtgatccttccacttcggcctcccaaagcactggtattacaggcatgagccaccacgcccagccaccaaatgaagagtttaaatgttaaaggtgaatagaagaaaatccactattgtgtttatctcaagaactgaaggaagattccatttctactcatgaaatcaaggctgtctttagaggacaaggtgaatgtgtgtcagtattaaaacaattctaattttcacaataaaatgtcataaaacacatgagctctataccatacacaactgccacacgcttatgtcgtggtggaagcttctcttaacctgaggcttgaggttctagggaagggatgaggtgaggttaatttgcaaggaattgcatgagaaaaatgcgtggactccctaatcttgagtaaatccaaatggaaaaacgtcccagttttcttacatgcctgtaaaacctatagaagcaaaggcagtggttgtgggcgtcactctgggaaggtgacgtgtgcgtggtcgattgtgctgagagcgggtcagaggacatcactccaaacccccaggagctgcggtgggaaaaagcaagtaagcagaaatatggttgcatgaagatgttcctgacaggtggctgcagacagcagagcctccgtggtccagaccgcagggccactttcctgccgctgtcactgcactgcgccctcacaggttcccctcatgaacgtttgctgaaatcctttgtctgtgggaggtgctattgagaaaaagcaaaacatacaatttgatgaacctatgtaccctgccaagagctacgcttgtgtgttcaatgactgagatcagaggagacttaagagattcatgtacctcaagtttaaataggttgcttttttgttaaaattgccatatatttttaaatatattaaaataatcgtggaggaaatgagaaaaacgtgaaaggtcttccaaacagtggtttggacggtcatggcatatactcccttctggtggcctagatgtgtgtgtgtttttcctaggggctggagcagggctttctgtcctcggcactggtgacgtttggggccaaatcatctgtgttgtagggtgtcaagtgcccccatgcctccatctccagctgtgattaccaaaaatacctggagacattgccagacatttcctcaggagcaaagttgtacctggttgagagcaattacaatgatatgaattgagctgctggcttaaaagtattttagggggcaaggtggggctgggctcagtggcccacacctataatcccagcactttgggaggctgagatgggaagatcccttgaggctaggagttcgggaccagctttggcaacacagctagagaccctgtctcgaccaaaaaacaaaactaggtgggagtggtgacgtgtgcctgtggtcccagctacttgggaggctgaggtgggaggatcgcctgagcctaggaggtcacggctgcagtgaaccatgaatgtgccaccgcactccagccagggcaacagagcgagagcctgtcttgaaaaacaaaacaaaacaaaacaaaacaaatgactacttaataaaaatatagccaatgatgggcaaatgtatatataacatgaaaattaaaaacatttttttcttatgtatttaaaaactttttcccccagaatcagaactacaaggatcaattatcccagctcaatgtcagggttcttcaactgggacaggaggcttctacccaccaggcccaaaacgaggagcatcgtgtgaccattcagatgttaacacagagcctggaggaggtggttcgcagtgggcagcagcaggtgggtggcctcagccgcagggagctgagctggaggctgggagctcagggtggggaggcggctgcaaataggtcaggacacgcgctgaggagcctggagggaagtgagggacttcccaagcatgccttggagaagtaggtggactgtgctgtgttggcaaatcccagtatctaaagaaaatagcagaatagctttatatgctgctgacagaggagtgaattggtacaaagttccccgagggcagtttggcaaaatacacacttagaggctgaagaaagtccacatgccttgacttcacgattccgatggggatgttcccgagagccttgtggaaggatgcagctgcagcattttccttgctgtgctgtttataatagcaaagcagaactgaaatcggccgagtcaccaacagaagctgagggagtcactggatcacagcacagccactgaaaaccatgttttcaaatcataactaatgccccaggaaacgctcccactgcagtgaggagaaggcacttcctgcagtgcgtggcgcacctgacactgtctcaccagggagatgcgtgtgtgtagaggaggggccggggagtgactgcaggacacagggccggccttggttggtgggttcacagggatttaaattttgtactttttttcttttctgtaattttctgaggtttttgcacgaattacataccagactcttcagatacttcttgacttgtgcaattgattttttaaaaacagagtgaccaaatccaaaaacttagagttgaacttgaatgcctgaatcaggaacatcagagcctgcagctgccatggtcagagctgacccagacccttgaggaaagtcaagaccaggtgggtgtgagcgatggctggaggcactgggtccagtcccacctgggagcagcatcaccgcagtgccaacggtgttgccaggcctcctccagcccaaagaagtagttgcgctgctgggcacagctgtccaggtgcttaccgggccaggaccgaagctgctcccagtgcagggttggtttgactgtcagcaagccccgtgaagagtagtgactgtttactcccgagggaaggagtgcgggcaccatgcctgtgggtgagccctccacagaatggaggagccagaggcaagcctggggactgtgtcgtcagaaccaaggcagcaggctccagccctgggagtggggtgacatgggcactcatgggcatgcatgacactggcctctgtacacgcctccgggtgccacatctgctggccccgcaggtgagaggcgcgggaggtgcagacacaggaggctgggctatggtggcaggggctcgtggtccgggacagacaggtgtgtgcaggggcagccgagcaggggcctcagggaggggagccggctcaggggatgcttgtggagggggtggctcaagggagaggagaagagcaggtgtgtaacggccaaaggtgcccagagggcgagtgcccagtgtggacacaggtgcggggcacacttggaagcttggctacagagaggaaagggggctgtgggaaagggtctctccccacctgcctgtgaggctcggctgagcctctgcacctggtcccccccggcgctggccctggcgccctgtgcagaggctccccctagacgtcctgaggcacagaggggtcagctgggcatggaccccagagctttctgaggcgctgttggggctcccataggctcttggccttgcagctacaggctgtcagttttccagaggtgctctgcctatttgaggcacccttctctacttttgagtctaaaaggaaccctggaaaattgcctgggccagttcgagtcctttgaggtgaggagtaaggccacctgaaaaggccagcacttcctcagcacctggcgctgggaggcaccgctggggccaagggagagcattccacacccctggggccacgcctgccaccagcctctcagttgggaagcacctcaccaagtctgtccttgcagccatgtgggtcaccccttcttcctcgtgatttagaggaagacgctcccccaaagcacgtggcttccagtcagcatcaggaagctgggggcttccagggtagctcaggacactctggaaaaggcagatggggctccctaagagtggccacgagaggctgggcctgaagctgatgtggttgccgtttccatgtgggagggaagctagggcagtcactgtcatgcccatgtgtggttcaggaggaaggccccagaggccagagcagacaagagggatggggcctcgtagaggagctcagagggcggagggtctcccaggggagctcagagggcaaagggatggggactcacagggccctctccacgggaaggacaggaagggtggctgcactcaggatgggagatgatgccccatctgccgctctgcctcactccagcacccagaacacaaatgtccttgtttccagtgctcccctggggacgtctttccctgtccctgtgactgtcaaggtctgtagatgtggcccgtctcgcgttgccaaggaaggagatgaagaggactggatggctctccattcagtagatgtttacaggctgcccaccatgggcagagatcccccttgggctggaccctggccatgctgtggagcggcttaattagtgggggttcggtcccaggatggctgtggggggtggtgcagtccaaggacctgcaagcatcagagcccagggagttggggtgccgggccagagccttcctgggtgggtagatgtgcttgatgcgtgggagtcccgcaggcctgggcggcggcagccagagtgaccgtcttgagacgagccttcgggagaaggctgcgtttggtggagatgctatttagaactggttcttccctccttttctgtctcaaaccataagctgccttccagggcctggaaaatgtggggtgcaggtgtgtctctctggggtgacccccgtcctgaagaagggtgagctttacagtgatgacctggcccccccaagacaggcccccagctcggctgagtcagtgcagggactactgaagggaagccggacctggcagtgtggcgcagggtgttgccttccctcttcctccaccatgtggtgatgtcaggcccagcccaaatatgaccccgatggagcgtgcgtgattcccactccgtcttggggtctcaggtgagtaaggggtggcgtggccagttcttatagggtgccaaagaaatcctggtgaagcctccagtcaactggatgtaaattgtatttggatcttgcttcgagctgcttcattaaagtggctggcatagtggtgcacagtttactgtaacagctcagcccacctccagcagacagtgccatccaggaaaccaggcgctgccaggaattccagccctggccccaccttcccttcagcagtccgtgttgtctgggtagtctgtggccagtgtagccctgttgcagagtgaggtctccgctgaaaggagaactggcgtggtcgttgtttgaaaagaatcaggccccagcaaggttcactggaagctaacactggacgcagcagagtctgggtctgacaggaggtcagcgtcaccattttgagggtgatggacatgttttctgcactctagcactgtgtggaagcgctggctgacagcagcctggctgtccgaattccaaagaaatgggctccttctaaatattcaggtgctgctgcatactcgggagcacacgctttccttgcccttgcaggtgggggtgtccttggatggagagggtgctcctctgtgccgcgtctcagcagccccaccagagctgtctccccttccccatgcaggtgcagggagctcacctgaggctgaggcaggcccaggcccagcacttgcaggaggtccggctggtgccccaggaccgtgtggccgagctgcatcgcctgctcagccttcagggagagcaggccaggaggcgcctggatgcacagcgggtaagtggggatgcagcgagagatggctgacgagatgaggaggagggtgaggcgggcccaccggtcctcagttacccagaagctgcacaactgtgaatacatgagtcacgtatgtagcatgtcagatggtaaggaaggctgtagggagagaggcagtgtggttttaaacagggtggccagacaaggcctcacaggtggcccctgagatggtgagacctgaatggggtgaaggagcggtggcgccatgtggcaggggagcagcagaggccctggggtagggggtatttggcatgttccaggggaacagggaccagaggccgagggcagagagcagagggtgacagattgggcccggcaggtgccgtgggcagtgcaggtggtgggagatgggagacagtagctcggagcacagactgtggagggtgggatcccgcccactacctcccagctgagtgaacttgggcaagtgaacctctctgtgcctcagtttcctcatctgtaaagtcctgctagcagtagtgtccacctaaaaggcttattgggaggcatcaatgggttggcgactttaaagcacttgaagggtccccagcacagctgtgccctatgcaggagtttaattcaaaagtctgagagaataactcactcctgaaattcccaacatagttcatagttcatcagggacagacttcaggagagatcaggaaccagagggcaggggacaccctcatgagaaaggaattggcgcacgacttgaaaagtgggtaacatttgatgtttgtaaagtgtaagttctaatgaagaacaaccttgtaacatcacacaaaggggtcaagctaaagttaagtgatgctacattattgacaaagttaaggagaatccccctagaagaatacactaacacagcgagggaagctcgctttggagttatttatggttaaaatcttaggaccagttctctgaggacaaatgagtctgctgattctccctgaactgcaaagagaaaggaaagctgtgtggtttgggccagaacatatttttgttttgttttgttttgttttttgagacagagtctgactctgttgccaggctggagtgcagtggcgtaatcttggcttactgcaaccttcgcctcctgtgttcaagcaattcccctccctcagcctcctgagtagctgggactacaggcacgcatcaccatgcccagctaattttttgtattttagtagagatggggtttcaccgtgttggccaggatggtcttgatctcctgacctcgtgatccacccgcctcggtctcccaaagtgctgggattataggtgtgagccactgcgcccggccctgggccagaacatttttaaacccttgctctggacagatgaaaggttacccacagtcactgtcagatgtgtacatttgagctgatttccattttatgtatttatttatttttgagatagagtcttactctgtcacccaggctggagtgcaatggtgcgatctcggctcactgcagcctccacctcctgggttcaagcaattctcctgcctcagcctcctgagtagctgggactacaggtgcctgccaccatgcctggttaattttttgtatttttggtagagacgggatttcaccatgctggccaggctggtcctgaactcctgacctcaggtgatctacccgccttggcctcccaaagtgctgggattacaggtgtaaaccacctcactaggccactaatttccattttaaaataaatagccttgagctgattctttttaaaatgtaaaatattgcctgtaacctttttgtttttgttttttgtgttttttttttgagacggagtcttgctctgtcacccagactggagtgcaatggcacaatcttggctcactgcaacctccgcctcctgggttcaagcaattattctgcctcggcctcccgagtagctgggactacaggcgcccgctaccatgcccggctgattttttgtattttagtagagatagggtttcactgtgctgcccaggctggtctcgaactcctgagctcaggtaatccgcccgcctcagactcccaaagtgctaggattacagttgtgaaccactgcacctggctttttttttttttttttttttttttgagatggagtctcactctgtcaccaggctggaatgcagtggtgctatttcggctcacagcaacctctgcctcttgggttcaagtgattctcctgcctcagcctcccaagtagctgggactacaggtgcacgctaccacgcccagctaatttttcttttttttttgagactgagtcttgctctgtcacctaggctggagtgccactgcaacctccacctcctgggttcaagtgattctcctgcctcagcctcccaagtagctgggattacaggtacgcaccaccacacacggctaatttttctattttttttagtagagatggggtttcaccatgttggccaggttggtctcaaactcctgacctcaggtgatccgcccgcctcggcctcccaaagtgctgggattagaggcgtgagccaccatgcccggccacctgcaaccttcttttatggcaggaagaacatgagaaacagctgaaagccacagaagagcgggtggaagaggcggagatgattctgaagaatatggaaatgctcctccaagagaaagtggataagctgaaggagcaggtgagtgatgggcgctgctgctttcgtgttcacgtcctcttctgaacgctctccacttttatgggtgtgcaggtagctaatacaggaaaaggctgtcttgtcacagaattccagggaactaaatgtataccctacactgcaggtgcacattcatttattttcctccgggaatggttttaagatctgtcctttgggtgttcacatacactcagaaaggactcatccgttcatttgttcatgtagtcattcaggcatccccaagcacctctggtctaagctttcccaggtagacctgagatgagcagggctgagcctgcatcccagacctgaccctctggagacagaggcagatgcttccatagagcatacatgacctcgggccatgatgagtgctctgaaaatgagagaatagaggtggaaggagccggtggggtggtcaaggccactttgaagagccagcatttggtcagatgcccagtgaccagcacaggaacgtccagctgtgtccccagcagaggccaggtggcatttggaaggctcagtgggtgggagatgcacacatctcctcgtgtctgggggactccgaggagggtgcattccaggcagcggacagccatggaggaggccgccatggctggtgtgaactggtagggctcaggtaggcagtgcctgtcgtgtgtatcctagaagccaaggtcaggggtttgggttttatcataatggcagttagaaggcatagggagattttaagtaaaagcatgacaggatctatcttttaaaagaaaccatactagggaaaaagtcacttgggctactgtaaggagcaaagaccaaaaatgaggtgccataactcacctggtctgtagatgttcgaagtccaactcagcaggtgggaactgacgtgcagcagtgctgtgccctgagggctgatggcacagggtgtgggtggaccccacgggtgtggggtgcacacacagaagaggcccggccacggaccacattcagtgttaggattaagagaaatatgaaaacctggagaagtatttttgctccatcgtgatccagtatggtttggtctacatgagggatcctgagctcagcccaagctagacaaggcatttgtggaaggttcccagtccctccctggggccacccgtccttgcccagcttcctcccctactggtgcccccggtccctctcaccctttctccctggcacacacccacagtcctcagttgcccgtctcgccagcaacacctgacttctggttcaatcctgtggctcctgcatacctgccctggccctgagcacaggccacagcccagggcctcagtactgcctgtcctgcgcctgctccctcccctgcttctcttggctcctggccttgctgacatcacagccagtagcgcatacgcagatgaacctgttccacactctgaccgtcccagggccttttgaggactggccacttttgcctgaagtccttgtttcacggcacaaagctgcctcaagttttctccatcacatagcccagcagattctcaatttcctctcatgccagggtaacaaaacttgtcattataatccagtatttgtgtcagatttcttttttttttggagacagagtcttgctctgtcgcctaggctggatggagtgcagtggtgcgatctctgctcactgcaagctccacctcccgggttcacaccattctcctgcctcagcctcccgggtagctgggactacaggcgcccgccaccacgcccagctaatttttttgtattttttagtagagatggggtttcaccgtgttcgccaggatggtctcgatctcctgaccttgggatctgcccacctcagcctcccaaagtgctgggattacaggcgtgaaccactgcccccggccttgggtcagatttctaagagcccaaaactgtggtttgcgtaaacctgggaggataaaagagagcaggctgatctgtagcgtttctccaccggcctcatgcaaagcatggcttcctcccctctctagtttgaaaagaacacgaagtccgacctgctgctgaaggagctgtacgtggagaacgcccacctggtgagagcacttcaggccaccgaggagaagcagcgaggcgccgagaaacaaagccgcctcttggaagaaaaagttcgcgctctcaacaaactcgtcagtaggattgcccccgcagccctctctgtgtaaagacagattattttctaggattcattcgaaagcacatcttttaaattaagccactgtgctgccttagattccgtgggtcatgagccatgagtcctgggacatctgaggattgggattctttgttcaccccgcagatagttaatgaatggtctgccctgggcaagatggaggtgggggctgggggaatatgcatgttgcagaagccggcgtttttattagcggtcctgagtaatttcccttggcaaaattcccagttttgccactctctggagccagatcctgggagctgtcagcaaggagcaggtaagtgagcagttatggacagcactttccatgtggtgcttccgaccctggctgtcagagtgaaatgtaaagtcagggctctgtacagttttgccatttcactgttctgctttaagcttagcttattagaactcttggtggagggtgcgtacacacattccagaaaaggcttcactcgctgggaacgtcaacccagcgagaaaggaggggaagccccttctccggggaccttatctgtggactcaggaatgatggtgtttattgcaaatgcacaatctttttcccattgaaatgtcatcacactggaaattgtactatatgtaaaaaaaaaaaaaagtatagttttatatttgaaatgtatgcaaattatggccatatggctgattggaatgtactactgtaatataaaaagtcactgtatttgcaataaattcttttctattaaaattga

SEQ ID NO: 8518 - DNA, 3693 bp, Homo sapiens
accaaacccaaatgaggtgagcgcccttatgtggctgacaccagatgtagctgctgcagtggctgccgcagaggatgggacagagacacccggacttctcccccaggacctaccaccctctgtcctgtaagtaagagcttctccctcagcctctaatacaccaacatattcatgttgagaagttcagcgtctatcctgtcctcaggatggaattttgtgttgtgggggagatttaaggagagtgggtcagctgataattaagaaggtacatgaaatctaagacactgaccatcaaaccccaaagattcttgctctaactggctagcattgaaggtctaagtgtcagttctaacacaggggcaagtcatttaaccctccttgaacctgtttcctttctgcaaatgaggtcaacacccacccacctcctgtggtagttgggaggattcggggacctaacatatatgtaagttctttgtaagctacaaggcacagccccaacaggagttgtcaccatgcagtgcagtggaactagaggaggatggaagagcccgacctctggtcctgcacatgtccaccctcctgcggatgatcccaaccatggcagaggacaaagagagagtcagcactggaaccaagtttgccctcaagctctggctgcaacatctgggcaggtaaaagtgaaaaaggactggagagctccacagtactgggctggaatggtctagtttttacaggcacgggggaaagcaggaaaggacaacctctcttggaattcctccacagaacacccccaccgtgtaaaagtgcagcttacctggacccagggccagcaaaggaagaatggaacatggaccctcttcccccaaaccaggggtctggaaagtgaagtgtaaaatcccctccctagcccatctccatgacactcacagaacattcacaacctttattatgggtgagagcttcactacaactttagaaataaaaagtaaaattacaacataggtcctaggccttggcgagcctgaaaaagaagattgggaaggagggcacagggtccttccacctccctggcaaggtgcagaatgagccaggcctaactacagggccatgagcctctagaagcttaggggggaataagaaacactgtgaacttagatatataaatggagagagacccaagcaataggccgggcctgactcccagacccctgcagatcatggctaaggccttacatcctcctctgtcatactggagtaggaggcaggggaagtcatctttggagtattttggtttttcttatttatgtacaaaaaagtccacatccacaatccaaaataaagttctctgtccatctctgaaactgcctgtctcagtttttccacctgtctgtttggccgaagggaatggaatagacatgaagagacaatggatgtgaagaagaaatagagccatgggtttgggtaataagaagagagagcatttggggttcaagagaggtgccccttccccaagaggctctagacatagtcaaggctgagggttcagcccttctcctagctcacataccatcccatttgcctcccactgcctaggttaacatacccaaaggaatgtgccaccatctaaagaacatttccagaaacagaccccagtgtccttaaaaagaggttaaatattaaccctttgggtgctggccttgtcaggcagagatgaggccaaaagtaggcatctgtgaaggtctgtctggcccttggccagagcccccagagggatcagagtagctggggttgggactccacagcatacttgctcagtgttgggggacagcgaagtttccataatccagggaactcagtccagggaaatgatgtctgaccgacagccagtcaaagagggacctgagggcaggggtcctccatgcccctccctcaaggcccccccaggggccacaatgctgctgacacggccaggagggggcgccggagtggcgctgcagtgggagctccccagcgtgggggccagtgggcccagaaagtgagaaggggtccctcggtactggaagaagtggccaagggcatcctgttcatctagtgaggtgatgacagaggggccatagtgctaggaagaatcaagggcatagtttaagatctcaatcctgacttccccacctcccagtcactcatctcagaaatgccgtatgagagcaatcaacccctgtggatccgaaggtattctcttgagaagcaggagagcctctccctctttcccctacttccctacacccttcccctttccctgccttgagagagctcctccaacttgttaggttcttggctttgtgggcgtctgaaatgtgtggaatgtccggttagagcaggcatggtgctctaagtgcacacgggggtaggggtgagtaggccagggcagaaaagtaacaggggatctaggaaggaggcctaagtaggaatctcaggaactaccagtggggctgaggagataataagatacctacaccccactgccctcacgggaaagcagatttacatccccagagatcataagagagggaggggccccatcagtgtctagaaaggaagcttcagagatctgagaccttctgaagaaagaaccacttacctgactctctgtctgaagaaatgaaaataaatctaaacctggcaggaaaagaaaaatcaaaattaacctcctatctgacccctttaccaccaaaagacaaagcactgtggactgtggccccttgcaggagaagcaggaggctttgagaaggaacaggggttctgatgtagctctggggagggtgtggcagtgcagggtccatcttatgacccatgtcataccttggatgtcggctcccagtgggaaggcaggtgggtactcatgtagtgggagactggacaggaaatccccacccaacgtgcccatagcagggctccttagcaccgaggatggctggtggccagatgtcaggactctgtgggtagagaggagctgaggcagccagcaaaccacagatgccctcacccagctcaggtccccaggttccctctctgtcccctccacatttctcttgccccaggctttgtccaatgatcagaaagcaatcctgacttcttcccctgtccgttttgctgtagactcagcctattttctcataccctttgcttccaggtagggccgggatggcagctgaggtgacagaacagtgcttcttggtagggggcagatcctcctcatctgatgagctttctagtgtcaagtcaataacttcgaccttcttcttattctctgatggatctcccccctggactgggctgtactggaggcctgtgggtattaagaagactacgtctcagagaagaggccatccaagatttagcttagctggggaacagggggtcactcaccatccagcccataccctggcggggggcaaacctcagatgcctccttcttgggtttcattgggcaccaggatccatctaccatgaattggatctcatcacaatctgaacaggaactaagaatctccataaataaactgggggaagagagagatgaaaattcacggggctgggagatgagcagaacagtagccagagttctgtaactcaccttcctgttctcagtttcctcatctgtgaaataagaacattatccatcctactggaccg

SEQ ID NO: 8519 - DNA, 2043 bp, Homo sapiens
tatgctcctaaagagtaagattagtattttatgtgattagtaatccaggcaattggaatagctccaggacatggtataagctcagcacatttttaaaattcattttaaaaaatgaacacagtgacagatttttaattttctgccctcccacaattacatctctctatagctttccattagccatggcagtggtcttcttatagtttatgttaccatacatttgatatcactcaattttggtcacccaagattaaacattttctttcagataccagtttcattccaggacctgactgtgaacttcacccaagaggaatggcagcaactggaccctgctcagaggctcctgtacagggatgtgatgctggagaactacagcaacttggtctctgtgggtaaggactatttccaaaaacaactcccaagagcatacatttcttctgtgttacaaaaacatgttgatttctagaatttatttagccctgagcatcaggggagcaagaagattaaacccttttagacagtagaagtttgtgtatgtattcactgcccttcccctacccttcaccaaaatgttctagctttactgagctattgctgggcatcttcattgcacagcttctgaagctgtactttcttcattcttcagagtctctgatgtccaaagatcttggtccaagttctgtaatttcccattaacagggtatcatgttagcaaaccagatgtgattttcaaattggagcaaggagaagagccatggatagtggaggaattctcaaatcagaactacccaggtaagtaaatgataactgagcaggtggaccaatggaaatgagagttccatggtggtcggtggtaatagttggcatcgtaatgtttttcatgaatttctttttgttggcccagacctttagaagtgattgaggttgattaactgtcatgctatggacatctgaaacattctccccaaataaataattgaaatttataaagatgtttgccattaagttacctatccccaaaattcaagttcttcttttatcacaccttaaactttatttctgtagcattctttgttgcctcccttgccccacccaccattgtcataggcttggtttatatttcagacattcagagatctgtcatgatctttttaattgtcttccatttttctctacgtcacttaacagaaataacacggtttccctttccattctacgcttcaccaggatccggagtagggtgaggcaaacaaggtgcctggcatgcaaaatttaggaagacactcaactctcaggattgcacaggtgccctgggtatcctgcttgccttcctctagtcccagctctactcagcccacaatcttacttccctttgcactgtacaaattcgagagttccatgtcactgcaaaaatttcagatttacctcttccttcttgtgtgttttgataataactgaccatctttctgatatctgttgtacctggtctcactgtatgactatctttctctaagtgcttacttgactcttgtctgttttattcaacactccatcagccacacttccagcatactttgtgtactattccttgtgactatttactttttccactcaatgtttagtagtatttgtaaagtgtcaaaggtacttgtattctttgctagtttcctcttcctttccccctgttaaatagtggctggtatggatggatttgcttttttgtattttttgtttctgtatttcttcaaatcaaccaagtaagagatatttgcacttgaaatttgtttaatcttggaaggcttggcctgaagtctaacccctaaaacaatgcatttctaaggaattctcatttcatagcaaacatataaaggctcaccaattaccgttaattgtgttcctttttctagacattgatgatgccttagagaagaacaaggaaatccaagataaacatttgacacaaactatattcttcagcaacaaaacactgattacagaaagagagaatgtatttgggaaaacacttaatctgggcatgaa

SEQ ID NO: 8520 - DNA, 4359 bp, Homo sapiens
tatgctcctaaagagtaagattagtattttatgtgattagtaatccaggcaattggaatagctccaggacatggtataagctcagcacatttttaaaattcattttaaaaaatgaacacagtgacagatttttaattttctgccctcccacaattacatctctctatagctttccattagccatggcagtggtcttcttatagtttatgttaccatacatttgatatcactcaattttggtcacccaagattaaacattttctttcagataccagtttcattccaggacctgactgtgaacttcacccaagaggaatggcagcaactggaccctgctcagaggctcctgtacagggatgtgatgctggagaactacagcaacttggtctctgtgggtaaggactatttccctgtacaactcccaagagcatacatttcttctgtgttacaaaaacatgttgatttctagaatttatttagccctgagcatcaggggagcaagaagattaaacccttttagacagtagaagtttgtgtatgtattcactgcccttcccctacccttcaccaaaatgttctagctttactgagctattgctgggcatcttcattgcacagcttctgaagctgtactttcttcattcttcagagtctctgatgtccaaagatcttggtccaagttctgtaatttcccattaacagggtatcatgttagcaaaccagatgtgattttcaaattggagcaaggagaagagccatggatagtggaggaattctcaaatcagaactacccaggtaagtaaatgataactgagcaggtggaaccaatggaaatgagagttccatggtggtcggtggtaatagttggcatcgtaatgtttttcatgaatttctttttgttggcccagacctttagaagtgattgaggttgattaactgtcatgctatggacatctgaaacattctccccaaataaataattgaaatttataaagatgtttgccattaagttacctatccccaaaattcaagttcttcttttatcacaccttaaactttatttctgtagcattctttgttgcctcccttgccccacccaccattgtcataggcttggtttatatttcagacattcagagatctgtcatgatctttttaattgtcttccatttttctctacgtcacttaacagaaataacacggtttccctttccattctacgcttcaccaggatccggagtagggtgaggcaaacaaggtgcctggcatgcaaaatttaggaagacactcaactctcaggattgcacaggtgccctgggtatcctgcttgccttcctctagtcccagctctactcagcccacaatcttacttccctttgcactgtacaaattcgagagttccatgtcactgcaaaaatttcagatttacctcttccttcttgtgtgttttgataataactgaccatctttctgatatctgttgtacctggtctcactgtatgactatctttctctaagtgcttacttgactcttgtctgttttattcaacactccatcagccacacttccagcatactttgtgtactattccttgtgactatttactttttccactcaatgtttagtagtatttgtaaagtgtcaaaggtacttgtattctttgctagtttcctcttcctttccccctgttaaatagtggctggtatggatggatttgcttttttgtattttttgtttctgtatttcttcaaatcaaccaagtaagagatatttgcacttgaaatttgtttaatcttggaaggcttggcctgaagtctaacccctaaaacaatgcatttctaaggaattctcatttcatagcaaacatataaaggctcaccaattaccgttaattgtgttcctttttctagacattgatgatgccttagagaagaacaaggaaatccaagataaacatttgacacaaactgtattcttcagcaacaaaacactgattacagaaagagagaatgtatttgggaaaacacttaatctgggcatgaatagtgttccctcaagaaaaatgccctataaatgtaatccaggaggaaacagtttgaaaactaattcagaagtaattgttgcaaagaaaagcaaagaaaacagaaagattcctgatggatacagtggatttgggaagcatgagaaaagtcatttgggaatgaaaaaatacagatacaatccaatgaggaaagccagcaatcaaaacgaaaatcttattctgcaccagaacattcagattttgaaacaaccgtttgactataataaatgtgggaaaaccttcttcaagagggcaattctcattacacaaaaggggagacagactgaaaggaaaccaaatgaatgtaatgaatgtaggaaaaccttttctaagagatctaccctcattgtacatcagagaattcatacaggggagaaaccgtatgtttgtagtgattgtaggaaaacttttcgtgtgaagacaagcctcactcgacaccgaagaattcatactggagagagaccctatgaatgcagtgaatgcaggaaaaccttcattgacaaatctgcccttattgtacaccagaaaattcatggaggggagaaatcctatgagtgtaatgaatgtggaaagaccttttttcggaagtcagccctggctgaacatttcaggtcacacacaggggagaagccttacgaatgcaaggaatgtggaaatgccttcagcaagaaatcgtatcttgttgtacatcaaagaactcacagaggagagaagccaaatgaatgtaaggaatgtgggaaaaccttcttctgtcagtcagcccttactgcgcatcagagaattcacacaggggaaaaaccctatgaatgtagtgaatgtgagaaaaccttcttttgtcaatctgccctcaatgtgcatcgaagaagtcatacaggagagaagccctatgaatgcagtcaatgtggaaaatttttatgtacgaaatcagccctcattgcacatcagataactcatagaggaaagaagtcttatgaatgtaatgaatgtgggaaatttttctgccataagtcaacactcactatacatcagagaacacacacaggagagaaacatggtgtgtttaataaatgtggtagaatctccattgtgaagtcaaactgcagtcagtgtaagagaatgaacacaaaggagaatctttatgagtgtagtgaacatgggcatgccgtcagcaaaaactcacacctcattgtacatcagagaactatatgggagagaccatatgaatgcaatgaatgtgggagaacctactgcaggaagtcagccctgactcaccatcagagaacacacacaggacagagaccctatgagtgtaatgaatgtgggaaaaccttctgtcagaagttctcctttgttgaacatcagcgaactcacactggggagaaaccatatgaatgtaatgaatgtgggaaatccttctgccataagtcagccttcagagtccatagaagaattcacacaggagagaaaccatatgaatgtaatcaatgtgggaaaacctaccgtcgcctgtggactctcactgaacatcagaaaatacacacaggagagaaaccttatgaatgtaacaaatgtgagaaaacatttcgccacaaatcaaactttcttttacatcagaaatcccacaaggaataagttccaacaaagtaataaattccaacaaagcaacaaatcaaataacttacacaatgctaaactgtgagtatgtatagaggagtaaaatcttataaatgtaatgaatatggaaaatttttctgccataagtcaaccctcaatgtaacatcagagaaatcatgtaggaaagaaataatttgtttaataaatgtattattcattgtgaactatgaaaatattcaacagcaattcaaaggttatgccaaatgtgcctcccttttaaaataatgaaacaaacattgtttaagttaaattgttacttggttcctccccacagtgttacttgatagtgtatgttacgaggtgtgaggatctgaccttcatttcaaatcaataccattgtttgatagttgagtaagttacagtttctcaatttatggtgtattttcagatttggcagattttttgttgtctgctaactccatagtcttctagtagtggactgtatacctttatctgcaaaggtgacaactcaggagaactaaccattgtactctatgcacccatggtaattataccccaggtgagcattttgtaaagctgagccagtgaaagcccttcctaagacctttctaatggaagataggcacaggataactagttcatg

SEQ ID NO: 8521 - DNA, 904 bp, Homo sapiens
ttatttctctggttttagtattctgtaatatccactcaaccccatctaccagtggtttatgtcaattagtatgttttcaaaaatctcttggatttcctaatcaacatgttcattagaggtattgtttagaagtcactgatcaaattctgagaacaaaaggcgcctgggatgctgattaggattacattatatggatatatatgatgaggtaggattgccacttttatggggttattgggaaatgtttacctttcaagttctgatttccatgagtgggattttccctatacccattcctagcttctctgccacattatgcattctgccccaggcatgaggaagtgggcttatctagttggtaagatagtgatgggtaactgggtttgctcagctgaactccctcttcattgtgggctgacctgcaagtataatttcttgtcacagatattgcctgtgattggtaaattggtctaattctgtcattcagctaattggcccattagctgaatggtcacactaagttgcatcctccaactcaatttgatcagtaataaaagtttcatcctgccccctgtctgctacttaattttttatcgtttagatggggggaaattgtgctatttatttggggcccttcagagaacccaatatgaacatgatttatctatttattcagtttttatgtccttcaggacagataaatgtatgtatacacacatatacatgtgttaatatatgtaagtatatacatatgtttaaatgtatgtgtatgtgtatactgatcttgctcttttcctgtgaaatgtattaatagtcacttcaaagatttggttgctattgtgaaagaaattaagttacctttcactttgaaactaatagagtaaagaaaaacaaaaatacctaa

SEQ ID NO: 8522 - DNA, 233 bp, Homo sapiens
atgaggtcttgcactgtcacccaggctgctggagtacagtggcacaatctgagctcactgcaacctctgactcccagactcaagtgatcctcttgcctcagccacccgagtagcacatgccaccatgcctggctaatttttttttatttttttgtagagatggggttttgccgtgttgcccagactgatcttgagcttctgagctccagcgatcagcctacctcaacctctca

SEQ ID NO: 8523 - DNA, 6072 bp, Homo sapiens
gcctcccccttcgactgcagcctcgctccgtgccttctgcgcgcctgggatcccggagcctgcctaggttctgtgcgctcccgcccaggccggtgcccgccgcccgcctgcgccccaggcaggtcccaggcctccggctgctcccggccgaaggtggggacaggcagtggcaggcaccactagcgagggcgtttgggaacccagggtgaccacggcgcagccatggggaccgcgcttgtgtaccatgaggacatgacggccacccggctgctctgggacgagtaagtgggacctggccgaggtggggtgcggggagggacctctgaactgagctcctcatctgccccagccccgagtgcgagatcgagcgtcctgagcgcctgaccgcagccctggatcgcctgcggcagcgcggcctggaacagaggtgtctgcggttgtcagcccgcgaggcctcggaagaggagctgggcctggtgcacaggtcaggacgggggcaggccccacgatggggggcggggcgggcagcccagctagaaacctaagaacctgggcctaccccgagcctgccagcctcgaatacagagcctctccctatgcacctcgggtgggctcacaggcttgaggaagtgacagggtggccactcccaccatgaatcccaggtccccgcctcccgcccccctgctcctgctggtgaccctgcctctcctgcctgcccatctgcatgcagcccagagtatgtatccctggtcagggagacccaggtcctaggcaaggaggagctgcaggcgctgtccggacagttcgacgccatctacttccacccggtgcgtgtccccggacacactcacctgtgcagacacacatgcacgtgcctttgagcgttcacagccacggccgccaaccccagccagtgtcccctggtccatacacatgacattgccctgcacacctgcctgctggcactgccagagcctggggctggcctgttctgctcagcagctggtgtcttgcagcctggcacaagtgtgggtatggcctgcaaagggcagcagggaaggcagggggctcatctgcgcccctgcgcccacagagtacctttcactgcgcgcggctggccgcaggggctggactgcagctggtggacgctgtgctcactggagctgtgcaaaatgggcttgccctggtgaggtgagagctgccccttcccctggctgctcctccgtgggtggccctgtgaggggccagggcgaccctgacgtgacccaaatcctactctcacgccgtaggcctcccgggcaccatggccagagggcggctgccaacgggttctgtgtgttcaacaacgtggccatagcagctgcacatgccaagcagaaacacgggctacacaggtgtgtgccaggctggctgcaggggggtgggcccaggccacacagcaaggggcagcgcaggaggcgagagaacccagccagcaccttcccatccctggccgggctcctggaggtgggaggccctgcccctttgccaccagcgctgtctgtacccaggatcctcgtcgtggactgggatgtgcaccatggccaggggatccagtatctctttgaggatgaccccaggtgagcaggggtgcggaaaccacccttccctgcagccccagtttttgggtgcacagcctggcctgggaaaatccaggggtgagatacagacatgtgctcaggggtcagcgttctacagggagctgtagagctgttgagggtcctgacctttgacctctggccctggctggctgttggcagcgtcctttacttctcctggcaccgctatgagcatgggcgcttctggcctttcctgcgagagtcagatgcagacgcagtggggcggggacagggcctcggcttcactgtcaacctgccctggaaccaggtgcccaccctcaagccccaggtccccacccagccccctccccctgggcccctcccctcccccacagttcaccctcaagccccaggtccccacccaccccctcccccgggcccctcccctgccccacagttcaggatgtagcctgggatgtcctgccaggttgggatgggaaacgctgactacgtggctgccttcctgcacctgctgctcccactggcctttgaggtgactgcacggagggctcccccagggcagccgggtgggagggggaccttgtgcctggagtgcgccagtgaaggcaggaggagggttatgagctgtcccactcctgtgtggctggggaaggtgctcaggaggggatgggatgggcctggctcgccctcacctgggctccagcccctctctgtcgaccctccccactccggcctggcctgtagtttgaccctgagctggtgctggtctcggcaggatttgactcagccatcggggaccctgaggtgagggccttgccttgccagggagggcttctggggtcctggggcccaggtcccccatcacacatggctctggttccaggggcaaatgcaggccacgccagagtgcttcgcccacctcacacagctgctgcaggtgctggccggcggccgggtctgtgccgtgctggaggtgactggggagggcacacagggagggtctctgggccagaggcctgggggtcaggagcatgggagccaggtgcccacggggtatttgggaggggcgtcctgcccgggatagagccaggcaggggctctcccggtgacatcccatcccagtgatatctctgccccaatcatgtctccaccctcctcccagggcggctaccacctggagtcactggcggagtcagtgtgcatgacagtacagacgctgctgggtgacccggccccacccctgtcagggccaatggcgccatgtcagaggtgcgaggggaggtagggcgggcagggccggggtgtgagaccaggtgtcacgactgttgtgtctccctcacagtgccctagagtccatccagagtgcccgtgctgcccaggccccgcactggaagagcctccagcagcaaggtcagtgtggccgggtgctaggctgcaggatcccacctcgggctcctgtgcagtggctatgactccgaactgtccctagatgtgaccgctgtgccgatgagccccagcagccactccccagaggggaggcctccacctctgctgcctgggggtccagtgtgtaaggcagctgcatctgcaccgagctccctcctggaccagccgtgcctctgccccgcaccctctgtccgcaccgctgttgccctgacaacgccggatatcacattggttctgccccctgacgtcatccaacaggaagcgtcagccctgagggaggagacagaagcctgggccaggtgggcagggctggcctggggagaaggatggggccgcatctacacctgtgcctgtgtgtgcctgacctgcggtcactccgtgtctgtgtgtccctctggtctgtccaccacaggccacacgagtccctggcccgggaggaggccctcactgcacttgggaagctcctgtacctcttagatgggatgctggatgggcaggtgggagcacctgggaggggttggggatgctgtggacctaggggcagggaccaggacctgccaacgagatgtggcctgtccagaggagggctgggtggtgcagaaccacatggatgtgaacattgccttgtgccaggaactgttcccagaacagccccaggggtggggatcactagtgtgtctgacctctgacctcagcttcttcagttaaatgctctttggcagagaggtgaagggggtgatttaaagtatacatttaggcagggtgcagtggctcatgcctgtaataacggcagtttggggggccaaggtgggagaaacgcttgagcccaggagttcaagaccagcctagagaacatatggagaccctgtcttcacaaaaaataaaaaagtcagccaagcgtggtggtgtgtgcctgtagttacttaggaggctgaggcaggacgatcgcttaagcccaggagtttgaggctgtggtgagctacaattgcgccactgcacgccagcctggctacagaacgagaccctgcctctctaaaaaaaaaaaaaaaaattatagacgtaagcatcttatttacagaaatggagtgattgaccttagtgtaagaagatgtgtggctgacagtagccgcagagacacaccgaatgaagggaactgtggatctgtttacctggcttgggagttggttggtgcctcattctccactgtttattcatcccacaggtgaacagtggtatagcagccactccagcctctgctgcagcagccaccctggatgtggctgttcggagaggcctgtcccacggagcccagaggtaagcctcacttggccatcctgagcctctgacggcaggacctgtgggcacccctatcctggctggccaagcacagagagttctgggaatggactctggacaacatgaacacctgtcctgaggccagctcttcttccaggctgctgtgcgtggccctgggacagctggaccggcctccagacctcgcccatgacgggtaggactctcaggtcttgcatatgtccagccatgcatgtggacgggcatgtgatggacgtgtgcctgggccccagggtgacgggtgggtggggcactgtgtggtactgaatggagccttcctcagctggggtgtgggagaagggctgctggaggcaatgccaggtgggtctccagcacagaggctcagcagtcacagcacccctgcccatggccccgtgaatgctcttccacctctgcctctgcggtttgggctcaggagggtgagcagggccttacacttatgcacctgtgtcctggaaggaggagtctgtggctgaacatcaggggcaaggaggcggctgccctatccatgttccatgtctccacgccactgccagtggtgagtgaccatgccacgcggcaaggcaggtgctggggagcccatggatgtgtacagctgctgtttgctggcattgtcatgatagcaggcctctggtccttcctgtctccctgctcctactccaggggccctgagattgggaggttgggaggccagagccagcaggtgtccgtagatgaggagctgggctctgctgtccccacagatgaccggtggtttcctgagctgcatcttgggcttggtgctgcccctggcctatggcttccagcctgacctggtgctggtggcgctggggcctggccatggcctgcagggcccccacgctgcactcctggctgcaatgcttcgggggctggcagggggccgagtcctggccctcctggaggaggtaagctgggcagggtggaggtgctgcggggtgggacgagggaaaggaccagtgactgcttccgtcttcgcccctggtccagaactccacaccccagctagcagggatcctggcccgggtgctgaatggagaggcacctcctagcctaggcccttcctctgtggcctccccagaggacgtccaggccctgatgtacctgagagggcagctggagcctcagtggaagatgttgcaggtgaggctgactgcggaggcatggccctgccctggggcctggctctgccgcacagatcggtggggagggcagggcaggggagtgccctgaaccagctccagcgccggaggccaactgcgcgcctcttctcggctcctcctgtagtgccatcctcacctggtggcttgaaatcggccaaggtgggagcatttacaccgcagaaatgacaccgcacgccagcgccccgcggccgcgatccggaccccaagcccacggctccctcgactctggggcacggaaccccgcccactcccaatccccgcgccccgccctctcccacccgtgcttcccccgctccacccctcacctcacctcgcccccgccccacccatcgcgccccggcccgtcccatcgaggcccatgcaacccacgctcggtcccgttccggcccctgcgccccgctgcgcttcgctccccgcccttgcgccgttagtaaacatcgctcaaacgaaa

SEQ ID NO: 8524 - DNA, 723 bp, Homo sapiens
aagtatgccgcggcccaggcctcaccaacttcacgcgctgccggcgttcccgtgacgtatttccggcgcgcccgccctagtgctcttcacactggcgcggctgtgacgcgacggaggcggcgagagcggcagccgtgggcactttccacgggtgaggcctggagaacgggtggacgtgcaggccagaacccgggacccacccggctgagcccccagactctccgctgcccacgaccctcggagtggcaccctctcctggccgtctcctctcgtgggtcccgaagaacgggtgcaaagccgagttcgtccgctgtactgcgcgggcgcgcgtttcgttcttcggttttgccacggttctgtgactccctaaaggttgagggctactgaattagaagaaacgccgagctggcttctggtgggctgccgggcgccgggcagcgtgcttggactggggagggcagggcgtgtttactctgagtagagcaaccgcaagacctcctttaaaaaataccagttctgagcttcggcattggagaggccgcctgtcattcagcctcttcggaccctctctcactccctgtcttccggagcgtgagtgaagcccgggtgaggtgttttcccacacgccgggggcccggagctgagaaggggcatggccagcatcacgcagctgttcgacgacctgtgtgaggccctcctgccggctgccaagactcacctggg

SEQ ID NO: 8525 - DNA, 2794 bp, Homo sapiens
acctggaccagctgaaggagatcatgaaggtgacggggacgcctccggctgagtttgtgcagcggctgcagagcgatgaggtaaggggtgagtggggagctgggtgggggtgggggcggacctgggccttggtgttggcccctcaccctttcttcccacacaggccaagaactacatgaagggcctccccgaattggagaagaaggattttgcctctatcctgaccaatgcaagccctctgggtacggctggctagtgtgggggccaccgggtgctggagtgtggggcctcccgtggtctggcctgatgcaccttcccccgcagctgtgaacctcctggagaagatgctggtgctggacgcggagcagcgggtgacggcaggcgaggcgctggcccatccctacttcgagtccctgcacgacacggaagatgagccccaggtccagaagtatgatgactcctttgacgacgttgaccgcacactggatgaatggaagcgtgagtggggggctcctggcacggcctgtgtggacccaagtggggggctctgggcagggcctgtgtggacctgtgagttgggggctccgggtagggcctgtgtggacccgtgagttgggggctccgggtagggcctgtgtggaccctgtgggccctgtgcaggtggccaggctcagagtcctagatccccatccctgggatgcaggtcaggtgaggaggatgggaggtcagggcagcatggggccgtgtggcctggtggagatgacctctggctggagctggaagttgaagggaagggtgttcctggcaggctcagcacagaggctggcacagaaggagccgggagtggtgaaaggcagctgtgagtcagggaaccagggcccacttagcccctcctggcccccagacctgctgcccttccgccatgtccaggccagagacctgggccaccctgacaccctcaccacgtccgcttgtccctaaggcctctctgctcacacctcctgaatctgtccttgcctctccttgccccatttttgttttttgagacggagtctcactctgatgcccaggctggagggcagtggcacgatcttgactcactgcaagctccgtctcccgggtacacaccgttctcctgcctcagcctcccgagtagccgggactacaggcgcccgccaccaggcctggctaattttttgtatttttagtagagacggggtttcaccgtgttagccaggatggtctcgatctcctgacctcgtgatccgcccgcctcggcctcccaaagtgctgggattacaggcgtgagccaccgcgcccagccctctccttgccccactttaggatccctcccccctggacaactgtatacccaagacagtccccagggcctcgcctgtctcccccagcccccgctaagcagtccagactccaaccccaactgctggggtccatcatcccctataccaggggctatcccctcaacttggagggctggccaaagcctgtgcagcctcaggctggactcagagaagcctccccagctcccgcagctatgctgcggcctgaggctgtgctggacctggcttcatttctgctccaggatggcaggctgtgtcttcttcatggctgcatgaccagcctggggtgggtgtgcccggggaaagtaggtgtacactgggagccgtgccatgtttcaggccctgtcctggctctgcctcgggtgcgggaccttggtcctccacactggctgggtggggctggatgggttgagattcacatgtgctccttacgaccacgggtccctgggtgcccgcagcagggcctccacccttcgctgtgtgcatattcgtgtgcttatgagtttggctttgtttgattaaaggtttctgctgctagaaagataacttgaaagccatgggccataggatcctctctgtagtccccacccacacaactgtggctgaggcctcagctcttaggacagaccgtggtggacatgtggccaagccctggccacctcccctttccctggaaaatccagatctagagcaatggcctcttcacacaaaccttctctcagtggttcagaccacattaggattagagaagggccccacgaggcaccgccaggcgtgtctgtgagcgactcccaggatggaaggcaaaggctgacccccctctctgttgtgcccgcccccccacccccgccaggtgttacttacaaagaggtgctcagcttcaagcctccccggcagctgggggccagggtctccaaggagacgcctctgtgaagatctctgggctccggggtggcagtgaggaccaccttcaccttccacctgagaggggactctcgttgccaccttgaccttggctggggcttgcatcccaaggcatccatcagagcagacgcccgggttccatggaccctcctccccacggccatgcctctgctcttgggcgcccatcatggaggagcacctgaactttctggacaagacctctggccgacctggggatggcctctgatccctggagcagtggcccacttgcccggtgctctcagaaacctcagagctggtggggctccagatcaggccttggcctctgagccctgcctgctctgggccatgcagaggaaggacagagggtgggcgcagggcaccaactcagggacatcccctctcctgggcgacgtcagtggaccttcctgcacccccagcctggaatgtaaatcagctgtgtggtgcccgcgtggctggaaggaaatagacccttttgtagctccctg

SEQ ID NO: 8526 - DNA, 384 bp, Homo sapiens
caagctagagttccctgacccaacgtaagggtgactgtgacacacatggataattttagcttcatgtttaagattttgttatttgggtaggaaacattccaaatgcagtttgaaacacatattaaaattgaggcacacaggaaagaactggctcaagtttagtccccaagttccttatagtaggaataggaatccttagagtataagcaatccatgcatagtattctgttatctatcatgtagatcatttaatctctaattttttggggtggggattctcttgtttctaaatcttacactttcagtttcttctgtgtcttaaatatagattattgactgttgtcttaaatactaataaatacattaaatgtatcttaaatacta

SEQ ID NO: 8527 - DNA, 697 bp, Homo sapiens
ggcgcatgttatggtcacctctgtgaggattacatcaggaaggacagtctccaaaagacatggacagaggaaatttagcagatgtccattaaatcaggatctcatacaagttataacacctgaatgtttgacttttcagagtattttgccatcacaggtgtggcatcttgcccttggatatatctacattctgctgtagaatgtcgtggtctttctgagggtcacatacatcctgtcttgtcataatgttaaccattaagagtcctcaggggcatggaattgaagaaggaactgttgccagcagttaactgaccaagctagagttccctgacccaacgtaagggtgactgtgacacacatggataattttagcttcatgtttaagattttgttatttgggtaggaaacattccaaatgcagtttgaaacacatattaaaattgaggcacacaggaaagaactggctcaagtttagtccccaagttccttatagtaggaataggaatccttagagtataagcaatccatgcatagtattctgttatctatcatgtagatcatttaatctctaattttttggggtggggattctcttgtttctaaatcttacactttcagtttcttctgtgtcttaaatatagattattgactgttgtcttaaatactaataaatacattaaatgtatcttaaatacta

SEQ ID NO: 8528 - DNA, 697 bp, Homo sapiens
ggcacatgttatggtcacctctgtgaggattacatcaggaaggacagtctccaaaagacatggacagaggaaatttagcagatgtccattaaatcaggatctcatacaagttataacacctgaatgtttgacttttcagagtattttgccatcacaggtgtggcatcttgcccttggatatatctacattctgctgtagaatgtcgtggtctttctgagggtcacatacatcctgtcttgtcataatgttaaccattaagagtcctcaggggcatggaattgaagaaggaactgttgccagcagttaactgaccaagctagagttccctgacccaacgtaagggtgactgtgacacacatggataattttagcttcatgtttaagattttgttatttgggtaggaaacattccaaatgcagtttgaaacacatattaaaattgaggcacacaggaaagaactggctcaagtttagtccccaagttccttatagtaggaataggaatccttagagtataagcaatccatgcatagtattctgttatctatcatgtagatcatttaatctctaattttttggggtggggattctcttgtttctaaatcttacactttcagtttcttctgtgtcttaaatatagattattgactattgtcttaaatactaataaatacattaaatgtatcttaaatacta

SEQ ID NO: 8529 - DNA, 495 bp, Homo sapiens
aatatttgaatgtttgatttttttatagtatcaacagttgtactgtgtaccagatcacatagtacagttttacatttaatctatattggcctgaaaagaacaacacaggcactttactcttaaaggatataataaactatagttatactgcattcatattcataccagcatgtagtatctttccctgcattcacagaagttttatttacaatgacaaaactaaagcctgaggatttgttttaaatctgcattgtggtagagaggaaaaagtacttttaaggaaacctgggttctagttttgtcattgtctttaattaaaccggttagtgatacatggtaagtcacttcattggcattttgtgtattcatcagtaagctagacaagatgatagctacagtttaagaatttctgtaaccattatacaaaactggtaggtaatattaaaggtattttcctgaaataataggaataaatactgagcactttgtatgcaa

SEQ ID NO: 8530 - DNA, 6743 bp, Homo sapiens
agctatattgatctcctgtacccaacggaagatagaaatgaccggttaagagattcttatttctttacctgtgagtgccaggagtgtaccaccaaggacaaggtaaggttgttcattgggcaagagcgctgactgcactctgatctcaggacctctctgctgaagagcttgtctgacttggcggatctcctctaggatctttttgaccctttaaaccctccttacaaagacagccaaagggaatctagttagaccaggtctctgttcagacctgctcctagtagctaaagaaaacatttccattacactgtacaaacaggagaaaggtctgccgaactgctctttcttgaaaagaaacaactgctcaaaggaggaggggggaaaagcacatgagtataatctctaggctttccaacctgttcaccagaatatgtggaagtttccctggcattttccaaattgttccgtcaatgccatccttccttattctagtctcttgattcgtagatgtgtaaacacatatatctgcccatagccaacacattttagataaggagtatctagaaaattaatctttttgttttgtttctgtaaaaaggtaatggagtactgaatttcttcagatgcattgcctgatttcctttcattcttttgtaaccttggaatgggccagtgtcgaccgctgtgtgggaatgtgtattatatgagaggtttccctatcagtgtggtttccatgggcggtaacgccttgcccttgtggacgtttccttcaggataaggccaaggtggaaatccggaagctcagcgatcccccaaaggcagaagccatccgagacatggtcagatatgcacgcaacgtcattgaagagttccggagggccaagcactataaatatatcctttacaactgccctgatagcttattatccctcgccaacaaggcaaggtgggaagttggaaagagggagcaggagaaggatggatttaagattctgaaaaccaaaggaggaatgtctcctagtaaatgtgtaaaggcgtactgaccacccacaatgtggtgtccatcctgttggagttgtatgatcttatttccccttattttggctagtttggctgggagccccatgtggtggaggaccatgaaggacagagccttgatggccttgtgctttgggtattttactttgggcagggcacagtgccaaggccttgcttatttcagctctcctcactggcacactctgagcagggactctgctcattcccatgcagcagatgaggaaacagcctgatagatattaagtaatttgcccaaaggacacagctgatggtgataggatctaggattttgtcccagctctatcagaatccatattcttaaccattgtattgtagcattttcttgggagttgaaaagggattcgatttgtactctaaagggtagaatttaaaaccagtgagaggaaatgagagaaaggcacattgtttctcagcataagaaagaactttgccacagtgggagtcgtgctcagggttccaacttgggtgaggatttgaatttgattagaatcgtgattttaatcaacattgtttacatcagaactaggggtctggaccctgcggctaaaattcttgagttgagcggttccgaccttcaggttttcttcatttgttttttctggagaaatgtaattcctttcacttttgcttggctttctgtaagttactttttcatggggtaagggtgagagtggagtggacgaaataactccttgaacccagcctggggaagcctccaggcagcttgggcccggtggccctttccttgactccacagcaccccctagtgagctgctggagatctgcgagctcagccaggagaagatgagctctgtgtttgaggacagtaacgtgtacatgttgcacatgatgtaccaggccatgggtgtctgcttgtacatgcaggactgggaaggagccctgcaatatggacagaaaatcattaagccctacaggtgattgcagaggctgttctaatcatccacggagtggaatttggttgtttagaatgtatacgatagtgtcatcttcctgcccattgctgagacttgcctagcgcagctgcctcttctctgcacccacatctggaggtgctggtgcagggcactgctcccgagtcaggcctgttctcaccaccatcccaaggagacaggttgaggttatgcagcggatactggggcaagatccctcccaggtccatccagggccatatccatagtagttaactcaggctagttttgagaagccactagtttgcttcttttcccacccactgcttccaagtttaattactaagtggtggtctcagaaaccctggttttcatcattactcacaccatccccttcttttgctttttcaaattacagccccagtttgcaaatggggaagctctgggaccagtgggttgaccgtggttatctaatctccccaccccaggtttggaaaaaagaaacaaaaattgctttttaatttgtagtaataatgaatattagccctggagagatttcctgcctgagagggttactaaacctaaaagtgggtgacagacggaagttgtggctttgtcctctgactcggactagacacttcagggctgaggtggcctagatgggatcactggagctctttttaaaggcactgatattatgcatttacagggtacgtccaacaccaagtgggccaagtgaatcagggtcgctgggcattagacccagaaatctgtgttctggaagcatcccaggtgtttctcaggagtttgagaagccctcagtctccttccacttccgagattagggtctgtgaaggttgtgtctggtctgaatgtccactgcccactccaccctctacttaccccactgtgccctgattagccagcagggggagcccaaaggaagccagctcttaaaatctgctcttggaaacagaatttgttaaattggggataaactcaaaccttccttttctcctacagtgtgtgaggaagtgcactggcctcatgcgcagttctctgtgtgagatctgtagggagagaggagcagacagacagcatcccagccctgtggttctcccagcagggccttgctctgctagacccatctttatctgcgtgagcccctcccggaagcccagctctggtcttctgtggggccgtgggtcccagggctgcctcctacccaggaatacagctagaacatgtctttttggactgactttcaggagacacagggtggaacagcctagcctttaaataaacacctcttacacacatgtaaacacacacactggctcacccaccagctgcctctgggccctgttcttagggaaatggctgtttcccaggcagaccccatcagtcagtcttcaggtacagccggagagaacacttgctgtatctaaagcccctgctggacaatggggaaagaacatccagaagacacaggaagtgttctgacttcagagcacttaactgttttgctaaaccaacccatatcatagtgtgacagaaagctggggtcttaagacacattggggtgggtgggggttgggtgggtggctgtatgtctgagtacctaaggtgataggcctaattgctgccttcataaatgggacatttacttcacaagctgttttcccagggtcttcctctgggtatgtctgaaatataaaaatctggactgggattgaagattgtgtttacaaatgcttttgaataggatttctcctgcagttgttacgtagcttttcagaaacacacaaactacaaataatgaacaacatctgcaatgattcggcagggtggcagcatccacgctctccacccaaaccctggtgggatttggagaggccgctggtgggcagaggttggccctaagcatggcagcctccggcttactgcacccagcctgtggggcggctcagtagccgtgacatggtggcctgttgtctcttctcttgttctagtaagcactatcctttgtactccctcaacgtggcctccatgtggttgaagctagggagactctacatgggcctggaacacaaagccgcaggggatgaaagccctgaagaaggtatgtctgtaactcggccttaggattcccagtggccagatggctccttagcgcacctccttcatgcctcaccaggctgaatggctgaagcagtggagggtgagcagctctcactcaccctcttgccgtgggagcagcgggggtgggtcctgcagggggggggggagtgagagagtgcacctctgctgtgtttgtgtccaggcctccctcatagggaatgggtgcccacatccagagggctggccgtgatcacaggcccagcctgtgcctggaggaattctccatttgtttgaccgggtgggatttgcagaatgatgatccccagttgtgaaatcaaggaggtaggatatggagagttagggttaggatgttagaattgcgcatttgctgtttctaaaatgcacttaatcatcctctcagttcattgaggaccagttacataccaagaccctcgtgtgcttttcctttgaattctcacaaaaccgagaggctttcctgatgaagaaagtgaggttcaagcaggtttaagtgagtaatagcctagggtacatggtggggccttcattcaaatgagggtctaaattgaaagcttcggctcctcccactcaagctgtgatgaaactggtggggagccagaaccctgggcagcattcgccttcggtttgatggcggccctgtgctgcccaggagccaggccccgaccctcacatcatgggaggtcagagtcatcatcctgagtattgattctcattgtttgtgatgtggaattcacagtcaatacagtgtaatttaggggatagtccatttactcctgtaagaaactttataaaatgctggggccatggacagggcctgcaggcctaatctttcaccttctccaaagtttcccaatagactatttgcgaagatggaataaggcccacatcccaaatagaagggtcagggcacagccaggctggaagggagcacagaacaaaattttctgttttaaaccatggaatttgtcttctgagaattagccatttgggtcacaactgcaaagtgtgtcaggtgattaagtaatagatcaatgaaagctggagcagatctgagcaaggaacatgagtcttgaaatgaatgcctgggcagagtcggcacctggaacaggtgatttccgaaggcttgcactgttacttggcctgcctcctcttggcttgagatctaggaggagaatatataatagataggaatgcctgtcatagtcacaggccattaaaaattctctgggggaatacttttttctctgagtaatttggctgaatacaaaagagcaaatacattcttagagatgacatttgatataaacttcctgtatgccaggcgctgttcgaaacactgtatctgaattaacaaccctgagaggtaggtattattccagttttacagttcaggaaaatgaggcacagagtggttaagtaaattacccaaggccacacagctaggaaatgattaaaccactggaaacttgaccattttacattgcctcactataaagaaaccttaagtacattctctagcatccctcaatgaaacctgctacctttcttttaagtttttagaatatgtattaaaaggaaagagtatgcttttcgaaagggaaaaatagtttagctacgtcttgcaggttagtaatgtcaactaaaaatcaaaatagctttgatataaaattcactatggactttaccagcatcacctattttctgggttgaacataataaaaaaaattagtccttaaagcatgttttactgaaagatctagaatcttggggcaagagaatgtcatgaaatcagtttcatgacatcgtttcaccagctggatatttttttgcagaatgttttacctagcagtagacactggatgagttagctaccagatggtcttctccttttttaaaaaaaaaccaaggccaggcacggtggctcacgcctgtaatcccagcactttgagaggccaaggcgggcggatcacgaggtcaggagatcgagaccatcctggctaacacagtgaaaccccgtgtctactaaaaatacaaaaaattagccaggcatggtggtgggcgcctgtggtcccagctactcgggaagctgaggcaggagaatggcgtgaacccgggatgcggagcttgcagtgagcggagatcgcaccactgcactccagcctggggcgacagagcgagactccgtctcaaaataaataaataaattaaaataaaaacaggtcctggtggagaacataggctctaatggccagtttgcatcctgtgccttaaagcagagagatccaacttaaagttaccctgggtggaggtgtgaggagattggcttctaggctctcattgtttgtcttgctttttcctaggccattgcaatcatggaagtagctcacggcaaagatcatccatatatttctgagatcaaacaggaaattgaaagccactgaaactatgcagcatttcagttttcatttaaacacttagttcagaaaccctaaaggatttgaatatttcaaattgcacacgtcactccagcatctctgtaaaataattggaatgaaaatacttcttgcacttaaa

SEQ ID NO: 8531 - DNA, 4986 bp, Homo sapiens
tccagatcaaaagatgtgccaccatttggcccaccgattcccaaaggtgtaacttttccaaagtcagccgtgttccgggacttccttttagccaaagtaatcaatgcagaaaatgcagcccataaatcagaaaagtttcgagcaatggccactcgaacgaggcaggagtacttgaaagatctggcggagaactttgtcacaaccgccaccgtggatacctctgtgaagttcagcttcattacgctgggtgcgaagaaaaaggagaaggtaaagccaaggaaggatgcccacttgtttagcattggggccatcatgtggcacgtgatagcccgggacttcggccagtctgctgacattgaatgtcttctcgggatctccaatgagttcatcatgttgattgaaaaggattccaagaatgttgtattcaactgttcctgcagggatgtgattgggtggacatctggattagtgagtatcaaagtgttttacgaaagaggagaatgtgtcctcctgtcctcggtagacaactgtgctgaagacatcagggaaattgttcagcgattagtagtaagtacatgttttctattttcccgccatccttatgttttcaattccagattcaaaataactttcactggggaactgctaccatgattataccaattagggaatgcattactatttgttacagatacagagcttaattttaaatgctgggtccttttggggagttgttgaatacatgaatggtggagaagcaaccatcataaatcaattggaaaagaaaagttaagccaacctgcaaaagagaacattaagatgtattttagtagcatttgaaggaaaaacagaagtgtctgggtagaatgtctgtttatggaggctgacataacataccttcccagtgggtaattaacaacagaattgctgttgactgtatgaatgacgagtcctatctgcagtttcacccctgcatgtttatacagcagctatttttgtttaatgtgccagattaaatatattattaatcttagagccacagtttcttaagggagtttttcagaattacacattaatttagaaaggcttttgaaaagttagacttaagaaagattttcatgtatgtgatttttagtgcaaaacccttatattttatccatggtgttcagtagtcatatttctgctcccaattttaacaaagtaagaatcagattttagtttgagcatataaaataaagtagtaagaataaatcaaactacttctagtttttatttttggtaatataagaaaaaaacatgctttgacaatagaatttcttgtgtgtaaatcttcccccaagagggatgtaattttttttttaattagaaaaggtttagttcactatggatcatgagaaaaggagaaattatatccatttcttgccccctttcctcccaccaaaaatatttcctcccttttgttattagagaccatgtataagagaaggtaaaatcagggcagtgtctgctagccttggaaaagtaatttcattatttgtggactctgtttacagtaaagggcctcagtgtgttcaacagtattatcaggtatacgtgagcaagcctagataagagtttggggtgattaagtaaatgattagtttatatacctagagaattgacttgaattatactggtgagtctctggatgcattctgcttttgctaattgcaaatacttctttttagcatatccaccaaatcattataatctgtgcttctgaaaatacaacacaaataccacttcaccaaccacaaaaatgtactttccctggatatttacacatgggcttttatacatttgctattcgatggactccatcctatttcctagaaaagtgtattgtcagtgtgaccaagatgcacaatattacaaatatattttaggaattatattctgtgtctaggatgacttgcaacatgagctgttggaaacaagccagaccaaagactgttgaagggattagatcgtaagggttgatgcagagtggtagtaacagaaatgggaagaaagagaagaatgcagtcttagtggagatgttgggaatgcctgcccgtttggcagatggttaactcagtatccattctcaggtggtggaaagtggaactaaagggtctgtcttgcaggtaacagtacaggagcagaatgagagtttgttcctagagggccaggcagggctcacttcacggatgtgcaacccatgcagttgcacagggacccgctctcagaagagttcgtgcttggttgaatgctctgccattgccatcttgaaatacttactaattttttcataaggagcctcgcattttgatttttcttgtggccccacaaattacatagccagtcctggcttggagactacaattttcgtgtgataattgggtccatggaagaagtccaaatacatggagaacaccttacttcagactttggggatgttaggaagcaataaacagaggggataaagaaatagcaaaaagacaaagtaggggaggtggcaggtgattggaggaaatgagcagaagagccagagctggaggactctggaaaggctcagccaataactcttcagcctgatacatggatgataaacttcacctgataatcgcattgatatttgaaagaaggctgggtacatcttatgtgtcgtcttttgataggattgcttagaacaaagttgaaaaagaagtgaccaaaatttatttgtgttgtgcctattacagaactacttcttcaagttttagttacttcagttcatgactttagaaacgtcaatattctaaaacatcatcactaactaaaaccagcagtcccctttccgcattttgctgagtcgtgaactgtcatgcctgtctgggaaaagctgattggcattgtgtgcacttgtggtaaccatggaaacatcagacacagtggtgatacatgaaccagccccagtcccacagctgtacttactgtcataggtcttattaaataggtatctatgtagtcagagcatgtttcatagaaatggagtgttcattaaactgaaacttcatacattgcctctgggcttttggggataggagtatgatacctcccaacttgaaattcccacagataggtgaggtcatagtcatcgggtgatacttaatgagcccatgtttttctttcattggatgtaaactatgctcggtgagtgcttttgagggctgcattagtggtgctttaatgtaccaagtgggatgcaatccaccattcttctttcatgttcctttttgtggaactgctgttgactctctctcactcttgagtaaggtacatacactgaggcttccattgcttggggctgccctcagcccctaggagacaggcctagtggaggagaggcagcccataagcacagagggtctgtctgctgcctgccagagcaccatcctacacacttgccttgtgaacagatggccaaggagtctggctggcctgcccccaccatggatctgagtggtcctcaccactcaggcaagcataggcagttgtctgtcctcaagagaaggaccctaggggacagaacactccacagtatgtccctagggctggtgcgtagagaacatttagagttttcctaaagctctgactttctgccactgcccttcctgaacctcagagtgggctcttaagcgttagctttcaagtgctttggggtgtttttctttgcttgggatgaataaattgtctcatggtttttagtgcttgctggttgaaacttgtaatggtccacaaagtctttacaggttttccattgcaaaaatccatctagaacgatgggatttatatgcttaaaagtcaagtcaatttacctaataaaggaaaaacgggaattatctgagcccatctgaagctctcaagctctgggtcagtgacatctaagaaagcaggacacctgtatcaagaacagatatgacttagaatgaagaatgaaaccattgctttgcttctgttattttctttgcacttgatgcaaatgttaattgtgatcagctctgaacttaaatgtgtccttgtcctgtcacttggacagtttgaggaaaaggcagagagagacaggctgggctgcgagggcccaagggagagggctggcatggaggcccatacgtgcacctttggcagagccccatggcagcttgggcaggaagggcatctctaacagtctccttcccccttagatagtgacgagaggctgcgagactgtggaaatgaccctgaggaggaacgggctgggccagcttggcttccatgtgaattttgaaggaattgtcgcagatgtggaaccttttggctttgcctggaaggctggccttcgccaagggagccgcctcgtggagatctgcaaagtagccgtggccactctgacccacgagcagatgatcgacctgctccgtacttctgtgactgtgaaggtggtcatcatccagccccatgatgacggctcgccccgaaggtaaggcgtgggaggcccaagtaatgctcactcctcctttgcctctgtagcaggtggctgtcctcagtgctcctgcaaggtcctcagaaaatgcagtcaagtgtgtctttgtacagtgttctgggatgtcactcatttgtacaatgttgttgggatgtcactcgttcgaggaattgaaaaggagctttaaaatatgtaatagatgataaaaaataatttgctaagcattttaatggaacattgactacattaaagctgagctattctgaactaaggggaagagcacctgcctggttcccctggacctcttatatctaagaggaaataattctgtatcacagctcagccttgagcacattaaatacttaactattcagttagaatttcttcccataacatgaagccattgattatttaaaaaatatttaacagaccaatagttgtaggtatgaaagaatgttggaaca

SEQ ID NO: 8532 - DNA, 312 bp, Homo sapiens
ttttgtttttgtttctgtttttgtttttttgagacggagtcttgctttgtcgcccaggctggagtgcagtggcgtgatctcggctcactgcaagctccgcctccgaggttcacaccattctccttcctcagcctcctgagtagctgggactacaggcgcccgccaccacgcccggctaatttttttgtatttttaatagagacggggtttcaccgtgctagctaggatggtctcaatctcctgacctcatgatccacccgcttcgacctcccaaagtgctgggattacaggcatgagccaccgcacctggcc

SEQ ID NO: 8533 - DNA, 893 bp, Homo sapiens
aagctgggaccatcttaaaagaaaaaaaaaaaaaaccctgctagatcagaacacacattcagaaagtgaagtcaggctttaaaagggcagaaactgcctctctattgcattgccttaagcaactccaatattgttaaaaatcagtgtaaaactacttcttctgatggctccctactggcattcaaactagcctatcttccctggaatcaattttcaaaaaccatgtttcctttctcaccattcccaacaatcttattttctcttccttgagatgaatttttcagcttgctgtttttgattcagtggataatattaataaggcacaaaagtcatttgatgcctaaaaactaaaatccattatatctgtggggtgtgtgtgcatgtgtgcgaggggagtaagagggagagagagaattgtttactggattgaactgattctcttttgtccttcagagcgaccgtgaggtcagcagggattattatctccatttgacagccgaggtaactggctcagaggctttgagtcagccttaaaattgcggctccactggcgactctatgaatgacttgagctcggtacttaacctctctcagccacagttcctggcctcccacctggggcagacagcgcctacctcccaggatggctgtgagaattaaacgaggcaactcctggaagttcccagcacacgcctggcaggttgagcaggcgctctcttagctaagggatctgcttccacacacctgccacaaaaccctcacatttcaacctcagcaaaaccatcatcaatggatgccacgtcatggaacttctgaatagtctgaacagtaaaaaccacaaatgttaaaactgagattgtttggcactcatgtataattataaatatggtgct

SEQ ID NO: 8534 - DNA, 893 bp, Homo sapiens
aagctgggaccatcttaaaagaaaaaaaaaaaaaaccctgctagatcagaacacacattcagaaagtgaagtcaggctttaaaagggcagaaactgcctctctattgcattgccttaagcaactccaatattgttaaaaatcagtgtaaaactacttcttctgatggctccctactggcattcaaactagcctatcttccctggaatcaattttcaaaaaccatgtttcctttctcaccattcccaacaatcttattttctcttccttgagatgaatttttcagcttgctgtttttgattcagtggataatattaataaggcacaaaagtcatttgatgcctaaaaactaaaatccattatatctgtggggtgtgtgtgcatgtgtgcgaggggagtaagagggagagagagaattgtttactggattgaactgattctcttttgtccttcagagcgaccgtgaggtcagcagggattattatctccatttgacagccgaggtaactggctcagaggctttgagtcagccttaaaattgcggctccactggcgactctatgaatgacttgagctcggtacttaacctctctcagccacagttcctggcctcccacctggggcagacagcgcctacctcccaggatggctgtgagaattaaacgaggcaactcctggaagttcccagcacacgcctggcaggttgagcaggcgctctcttagctaagggatctgcttccacacacctgccacaaaaccctcacatttcaacctcagcaaaaccatcatcaatggatgccacgtcatggaacttctgaatagtctgaacagtaaaaaccacaaacgttaaaactgagattgtttggcactcatgtataattataaatatggtgct

SEQ ID NO: 8535 - DNA, 256 bp, Homo sapiens
ggtttgttatatttatttctgtgttactttcctcctttaccatccctctgtggacctagctggttttgctcatagaagttaaaagctcttagattctctttgagtaatgacaacggctggcattcagctaacaggccacggcatcctgaatccaagttcatctctgggcctgtcccctaaaagagttaagtgcagaaacagcctctcagaaagctctgggactgcctgaccttagcaaaggacaatctgtctgctc

SEQ ID NO: 8536 - DNA, 4311 bp, Homo sapiens
taaccattccttagctgttttggcatctgctctgttgtcaccacctccccacggcacgggtcagggtctgtcacagcctcgtggccccacgcacttcacctagtacatgcccctgctggataataaggtttgtgtgtgactgatgtgggggatatctttggccagtggtggcatcccctcaagactttgtctcgaatgagggtgggtagggcctgtgtgtgtctgtcttggtcattgcagtcttgaccctcgttctccctgctccagaaatccttgcggacggaatggctaagcccagagctagggccaagtcaggcagggcttctgcattggaaggggcttgagagggttgggggcttcaccatctcacctctcccctgcccttctctcatccatctgcaggttcatcatgcctagtggcgtataagaagaccccgccaccggtccctccacgcaccacttcaaagccgttcatctcagtcacagtccagagcagtactgagtctgcccaggacacctacctggacagccaggaccacaagagcgaggtgactagccagtcgggcctgagcaactcgtcggacagcctggacagcagtacccgaccgcccagcgtgacacggggtggagtcgccccagcccctgaggccccagagccacccccaaaacatgcagctctgaaaagtgaacaagggacgctgaccagctctgagtcccaccccgaggccgcccccaaaaggaaactgtcatcgataggaatacaagtaggggctccttttgcactctgtgtcctcagcccactccgtgcacctgcctgtgtgtaattacatctggtagaggcccactaggtctcctgggaaaaggtggtttgtctctctattttgggggatcagcccccaagtggccaaaccgaattccacccatagccacgcctcgctggtatctgtccacacgtgctgctggtcagcagctgtgggcatgtgtttctgctcctccagtgggttgtcccagtgaatgtagttacactcagccagccatctcctgtccactgtttgcctgtccactgtctgtctgtccactccaccctttgccctgccagctgacccgtgggaggcgggactggcctaacagttctctaatccaaggtcagctcgggtgcggaggccatagccccgcttggcggcaggagcagcatggagcatagacgctgttgggccaggggcccaggacccagggcccttgagccatgggggttgctcgaggggaactttgcccagagccctctcgggccttggggacaggtaggtggcttgaggtaccaggcccatgtcattgagaagggtgatgccggtctcactgcctccctccatgggatagggtccaggcgatggttccccagggttaggtggccaaagtcagcaggccctccatagtcatggcacacagcagggccaggtgtgccagcttcccctccactgcttcattgcactcctgcatgcacccgatgtcaataatctgtcttgtttgctgagctggggaaacttgggccctgccttgtagtttttaagagtttctctaaatccagattgagtggactctccctgccctggctggacctgcagaccaaactagggcacgttcagagccatgagggaggggcagctacagtgggtgagggcgagaggggagacagggcccccccaagcccaggggttgagtcagggaggacgaggcattgtgtgttgtggcacaggctgcaagggactcctccagccacccctgagcaattggatgtggcccagctgataacaaagcactggaatgcaggagcgtgggacacaaagtggagcttgaatggaacagagaaggctcactgagcaatttcttgcagttgcctgtatttgtttcctccaagaggcagctctaggcttccacttccccatgtataaacagagagagagttggccaggagactctgctgctgttttctgggcttcttaagtgtccagtccctgcgctgcacaggtgggattctcagaaacacagagagtagcctgatcttcaacccttggtcctgaccacccatatctttgggcagccccaccctcttgctggccaaaccagacgctcttatcttcccggaaagcctaagagttaggactacccttgattcctttcacccagaaaatgacaccgggataaggactctcttaggcctgtcctgggcgtcccattccctggattcaccccagccccattcttggtctcattgcagctccttggagatccagtggtgctgcattccttgagccggcttttgccgaggggaaatgtggctgcatccctgtcccagaaagcttccctggcccctacttctctccacaaggccaagagactgaagagtccccagtttctgaggatgccctgaacccttggtgcctcatgccctagattgagtgtgggtttctccctcattcttgagtgatgataggaaagctggcctggctgccccatggcccgggacctttgtcccagagaagaaaggcaggcgcagggcatcactgttgtcctgttccacttcacaggagtggagggagtgacagctttccacttggccctgaccccagtccttcctactgctccccagggccacccagtgctaaaggtaacctcagccaagtgtgaataacgtccagggacttcggtggctcctgtgggtggcagtttctgaatctagaactgccgtccagggtttgcccttagtgcaggcgcctctggcctgccctccaggtttctgccacagggttcagggagtgatctttgcctcaagacagccgccagcttcaactacaccagataacggctgtggctttgtgtgtgtgtgtgtgttttctttctctttcgtcgtcctttttttttttcctctctgatgcgtgtgaaggagaggactagaaggaacggttcccacctctcggaggacaacggacccaaagcgatcgatgtgatggcaccctcctcagagtagggaaagccagtcatctccaccccatcccacctcccgcccacctgcccgcccgcccgcctgcccgcctccacgcgaatgagcagtgcccggcttaacctggtccggcctcgggcccacgtgcagtgtccgcatgcctcgtgtctgtctgtccacacgtccgtttgcgtcgtcccactaatgtgaatttcagcagcaagtgtggtgtttgttttttatttttgtctttgtctccgtgccgttgctgtcgttgtccttcaataaggttgactgcattcagccagtgccaaaagaggagcccagtcccgctaccaaattccagtccatcggggttcaggtagaggacgactggcggtaagtcggacagaggtggcggctgcttctcccctctcctctccctccctccgctctcacctctcctgctctccctaacccacttctccttgctggatttctaataaccaagctgggtttgggttgcgggtggtggcccaggcatgggaggctgggcaggggcgggcgggtggacagatgagcatttgctctgtgagaccagtcacccacgggggccatggctgggccaggacatggcgtcagctgccctgatgctggtggtcttcctggccccactgcagtaaacaggcaaccttatgaccttgtcctcgtgtgtgtgtgcgtgtgggcttgggcgggatggggcaagggctgagccaagaatgagatgggggctgtgggacccgcttcaggcgcatggtgagcagatgatgcatccgtttctctgtctcccgtgtgtccgggtcaaggcggcctctggtctctggccctcttggtgactcactccttcctgtccccaccccatccaccccctacccacagaagcagcgtcccctctcacagtatgtcctcccgacgggacacagactcggatacccaggatgccaatgactcaagctgtaagtcatctgagaggagcctcccggactgtacccctcaccccaactccatcagcatcgatgccggtccccggcaggcccccaagattgcccagatcaagcgcaacctctcctatggagacaacagcgaccctgccctagaggcgtcctcgctgcccccacccgacccctggctcgagacctcctccagctccccagcagagccggcacagccaggggcctgccgccgagacggctactggttcctaaagctactgcaggcagaaacagagcggctggaaggctggtgctgccagatggacaaggagaccaaagagaacaacctctctgaagaag

SEQ ID NO: 8537 - DNA, 32204 bp, Homo sapiens
taaccattccttagctgttttggcatctgctctgttgtcaccacctccccacggcacgggtcagggtctgtcacagcctcgtggccccacgcacttcacctagtacatgcccctgctggataataaggtttgtgtgtgactgatgtgggggatatctttggccagtggtggcatcccctcaagactttgtctcgaatgagggtgggtagggcctgtgtgtgtctgtcttggtcattgcagtcttgaccctcgttctccctgctccagaaatccttgcggacggaatggctaagcccagagctagggccaagtcaggcagggcttctgcattggaaggggcttgagagggttgggggcttcaccatctcacctctcccctgcccttctctcatccatctgcaggttcatcatgcctagtggcgtataagaagaccccgccaccggtccctccacgcaccacttcaaagccgttcatctcagtcacagtccagagcagtactgagtctgcccaggacacctacctggacagccaggaccacaagagcgaggtgactagccagtcgggcctgagcaactcgtcggacagcctggacagcagtacccgaccgcccagcgtgacacggggtggagtcgccccagcccctgaggccccagagccacccccaaaacatgcagctctgaaaagtgaacaagggacgctgaccagctctgagtcccaccccgaggccgcccccaaaaggaaactgtcatcgataggaatacaagtaggggctccttttgcactctgtgtcctcagcccactccgtgcacctgcctgtgtgtaattacatctggtagaggcccactaggtctcctgggaaaaggtggtttgtctctctattttgggggatcagccccaagtggccaaaccgaattccacccatagccacgcctcgctggtatctgtccacacgtgctgctggtcagcagctgtgggcatgtgtttctgctcctccagtgggttgtcccagtgaatgtagttacactcagccagccatctcctgtccactgtttgcctgtccactgtctgtctgtccactccaccctttgccctgccagctgacccgtgggaggcgggactggcctaacagttctctaatccaaggtcagctcgggtgcggaggccatagccccgcttggcggcaggagcagcatggagcatagacgctgttgggccaggggcccaggacccagggcccttgagccatgggggttgctcgaggggaactttgcccagagccctctcgggccttggggacaggtaggtggcttgaggtaccaggcccatgtcattgagaagggtgatgccggtctcactgcctccctccatgggatagggtccaggcgatggttccccagggttaggtggccaaagtcagcaggccctccatagtcatggcacacagcagggcaggtgtgccagcttcccctccactgcttcattgcactcctgcatgcacccgatgtcaataatctgtcttgtttgctgagctggggaaacttgggccctgccttgtagtttttaagagtttctctaaatccagattgagtggactctccctgccctggctggacctgcagaccaaactagggcacgttcagagccatgagggaggggcagctacagtgggtgagggcgagaggggagacagggcccccccaagcccaggggttgagtcagggaggacgaggcattgtgtgttgtggcacaggctgcaagggactcctccagccacccctgagcaattggatgtggcccagctgataacaaagcactggaatgcaggagcgtgggacacaaagtggagcttgaatggaacagagaaggctcactgagcaatttcttgcagttgcctgtatttgtttcctccaagaggcagctctaggcttccacttccccatgtataaacagagagagagttggccaggagactctgctgctgttttctgggcttcttaagtgtccagtccctgcgctgcacaggtgggattctcagaaacacagagagtagcctgatcttcaacccttggtcctgaccacccatatctttgggcagccccaccctcttgctggccaaaccagacgctcttatcttcccggaaagcctaagagttaggactacccttgattcctttcacccagaaaatgacaccgggataaggactctcttaggcctgtcctgggcgtcccattccctggattcaccccagccccattcttggtctcattgcagctccttggagatccagtggtgctgcattccttgagccggcttttgccgaggggaaatgtggctgcatccctgtcccagaaagcttccctggcccctacttctctccacaaggccaagagactgaagagtccccagtttctgaggatgccctgaacccttggtgcctcatgccctagattgagtgtgggtttctccctcattcttgagtgatgataggaaagctggcctggctgccccatggcccgggacctttgtcccagagaagaaaggcaggcgcagggcatcactgttgtcctgttccacttcacaggagtggagggagtgacagctttccacttggccctgaccccagtccttcctactgctccccagggccacccagtgctaaaggtaacctcagccaagtgtgaataacgtccagggacttcggtggctcctgtgggtggcagtttctgaatctagaactgccgtccagggtttgcccttagtgcaggcgcctctggcctgccctccaggtttctgccacagggttcagggagtgatctttgcctcaagacagccgccagcttcaactacaccagataacggctgtggctttgtgtgtgtgtgtgtgttttctttctctttcgtcgtccttttttttttttctctctgatgcgtgtgaaggagaggactagaaggaacggttcccacctctcggaggacaacggacccaaagcgatcgatgtgatggcaccctcctcagagtagggaaagccagtcatctccaccccatcccacctcccgcccacctgcccgcccgcccgcctgcccgcctccacgcgaatgagcagtgcccggcttaacctggtccggcctcgggcccacgtgcagtgtccgcatgcctcgtgtctgtctgtccacacgtccgtttgcgtcgtcccactaatgtgaatttcagcagcaagtgtggtgtttgttttttatttttgtctttgtctccgtgccgttgctgtcgttgtccttcaataaggttgactgcattcagccagtgccaaaagaggagcccagtcccgctaccaaattccagtccatcggggttcaggtagaggacgactggcggtaagtcggacagaggtggcggctgcttctcccctctcctctccctccctccgctctcacctctcctgctctccctaacccacttctccttgctggatttctaataaccaagctgggtttgggttgcgggtggtggcccaggcatgggaggctgggcaggggcgggcgggtggacagatgagcatttgctctgtgagaccagtcacccacgggggccatggctgggccaggacatggcgtcagctgccctgatgctggtggtcttcctggccccactgcagtaaacaggcaaccttatgaccttgtcctcgtgtgtgtgtgcgtgtgggcttgggcgggatggggcaagggctgagccaagaatgagatgggggctgtgggacccgcttcaggcgcatggtgagcagatgatgcatccgtttctctgtctcccgtgtgtccgggtcaaggcggcctctggtctctggccctcttggtgactcactccttcctgtccccaccccatccaccccctacccacagaagcagcgtcccctctcacagtatgtcctcccgacgggacacagactcggatacccaggatgccaatgactcaagctgtaagtcatctgagaggagcctcccggactgtacccctcaccccaactccatcagcatcgatgccggtccccggcaggcccccaagattgcccagatcaagcgcaacctctcctatggagacaacagcgaccctgccctagaggcgtcctcgctgcccccacccgacccctggctcgagacctcctccagctccccagcagagccggcacagccaggggcctgccgccgagacggctactggttcctaaagctactgcaggcagaaacagagcggctggaaggctggtgctgccagatggacaaggagaccaaagagaacaacctctctgaagaaggtgggtgccacatggatggtccttgggcaagggtagaaggtgttggcagctggtttcagctggtggccagcagcttccgaacttctgagtgggggtctcttaggttctcttcttgggctagtttttgagctcccttcttactttcttcgcattcttccatccatccacctatttaaccaaacctctttccagaaagggttgctggtgatagctgtttgttgtgcaggctgtgaggccacccacacctgggtttgaatcccagctcctcccttactagtgaagtaaccttggtcaggttactccgagcccccatttcctcatctgtaaaatggagctaatcctctgctcactatatgagcatgttgtaaggattgaatgtggtcgtgcatgtgaagggcctgatgacctgtcagacacagagaaaagtgggagcctaattatgccttcaacaacttttttttttttttttttgagacggagtcttgctccatcacccaggctggagtgcagtggctcgatatcagctcactgtaaacctctgcctcccaagttcaagcaattctcctgcctcagcctcctgagtagctgggactacaggcacgtgccaccacacctggctgatttttgtatttttagtagagacggggtttcaccatgttggccaggctggtctcgaactcctgacctcaggtgatccacctgcctctgcctcccagagtgctgggattacaggcgtgagccaccacactcagccaacagcttcttactgagtgcttcctgtgtgccaagcaccagggatccaactgggtctcaatagggtgtgaagaagttatgcttttattttctacttaagtttctacctatatcatgccaatttccaaaaattcccttgagaaattagttcaagaaagtgctagacacgtgtagggagcctagattcacaggtggttggaggggggttgggtggtggaaggcaggtcctgggaagctccaggctgttgacctgcacccacctggttcacctgtggctctggttcccattgagctactcctccacactcaggaaggacaggtcttcagagtgtccaaatggtttgacacacatcccatacatgatggagggggccctgaggacagcagcctttgatgatgcagaagactcatcagagtcattgttttcactgtcctctaggccagttccccgctttgatgtcacacccactagtgcaggggaactgttgtgaggaaagtacctagtaactttttacaataatagtattttaaaaaatcaaaacagagacaaggatcagagagcattaaaaggcttctaagagaaaacatccagcccaccgccctacctgggcctttccccactttcagtttttactagctgtatattctggtatttgtcttcatatatcttttaaaaaatgtgactgattatatttcctctttaaaattaatcatcatttctattaatttcctgttaccattggcatagatgagtgtttagctctcacacaacctctgtctccctttctcccaccctctgtgtacatcacagtttatgataaatagtaatcagtgtttctgtttactatgagtatgtaaatattgtttattgcagagcctaacagtatattattattgcgttttcttctttttacattttgtttttcctaaaacgaattgtttgccctgttgccacatttaaaaaatacactccatttgctaaattttaaaaaaattttttaagagacatggcctcactctgtcatccaggttggaagtgcagtggcataagcatagctcactgcagcctcaaactcctgggccgaagtaatcctctcacctcagcttcctgagtagcaaaggactaccacagagtgccaccatgcccagctaatttttaaatttttttgtagggacaaggtctccctgcgttgcctaggctggtctcaaactcctgggctcaagccatcctcttgggttggcctcccaaagtgctgggattacagacgtgagccaccacacccggacaacaatttctatataaatataaaaatgaagttaaaaataattttccctcagaatcttaaaggcaccatcattttttttatttttatttttttgagacagtcttgctctgtcgcccaggctggagtgcagtggtgtgatctcagctcactgcaacctccacctcctgggttcaagtgattctcctgcctcagcctcccgagtagctgggattacaggtgtgtgccaccatgcccagctaattttttgtatttttagtagagatggggtttcactgtgttggccaggctggtctcaaactcctgacctcagataatccgcccggcttggcttcccagaatgctgagattacaggcatgagccaccatgcctggccaccttgtattaatttttaaaagtaattttctcacttctatttgttctgttgtctggctctagaatttctgtcagttagttgctgtacctgctgtgtggatcctcaggctctcaccttttcttcctcatgttttttgttggacttcctcgaaggttttctttttcttttctctttttcttctgccctgtgatggctttactgagatataattcacataccacaaaattcacccttttaaagtacacatttagtaaactcacaatggcacttagtgtattcacagtgtggtgcaaccatcactactgtttattttaagaacatgttcattgccccaaaaagatgctctctgctcattaggagccgctcccacagccttaggcaacctctaatctttctgtctctggatttgcctattctggacatttcatataaacagaatcataccatatatggccttttttttttttttttttttttttttgagacggagtctcgctctgtcttccaggctggagtgcagtggcgcgatcttggctcactgcaagctccgcctcctaggttcacgccattctcctgcctcagcctccccagtagctggaactacaggcgcctgccaaccacgcccgggtaattttttgtatttttggtagagacggggtttcaccatattagcctggatggtctcaatctcctgacctcatgatccgcccacctcagcctcccaaagtgcaaagtgctgggattacaggcgtgagccactgcacccggccccatatttggccttttgtgtctggctttcacttggcatgtttttgaggttcatccatgttgtagcatatgccagtatttcattccgttttgttgctgaataatatttcatttcacactacattttatttatccattcttctgttgatggacatttgggttgtttgtactttttggctattatgaataatactgctagaatattcatgtacaagttttttatggatgtatattcatttcttttggagtagaaatgctaggtcaaacttcgatttttgttttcctttttttgttgtaaaatatatataacataaagtttaccttttaactgtttttaagtgtgcaattcagtggcattaattatattcacaatattgcactaccatcacaaccatctatttccaaaactttcatctaaaacatagaatctacctattaaacagtaattccccattatcccctctgcctagccgctggtatcctctacttgctgtgtctgcgaattttcctcgtccttttgtgtttggcatgttttgaaggttcatccatgttacagcattttcatttttatggctgactagtattccattatgtgtacaatatataccacattttgttcatctgttgctgggcacttgggttgtttccaccttttggctattgtgagtaatgcagctatgaagactggcgtgtttgagtacctgtttttaattctttggggagtgaaattgctaagttatctggtaacgctatgtttaactttttgaggaatggctgaactgctttccatagaagctataccattttacattcctaccagcaaagcacgaaggttccagtttctccacatcttcaccaacacctgttatcttctgtcttttaaaaaaattctagccatcctaacggccatgaagtagatgaagtaatatctcattgtcattttgatttgtatttcccttatgatattgagcatcttttcatgtgtctgttggtcatttttatgtcttcttggaagaaatggctaaggccttcgcccattttttaattgggtggtttgtctttttgttactgagttgtaagtcctttatatattatgggtgctagaccctcatcatatatatgatttgcagatactttctcccattctggagactgtcttttcactttcttcctggtgacttttgatgcacacaggttctttttttttttttttgagacggagtctcgctctgttgcccagactggagtgccgtgacgtgatcttggctcactgcaacctccgcctgctgggttcaggcaattctcctgcctcagcctcctgagtagctggaattacatgtgcgtgccaccatgcctggctaattttttgtatttttagtagagacggggtttcaccatgctagccagggtagtctcgaactcctgacctcatgatctgcctgccttggcctcccaaagtgctgggattacaagcatgagccaccacgcctggctgacgcacaaaggttcttagttttgatgaagtccattttttccttttgttgcttgtgtctccacttatttttttaaattatgagcatatattaataaaaatttaagataaacagttgaggcactgagaagctgactggcagttttgtgtgggtagggcttgttttaagtaggctttctatggaccccttcttagaatagtggttttaggctgggtgtggtggctcatgcctgtaatcccagcacttttcgaggccaaggcgagaggatctcttgagcccaggagttcaagaccagcctggtcaacatagcgagacccccatctctatcgaaaatataaaaattagccaggcatgatggcatgtgcctgtcattccagctattcgggaggctgacaagcggggaggatcacttgagcccaggaggtcgaggctgcagtgagccaagattgggccactgcactccagcctgggtgacagagtgagaccctgtctcaaaaggaaaaaatcataaggaagagaaaatatacttactgttcattaagcagaagtggatcgtcataaaggtcttcctccttgtctccacattgagtacactgaggaagaggaatggggaagaggaggaatgttggtcctgctgtctcaggggtggcagatgggaagaaaattgatacataagtagatctttgcagtgcaaacctgtgttgttcaagggtcagctgtatttcaccatatattcaatataaaactattgcaatatcttatattccttttcatagtaagtctttaaaacttagtgtatattttactcttacagcacatcttaattcagacaagcaacatttcaggtgcttactaacgacatgtggctagtagctgctgtattgagcacagattgagacagtaagcctggggcagggtgcacagattgcttcatgccaatagggtgattctgtggatttgattccctttaactttcctttactatacttaattctagttatttctagagcaagaagatgtttgcctgcaaaggaaattatgtcataccaaacgatattggtattaccttcctgtctacctgggagggaagaggtcttttatgatgtttctggataaccacaccagaactcctgcagttgaacatgaactctagagggggcccttttcatagccctgtatcagttactgtaacttacagacagatggagtcacatagctcatgtcccttatccaaaatacataggtcagggaactcagcagtgcccacccacccaggtggctgcctgtattgactgaattttgcattgccctcttgtctaaacctgaagaactttaaacttgacaatgttcttttcagataatttatttttctgaattgtggttaaatatatataacatgaaaattaccatttcaaccaagtttacagtctgtggcattaaattcacactgttgtataaccatcaccaccgtccatctctagaacttgttttgtcttccccagctgaaattctgtacccattaaacactaactccccattccctcctacccccagccactggcagccaccactctactttgtctctatgagtttgactattctagctacttcatgtaagtggaaccatgcagcatttgttcttctgtgactggcgtatttcactttgcataatgtcttcaaggttcatccatagcatgtgtcacaattccctcccttgttaaggctgagtaatattctattgtatgtagagactacattttatgtatctattcatttgccaatggataggtggattgcatctaccttttggccgttgtgaataatgtttcctgtctcttaagaatgatactcttcattgaaattgcaaggctctctgattaaattctgtacatccactcaaggccctgacttgtgggcacaaaagttgttttttttttgttttgttttgttttgtttttgtgagacagagtcgcactctgttgcccaggctggagtgcagtggtacaatttcggctcaccacaacctccgcctcctgggtgcaagtgattctcgtgcctcagcctcctgagtagctgggattacaggcacatgccaccacgtccagctaatttttgtatttttagtagagacagggtttcaccatgttggccaggctggtcttgaactcctgacctcaagtgatctgcccacctcgccctcccaaaatgctgggattacaggtgtgagccaccacacccagccgtggccacaagttttaaggtcacccctcttaaatctgtgaggaactccaccaaggagataccattcgtagctgggcctcagagaatatctacaggctgggggagaggaaaggcattccagatggagggagcaaagacacagaagcaggaagggcataacaagtcacgccaaacctaatggcacaaaacaaccattttattatggtcacagattctgtatgtcagcagttcagaaagagcgtggcaggaacatcttgtttcttctccatacagcctggggcttcagatgggaaggctcaagggcttggggtgacatgacacctgaggtatggaattacctaaaggtagttaacgtgtgtgcctggcacttaaacaaggatgactcaaaggccaggactgccagccacagcccctgtgtatgtccctccacgtgcctttgctccctcgcagcatggcagccttcttgcatggtggctccaggcccaagtgtgtgttgaaccctgaggctgcatccttttctgacctagccctggaagtcacgtagtaactcttccactgtatttgactggttacaagcaagtcacaagcccaaggcggggcttcaggttgaaggagggaagtattagaccctacctcttcatagggaagtatcaaggtttcagaagaggaggagggacaggagagactgttggggccttcagaaaatacaatctgccacagcaaagaagcagttacatccactgttaagctgcagtaaaaagaacaattttatattgaacgctatgtcttgaacactctgtctactttgatacatagagatctagttcatttctgttaaattcatacacatatactacattccctttgaccattttcctactgatgtttcagggttctttttttttttttttttttttttgagatggagtttctctcgttacctagtctggagtgcaatggcgcgatctcggctcaccgcaacctccacctcccgggttcaagcaattctcctgcctcagcctcccaagtagctgggattacaggcatgtgccaccacgcccagctaattttttgtatttttagtagagatgaggtttctccatattggtcaggctggtcttgaactcccgacctcaggtgatccgcctgccttggcctcccaaagtgctgggattataggcgtgagccactgcactggggccattttggtgttttcagcgtttcatcaacactctggtgcatgtctctctgccatgaggtgggagaacttctctggagtacttaccttggacagaatcactggatgggaggaaacacatattttaataaatgctgtctgattgctctccaaagaggttatatcagtttatccttacaccaagtgtttgaaagttgccatttccctagtatacttactgatacttgatcttgttggactttaaatcacttacttggtaagtgaaaaattaaaaccagttgatttatttcacatttacttggttactagagaagctgtgcatattttaattttatttatattggccatttaaacttctgtgaattacttgtatactctattcattcttctattggattctcagtatttttcaaattgtctgggcatggtggctcatgcctttaatcccagcactttgggaggctgacgtgggaagattgcttgagttcaggagttcaaaactagcctggacaacgtagtgagacctcatgtctactacaaatgaaaatttaaaaataaacaattggccaggcgcagtggctcatgcttataatcccagcactttgggaggccgaggcgggaggatcacctgagatcaggagtttgagaccagcctggccaacacagtgaaaccccgtctctactgaaaatacaaaaattagccgggcgtggtggcaggcgcctgtaatcccagctactcgggaggctgaggcaggagaatcgcttgaacccaggaggcagaggttgcactgagccgagatcacaccactgtactccagcctgggtgacagagctagactccatctcaaaaaataaataaataataataataataaattagctgagcattgtggtgtacacctgtagtcccagttactcaggagactaaggtgagaggattgctcgagtgtgggagagtaaggctatagtgaggtatgattgtgccactgcactgcagcctggacaacagagtgagaccctgtctcaaaaaaacaaaaagtactttaaaaatcaatttgtagttctttatatatatggatagttacactgtgcctattataatatgacgaatattttctgccacattattgcttgtctttttttttttttgagacagagttttgctcttgttgcccaggctggagtgcaatagcgtgatctcagatcactgcaacctctgcctcccgggttcaagcgattctcttgtcccagcctcctgagcagctgggattacaggcatgcgccaccacgccccactaattttgtatttttagtgttggtcaggctggtctcgaactcctgacctcaagtgatccgcctgcctcagcctcccaaagtgctgggattacaggcatgagccaccgcgcctggcctgaagtctctttctttcttcagtgtttagtgatgcagattccatacttacgcaggggtatgtttctgggctctgttctgttcctcttttggctgcttctatgttaatacaactattttcatttatttgttatttaattttatttttttggcgagtctcactctggcaccccatctgaagtgcagtggcatgatctcagctcactgcaacctctgcttcccgggttcaagcgattctcctgcctcagcctcctgagtagctgggactacaggtgcatgcaaccacacctggctaattttttgtatttttagtagaaatgaggtttcgccatgttggccaagctggtctcaaactcctgacctcagctgacccacctgcctcggcctcccaaagtgctgggattacaggtgagagccactgagcctggctgactcctggctaatttttgtatttctactagagatggggtttcaccgtgttggccaggctggtttggaattcctgacctcaagtgatccgcctgcctcggcctcccaaagtcctaggattacaggtgtgagccactgcgcccagctgacacctggctaatttttgtatttctagtagagatggggtttcaccatgttggccaggctggtttggaattcctgacctcaagtgatccacccacctcggcctcccaaagtgctgggattacaggagtgagccaccgtgcccagctgtattaatataactttcaattaccatggctttgtagcacgccttggtatctggtgagtgctccttctttatcctttttgtgcagaaagaaaaactattcttgtatcttcattcttccaatataaattatagaatttgtatatcaagttcctcagaaaaattctgttgggatgaaaactggaagtagagtaagcttatagattaattggggaagaactgataactaaaatattgaatcttctcaactataagtcaactttatcactccatttattcaagaatcctattatatccttctatccaagtttgagtaatttctctatgaaggtctttcatattttaattttcatttaatttaattttttgagaaaaggtctcactctgtcactgaggctggagcacaatggcatgatcttggctcattacagcctcagcctcctgggctcaggtgatcctcctgcctcagctttccaagtagctgaggctacaggtgtgtaccaccatgctcagctaactttgagatttttttgtagagatggggtctcactatgttgtccaggctggtcttgaactcctgggctcaagcagtcctcctgctttagcctcccaaagtgctgggattacacccatgagccactgcacctggcctcctgcatatttttattagatttattccttagtactttctagtagtttttgttgagttttgtgaaattgatcatttaaaaaatatttgcggccgggtgcagtggctcactcctataatcccagcactttggaaggccgaggtaggcagatcatttgaggtcaggagctcgagaccagcctggccaacatggtgaaaccccatctctactaaaaatacaaaaatcagctgggtgtcatcgtgggcacctgtaatctcggctacttctgaggctgaggcaggagaatcacttgaacccgggaggtggaggttgcggtgagccgagatcatgccaccgcgctccagcctgggcgacagagggagaccctgtctcaaaaaaaaaaaaaaaaatgcatagtctaattagtcacagctagtaggtagaaatgtttaatccttgtatgttgatcttgtgtccggcaaccaagagaatccaacatggttctcttggatttgcatcataaatgattatattgtttgctaagaatgccaattttgtctctctgatttttttttttttttttttttgagagagagtcttgctctgttgcccaggctagagtgcagtggcgtgatctcggctcactgcaagctccacctcccggattcatgccattctcctgcctcagcctcccaagtagctgggactacaggtgcccaccacctcgcccagctaattttttgtaattttaatagagatggagtttcaccgtgttagccaggatggtcttgatctcctgacctcgtgatccgcccaccgcagcctcccaaagtgctgggattacaggcgtgagccaccatgcctggccccttgtctctctgatcttattgatatcttgtccaactgtatggcaaggtgcttcaggacagtgtggaataataggtccatatctctaccttgtcctgaccgtcattcactcagtgaatatttattgagtacctaccttatgccaggtactgttgtagcttctggggatgtcgcagtgaacaaaacaaaatccctcccctcatgggaagggataccaaataaccaaatgtggtaagcagtaaccaggtgagcagtaacaaataaccaggaagggtaagagcagtatagtgtccactgcacaggcagggtcggtgttgctgttgcattcagggtggtcagggagggcatccctggccaggtgacctgtgagcagaaacctgaagagagggagagaggaagtctgtagagatctggggagaagaacttttcaggcagagggagcagcacctgactgatgggcaagtgcttgacatgcgcaaggctgagggaagccaccagtgggctgcagccatgagccagaggagagggatgggagatgaagtcagactgggggcatctcagatcacaggggtctcagaggcccttttttttttttttttttttttttttttttttttttttgagatggggtctcactctttcacccaggctggagtgcagcggcgcaattttggctgactgtaacctccacctgccaggctcaagcaatcctcccacctcagcctcccaagtagctcggaccacaggcccgccgcacctggctgggagttttaccaagttgcccaggctggtcttgaactcctgaactcaagtcatctgcccatcagaggccattattaaaggcttggttttactccaagaagagctcatcagttctgagtgctgcaacttgacatacttttttaaagaattaatctgggccgggcgcggtggctcacgcctgtaatcccagcactttgggaggccgaggcgggtggatcatgaggtcaggagatcgagaccatcctggctaacaaggtgaaaccccgtctctactaaaaatacaaaaaattagccgggcgcggtggcgggcgcctgtagtcccagctactcgggaggctgaggcaggagaatggcgtgaacccgggaagcggagcttgcagtgagccgagattgcgccactgcagtccgcaatccggcctgggcgacagagcgagactccgtctcaaaaaaaaaaaaaaaaaaaaaaaaagaattaatctggcttctctatccaaatgagaacctctgtgtaccttccattggcacacaaatggaagctgggagatgagttaggaggatttaacaatctgtgtaagagagactttaatggaggaatcagactgtggatatatcttgaagatagaacaggatttctcgacagattagatatgggtaagagtaagggagccaaacatggcttggagtctgagtgaagaagaggatggcattgccactgaaatggggaaaactataggaaatgtcgatctgggggaaagtcaggagtttggtttggaacatgttaaatttgatatgctttgttagacatcagaatagagaagtcaagcaggcagttggatatatgagtctggggataggtccagtttgaagattctatctgggagtcaccagagtatagattaagatgaataagatgagaatgcctaataagtagagaagacaagctgtctaaagactgatcccagagacatgaacacttagcggtggaaagggaggaataaacagcaagatcaaaggaagagcaattggaagccacctgaacaacgttctcaagggagaatccagtgtcaaaggcagctgaagggctcaccaagccagatctagaaaggcagaggtcattagatacataaagggccattttggtggaattgtgatggcagaagcatgggtaaggtagcctgagaggaggaggattaagagaagagaaaacaggagagtaattggagaccacatgcatggattttcctgtacaaggaagcagagaaatggagggatgtagggtcaaaggagacagctgtttcgttgttgttgctgttgttttgagatagggtctcactttgtcacccaggctgaagtgcagtggtgtgatctcagctcaatgcagccttgaactcctgggctccactgatcctcccaccccagcctcccaagtagctgggaacacaggggtgcaccaccacacctgcctaattaaaaatttcttttttatagagatgcaatctcgctttgttgcctaggctggtctcaaactcctgggtttaaacaatccccccatctcagcctcccacagtgttaggattacaggcatgagccaccgcgcctgtccttgttttgtttttttaatggagcaatataagcatgtttatatgttgctgagaatgaccttgttagagaaagggagcttattatgctggagagaaaacaggcaactgttggggttatccttaggtgagaaggaatcgaattagtgcccaagtagagaacagatagcttctccacagtgacaggagaaaggccatgtctgaggagaggtgaggtgaggcagatgggagcagagtcatcacctcagggtaaggaggtggagaggacgcgtaggacgtctctggagagcagatttgaaactggcatccaggagagaggaggcccaccagtcactccaaggaccactgagattaggtgtgaaggcagaactggaatgtgggagggatgcgtccatccaaaagatgagcttgagtttactgttttccattcattgcatgtctgtatcacaccactttctataaaatggtttgtccatttctccttaaaaaacttttgttttatatattttgaagatattggatggatcaagtttagaattgtaatattcctggcagatgttcactgatccattctgtttttcagaatctctgtttgtgtttgcctaagagttatatgtattatgactattacagtagcagacttcctttgattagtgtttgtctggtatatctctttccatccatttactttttacctttcactgtccttattaatcatgtctcttgtaatcagcatatacctggattttatgttttatccagtttcctgatttttattttagaaataggtagtgtagtccatttttacgaggtgacttctatatatttaggttcattcttaccatgttattttgggggatttgtgctttttaaatgtattttaatttatttatttaaatagagatggtctctcactatgttgcccaggctggtctcaaacttctagccttaagcagtcctcctacctgggcctcccaaagtgttggaattacaggcgtgagccactgagcccagcctccttttctgaggtgccttttttcctctttcttcccttcttttggattaactcctctcctcactccttttacaaaccctactagttttgaggctatattaattgggattacatttgcctacaaataacactaaaacatttctaaaaagtgatttaaacaagactgtttatttcattctcaagaatgtctcagatagtgatggtggagccacaggcttttttgtttccttgcagtttgatgccattaattggctttcattgataagatcttctcaactgtcagagtgctgctggatcccagcatcctaagtgcattccagccagcaaaggaaccaacagcaaaggagaacagctggcccacgcactgcttctgcttccactgctttggccagaatttagacatacaactatgcatatcttgctgcaggggagtctaggaaatgcttgattccaggctatgtgcccagttaaaaataaaaggtccacacagatcacttgttttcagaagcctatgctgtgcttagtagacagtgtgcacattatagagagttggcataatgctaacaacagaatccttattctaatcctgatcctagtataacttgttgtaggattctagtacttcgcatgccatgcctcagagttttaatgtgacagtactggctgggcacggtggctcatgcctgtaatcccagcactttgggagccgaggtgggtggattgcctgaactcaggagttcgagaccagcctgggcaacatggtgaaactccatctttactaaaatacaaaaagttagcggggcgtggtggcgtgcacctgtaatcccagctacttggaaggctgagaccggagaatcacttgaacccgggaggcagaggttgcagtgagcccagattgcgccattgcattccagtctgggcaacagagctagactccgtctcaggaaaaaaaaaaaaaaaaaaaaaaattgacagtactttgtcctgggaaattcacactatgcctaaaggcttgctgtgtttcatttcctctgaataaagttgctgttagatatgaaggaaaaaaaatcaaaagttctgtgtatggctgggcgtagtggcttatgcctgtagtcccaacactttgggaggctgaggcaggtggatcacttgatcccaaaagttcaagactagcctgggcaacataatgaaaccccacgaaacaccatgcctggctaattttatattttgtatctctataaaaaatacagccgggtgcggtggctcacgcctgacctcgtgatccgcccgcctcggcctcccagagtgctgggattacaggcatgagccactgcgcctggccgaacctgtgtcttaaaaaaaaagaaagaaaaggctggacgcagtgcctcacgcctgtaatcccagcactttcggaggccgaggtgggcagatcacttgaggccaggagtttgagactagcctggccaacatgatgaaatcccgtctctacttaaaatataaaaatcagccaggcgtggtgcgggcgcctgtaatcccagctactggggaggctgaggcatgagaattgcatgaacctgggaggtggaggttgcagtgagctgagattgcgccactgcactccagtctggacaacagagcaaagcgattctcctgcctcaacctcccgagtagcttggactacaggcatgtgccaccacacccggttattttttgtatttttagtagagatgaggtttcaacgtgttggccaggttgacctcaaactcctgacctcaggtgatccgcccacctcagcctcccaaagtgctgggattacaggtgtgagccaccgtgcccggcctagtagtttcttaatgttttgaaaatgagttgttgttactgattttttttttttaatttgttggtggttgggagaagtcagcttgtctgacactcactggtttgtcttagccagaatcagaagtgattacaattgtcaatgttgaatcagtcttgcattctcagaataaacccagctaaatttatgatatattattttagtacactgccgggtttaatatgtgatttaataattttgtctttgttcatgagacattggcttgtaatctttcctttctatccttgtcctgttgtagttttaaggttctctagcttcaaaaatcagtgtgggacgtttcctcttctcatagtctctgaaggaatttaacaacaggattttgccaggtgcagtggcccacacctgtaatcctgcactttgggaggccaaggtggacagctcacggtcaggagttcaagaccagcctggccaacatggtgaaaccccatttctacaaaaatacaaaaattagctgggcatgatggcgggtgcctgtaatccgagctacactcaggatgctgaggcaggagaattgcttgaactcgggaggcagaggttgcagtgagctgagatcccaccactttactccagcctgggcaacaaaacaagacaagactcggtctcaaaaaaaaaaaaaccaggattttatttcatggttgtgtataactctagttttgagtatcttttctagtatagctatatcacattatcctttactcattcctaatctttatttgcatctgtcttcttttgatcttgatcagtctgacagggtttgttaattttattaatcctcttatttttattaatttctcttctctttgggttaattgtattattcccttactaatgtcttaaattggaagctaattcatttttttcagcctgtccttttatataagctttgaagccgatgcatttctctttaactactactttagctgtatctgacaagatctgcaacttccactgtgatttctttgacgactgggttatttagatgtgtaaatctttgtttttatatgggagtttattagttatgttttcattactggtttctaacctatttatattaatgtcaaaaaacatgatctggtggctcatgcctacaatcctagcactttgaaaggctgaggcaggaggatcagttcagcctagaagtttaagaccagcctgggaaacatagcaggacctcttctctatttaaaaaataaataaataaataaaaaattaggccgggcgcagtggttcatgcctgtaatcccagcactttgggaggctgaggcaggcggatcacgaggtcaggagttcgagactagcctggtcaacatcgtgaaacccccatctctactaaaaatacaaaaattagccaggtgtggtggtgcgcgcctgtagtcccagctacttgggagactgaggcaggagaatcgcttgaacccgggaggcagaggttgcagcgagccgagatcgtaccactgcacaccagcccgggcaacagtgcgagactccatctcaaaaaaaaaaaaattagctgggcgtggtggtgcactcctgtagtcctagctacacaggaagctaaggcaggaggattgcgcacgcacagaaggtcaaggctgcagtgagccgtgatggcaccactgcactccagcctgggtgacaagacagagaccctatctcaaaaacaaaacacatgatctgtatgatacccagtcagttctttgtaatttaatttattgtatattttatggccaagaatgtggtcatttttagcaaatgttccatgtgtgagaagtatattttatatgaggtttagagttttctgtctgtgtgcgtgcgtgtgcgtgcgtgcatgtacacacagattttctttttagtcagagtctattcatctattgacagacacttgggttgtttctaccttttggctactgtgagtcaaactgctataaatattggcgtacaagtatctgtttaagtctgttttcaattcttttgggtttatacccagaagtggaattggttgatcatgtggcagatctatgtctcgctttctgaggaaccacccaactattttccacagcagctgcatcattttatattcctaccagtaatgcacagggttccaatctctccacatctttgcaacacttgcttccacttttcttgatagcttttggggtttgtttgtttgtttgtttgttctggagacagggtttcactctgctgcccaggctgaaattaacaatagtgccatcatagctcactgcagccttgaccttctgggctcaagcaatcctcccacctcagcctcctgtgtagctgggactacaggtgtgcaccaccatgcccagtttgtttttttttttttcttttggtagagaagaggtctcactgtgttgcccaggctggtcctgaactcccaggctcaagtggtactccacctcggcctcctaaagttctgggattacaggcaggagccttgatagctatcttaatgggtatgaagtatcattatggttttgatgtgcagttccctgatgactaatgctgttgagatgttgagcatatttactgaacatctatctttggagaactatccttgtacattttaaaactgggtttatctttttgttgttcagttgtagggaattcttatatatatatattcttggcattaaacccttatcagatacatgatttgcagagattttctcccattctgtgcgttggcttcatttcttcatagtgtctttttttctatgagacagagtctcactctgttgcccaggctggagtgcagtggcacaatctcagctcactgcaccctccacctcccaggttcaagtgattctcctgcctcagcacccccgagtagctgcgattaataggcatgcgtcaccagcctagctaatttttgtattcttagtagagacagggtttcaccatgttgggcagactggtctcaaactcctgacctcaagtgatacacccacctcagcctctcaaagggctaggattataggcataagccaccacacccagcttttttcttcatagtgtccttcgatgcataaaaagttttccatttaatgacgtctagtttatctgcttttttttcccttctttatctgctttttttttttccccttctttcattgcttatgcttttggtgtcttaagaaaccattgcaaaatccaaggtcatggagatttggtcttatgttttcatctgagagttttgtttgtttgagacagagtctccctctgttacccaggccggagtgcagtagcgtgatcttggctcactgcaacctctgcctcccgggttcaagtgattctcctgcctcagcctcctgagtagctgggattacaggtgtccaccaccaagcccggctaattttagtatttttagtagagatggggttttgccatgttgaccaggctggtcttgaactgccgacctcaccttggcctcccaaagtgctgggattacaggcatgtgccaccacatctggctattttttgtatttttagtagagacggagttttgccatgttgcccaggttgctctcgaactcctggcctcgagtgatctgcctgccttggcctttgcctttcaaagtgctgggattacaggcgtgagcctccacgttcataaccatgatccctctgatttctcccatccctctgtccccttttagaactctgatagatgcatgttctttctcttccatgcctctgaatctctttttagtagtttttcttttttattacttagtccctacttctgtttctaaaaagataaagtacccaggtgcagtcttatataataattaagactcccttttattcccactcttctttaaactaagccagacacaggtccccactgtctaccctggggagctcattttattccccccagcttaactattcatttaaaattaaagttttattctattcatggggcagctgaagcattttgtacctgaagcctttcagccctcctctccctgtagggctctgctactcaggacaagtcctcagcagggttgaatctctgtacgatctccagggtggccttgtttctatgatggcctgattttcctcctgctctagttccagagcccctgttttatctctttccattgtcttactatctctgctttgagctcttttacatattcttggataaatgttacaattttcatctattccctggcaacaatttctggtaagtattcatgtgccatttgctgttcctgtaatatctttaactcctgtgtcagttcccttttaattactaatttcttaatgaggtgaattctttcttgatgagctcttgtaagtagatcattgtgagagacgggccaggactgtgtcccaggctggcaggaatctgtacgtgggatgggtgcctggaagagttctatcaggattttcttctccacaggcaactacagggctcctcacagtgcaggacctccccacctctgtcattctccttgttgccggctaggttcaggaaagctcttgctgcagtccacactctttcttttttgtttttgagacagggtcttgctctgtcacccaggttggaggaatgcagtggtgccatcatagttcactgcagccttgaaaccctgggttcaaacaatcctcccgccccgccttgcctcctggatagctgggactatgggcatccactaccacacccagctaatttttgaattttttcatagagagagggtttcactttgttgcccaggctggtcttgaactcctgggctcaagtgatcctcctgcctcaagcctcctaaagtactgggattataggtctgagccactatgcccaagcctccttttttaatttcaaataagagattatttcaaataagagattattgggtatgctccttttgtttgtttggtttttgagatggagtcttactctgccacccacgctggagcgtagtgggcgtgatcttggctcactgcaacctccgcctcccaggttcagattctcctatctcagcctcccaaatagctgggattacaggcatgggccaccacgcctggctaattttgtatttttagtagagacagggttttaccaggttggccagactggtctcgaattcctgaccttgtgatccacccgcctcagcctcccccatcttgtttactttgtttgcttttcagtgatttctaagggggttggggatgggtggcactgtctttatgccagcaccttttgtgtgtggtgggggtgggggcaaggtctcactttgtcactcaggctggagtgcaatgctgtcatcacagctcactgcagcctcaacctacctagttcaagtgatcctcccaagtagctggggctacaggcacatgctaccatgcctggcttatttttgtattttctgtagagatggacttttataccccgtggcctaggcctctcaaagtgctcagctgtgccagtactttatgatttttttgaggcagggggtctcactctgtcccccaggctggagtgcagtggcatggtctaagctcaccacagcctctgcctcccaggtagctgggaccacagatgcgcactagcacacccagctaattttttgtatttttggtggagacctcctgcctccctaagtgctgggattacaggcatgagccactatgcccggctgatgccagcactttaaaactagaagtcataatacaagatcaaccttgtattcctgggttaaagagacttctcgattaggatatttattttttacaattcttctgatagatcctatttgcttatactttaagacttctacatttatgttagtgaaagtggtccattcttggcatgtcctatctgctctcagagttcttaaaaccagttgcatcattttccatgtttatttaatctctggaacggaatatataaaaaagggatttcctgttctttgaaagtttttaatacctcagctgtaaaactacttacacctagttcctttttctgagaagagttctgcttcagtttcttaaaaatatttatgagtctaatcagattttttattttgagactgagtctccctctgtcacccaagctggagtgcagtggcgccatcttggctcactgtaacctccacccgctgggttcaaatgattctcctgcctcagcctcctgagtagctgggattacaggcatctgccattatgtccggctaattttcatatatttgtagagacgggatttcatcatgctgcccaggctggtctttaactcctgacctcaggtgatctgcctcagcctcccaaaaagtgctgggattacaggcgtgagccactgtacgcagcctctcttaagaccatgatttatgtttttctggaaaatgttttacatttacactcagttttcatatttgttgccataacatatcctcaggaaatgggatggggttggctttatattgtttgtgtttttctcaatgagaatggattaatgtgtagataaaatgaagaccaccgccatcatgaaataatgagttctaccctaagggagtgtgggaggagattaaaagcatgatgccatcccaccaaaccctgtgctgtgctaaatcagtctttttccaccctctgtttctcagtcttaggaaaagtcctcagtgctgtgggcagtgcccagctactgatgtcccagaaattccagcagttccggggcctctgtgagcaaaacttggtgagtgtgattctccttcctccacagcagggcttccagcctttggctgcccactatactctgccagcccctcgaagcctctgtgccctcctctgtaacacacacagcgcggcttcctcatggtgctggaaggacagtggcaatgtgtgtcagtgtctagcacaagaaagggggcaaaagtggccctatcagatctctaatatctttccatgttgaaacagccacatggatggtaaagtcaattagcactggtttatttatataaaatatattctgtatcggccgggcacagtggctcatgcctgtaattccaacacttgggaggctgaggcgggtggatcacctgaggtccggagttcgagaccagcctgaccaacatggagaaaccctgtctctactaaaaatacaaaattagctgggcgtggtggtgcacacctgtaatcccagctactcgggaggctgaggcaggagaatcgcctgaacccgggagacagaggttgtggtgagccgagatcgtgccactgcactccagcactccagcctgggcaatgacagcgaaactctgtctcaaaaattatatacatatatattttttggccaggcgcagtggctcacgcctgtaatcccagcactttgggaggccgaggcaggcagatcatgaggtcaggagatggagaccctcctggctaacacggtgaaaccccttctgtactaaaaagacaaaaaattagccaggcgtagtggcgggtgcctgtagtcccagctactcgggaggctgaggcaggagaatggtgtgaacccgggaggtggaacttgcagtgagccgagatcgcgtcactgcatccagcctgggtgacagagcgagactccgtctcaaaaaaaaaaaaaaaaaaaaaaaaaaaaaaaaaaaaaacaaagaaatcccactgctgggattggtggcttggctttctccctccctcttacctgttaggagggctggccctgccagggtcaaaagcaaagtcctgggctgttctgcctgtgggaatgtgtgtactcccagcgggaggcagtggagtgagtgtttgtctccaagacctacagagacttgggggttgcgttgtcatggaacagagtgacacgagggaaacaacacagattctgtgacctttcccacctgggagtgaatcgggcttctctcggtgtcactgtcacaccatggccaagaacttctgtttcttccctgcaaaacgagaatacctgtctgctagcatacacatacattagggacaggagtgccttccttgccacagcccttagactatcccccaaagatccccaccactagggctggtgctgaccagaactggcttagattcattcatacagatacttacccagacactaggcctcaagagcccccgcgggtgctggcagggcccagaggaaccctgcttgttggggggttggggggagcaggacaagcctctgctgagctggccccactgatccccatctggcccacagaaccctgatgccaacccacgccccacagcccaggacctggcagggttctgggacctgctacagctgtccatcgaggatatcagcatgaagttcgatgaactctaccacctcaaggccaacagctggcagctggtggagacccccgagaagaggaaggtgagcatggagcagtgcggaggggaagtccagggacaaattcctggtcggcaataacgctgcccacatcggtcagtgctgcttggctcccttctccgtgtgtcgtctttgagctggggtctcacatccatcactgcgtggggtccatgcttggcacttgtctggcatgccgcttgctccgtgtagttgaggctgcccctgaagcatgtgtcctgccctgcatgtccagaaaaggggatcctgggagaggcacgcccacagcctcaatcacgttataacagaggaggcagcaaaaatggtcccttctcctggggccctgctgccaggagtcctggggtctggagccagctctgtgaccttgtggtagccagcctcttccctgaggcttccttctgcaaaccagaaccagtgacccctgttgaaccgtggccctgtctaatcccctagaatagcctgtaaaatgggacctgaagccctaaatttgtctctgactgtgactcgggctagttcctgcccgagtctcgggctcccggtgattcaacatgagggtggacaatgggatctgcccgtccccgctgctcgagcgctctcggagtctaggcttgctttctgctccagtgccttgagctcttcccactgtcagtcatcgcttctcgtggcttcctgattccaagtgtgtgttgcttgtgcccgatgcggggaggctggggtggagactccagctgccggcatatggtgggggtagtgccacacaaaacgtggcacctttattttatttttgttctctcctcactgtctcactaaaggaagagaagaaaccaccccctccggtcccaaagaagccagccaaatccaagccggcagtgagccgcgacaaggcctcagacgccagcgacaagcagcgccaggaggcccgcaagagactcctggcggccaagcgggcagcttctgtgcggcagaactcagccaccgagagcgcagacagcatcgagatttatgtcccggaggcccagaccaggctctgagaccatgcaggaggaaagaaacgattttaaatcattaaaaacacaaaaactaagtgcgaacggaacagagttttctcaacctttgctatggttattctgtctagagaccctgagccaactttcaaattgacgcatacaagggctcacaatttggcttttttgggtccctcccagctttaggttatgaagattttactcacaaaaaaaatcaacaaaaatcacgaaactagaaaactttttttttcctcttgctggccgtggtggactagatagatggacgtcggcaactcccggcccagcctccatactgcggtctttttactcgttctatctgatgagaactcacactagcttgtttacaagatgacgacagtccaagggcagccttgggcacctgccatgtccctcctttccccagctatccccgctctgaccttgattttcattcttatgtttttctcttttcccttcagagctcacacagtggtcaccattgtggcaagcggctttctgggtctcagccctctctgcggttgagggcccagaggacagagagatggacatgcgtcccctccctccccccgccaagtgctcacacacaacctcacgcgcacacacacacacgcagatggaggcgcctcactgggaggtgccccgccagccctgggcagtgtcaggcaggactcactcaccgctgagcagatgagggaagttttagtcttggcgggtggaaatgagacgaagccacagttatcacactccagactcctgcccttttattttctccagccccttcttccttcagcaaaatctaggactcccgagtggcttccagggggccgtcagtcctcagccgcgcctgtgtccggtgcccgaggggcgggcggcggtgtctgtatgtatgtgtacatatgcacatagaccttagagtgtatagttaacaaacgcccatctgctcacccatgcccacccagcgccgccgccgctggctctcggggcacctggcaggaggcgggtgtgtgaatagcatatatttttacatgtactatatctaggtgtgtgtacaagtgtgtgtaaaaatatataccttgtgtgtaagcagccctttttttttttggtctccacccccctccccccgccccgcactcctaagggcccatctgcccagcctctgagttttctgttctattttttttttaaccccaattatccttctctctctcctgcccccgcatcccactcccagggtgtcacgagccctgagctgcaatggcccgggcctgcagggcggggtaggggagggcaggggctgagccccgaagccagctcagtacctgaggggctgctctatgctgtgtatgcgcctctctggcatccgagacatcctcttggctggcgcttgctgcagggggggacccccccccgtccccaggtgaaccaagggtctgctccggggcccatttccagcttggccg

SEQ ID NO: 8538 - DNA, 32184 bp, Homo sapiens
taaccattccttagctgttttggcatctgctctgttgtcaccacctccccacggcacgggtcagggtctgtcacagcctcgtggccccacgcacttcacctagtacatgcccctgctggataataaggtttgtgtgtgactgatgtgggggatatctttggccagtggtggcatcccctcaagactttgtctcgaatgagggtgggtagggcctgtgtgtgtctgtcttggtcattgcagtcttgaccctcgttctccctgctccagaaatccttgcggacggaatggctaagcccagagctagggccaagtcaggcagggcttctgcattggaaggggcttgagagggttgggggcttcaccatctcacctctcccctgcccttctctcatccatctgcaggttcatcatgcctagtggcgtataagaagaccccgccaccggtccctccacgcaccacttcaaagccgttcatctcagtcacagtccagagcagtactgagtctgcccaggacacctacctggacagccaggaccacaagagcgaggtgactagccagtcgggcctgagcaactcgtcggacagcctggacagcagtacccgaccgcccagcgtgacacggggtggagtcgccccagcccctgaggccccagagccacccccaaaacatgcagctctgaaaagtgaacaagggacgctgaccagctctgagtcccaccccgaggccgcccccaaaaggaaactgtcatcgataggaatacaagtaggggctccttttgcactctgtgtcctcagcccactccgtgcacctgcctgtgtgtaattacatctggtagaggcccactaggtctcctgggaaaaggtggtttgtctctctattttgggggatcagccccaagtggccaaaccgaattccacccatagccacgcctcgctggtatctgtccacacgtgctgctggtcagcagctgtgggcatgtgtttctgctcctccagtgggttgtcccagtgaatgtagttacactcagccagccatctcctgtccactgtttgcctgtccactgtctgtctgtccactccaccctttgccctgccagctgacccgtgggaggcgggactggcctaacagttctctaatccaaggtcagctcgggtgcggaggccatagccccgcttggcggcaggagcagcatggagcatagacgctgttgggccaggggcccaggacccagggcccttgagccatgggggttgctcgaggggaactttgcccagagccctctcgggccttggggacaggtaggtggcttgaggtaccaggcccatgtcattgagaagggtgatgccggtctcactgcctccctccatgggatagggtccaggcgatggttccccagggttaggtggccaaagtcagcaggccctccatagtcatggcacacagcagggcaggtgtgccagcttcccctccactgcttcattgcactcctgcatgcacccgatgtcaataatctgtcttgtttgctgagctggggaaacttgggccctgccttgtagtttttaagagtttctctaaatccagattgagtggactctccctgccctggctggacctgcagaccaaactagggcacgttcagagccatgagggaggggcagctacagtgggtgagggcgagaggggagacagggcccccccaagcccaggggttgagtcagggaggacgaggcattgtgtgttgtggcacaggctgcaagggactcctccagccacccctgagcaattggatgtggcccagctgataacaaagcactggaatgcaggagcgtgggacacaaagtggagcttgaatggaacagagaaggctcactgagcaatttcttgcagttgcctgtatttgtttcctccaagaggcagctctaggcttccacttccccatgtataaacagagagagagttggccaggagactctgctgctgttttctgggcttcttaagtgtccagtccctgcgctgcacaggtgggattctcagaaacacagagagtagcctgatcttcaacccttggtcctgaccacccatatctttgggcagccccaccctcttgctggccaaaccagacgctcttatcttcccggaaagcctaagagttaggactacccttgattcctttcacccagaaaatgacaccgggataaggactctcttaggcctgtcctgggcgtcccattccctggattcaccccagccccattcttggtctcattgcagctccttggagatccagtggtgctgcattccttgagccggcttttgccgaggggaaatgtggctgcatccctgtcccagaaagcttccctggcccctacttctctccacaaggccaagagactgaagagtccccagtttctgaggatgccctgaacccttggtgcctcatgccctagattgagtgtgggtttctccctcattcttgagtgatgataggaaagctggcctggctgccccatggcccgggacctttgtcccagagaagaaaggcaggcgcagggcatcactgttgtcctgttccacttcacaggagtggagggagtgacagctttccacttggccctgaccccagtccttcctactgctccccagggccacccagtgctaaaggtaacctcagccaagtgtgaataacgtccagggacttcggtggctcctgtgggtggcagtttctgaatctagaactgccgtccagggtttgcccttagtgcaggcgcctctggcctgccctccaggtttctgccacagggttcagggagtgatctttgcctcaagacagccgccagcttcaactacaccagataacggctgtggctttgtgtgtgtgtgtgtgttttctttctctttcgtcgtccttttttttttttctctctgatgcgtgtgaaggagaggactagaaggaacggttcccacctctcggaggacaacggacccaaagcgatcgatgtgatggcaccctcctcagagtagggaaagccagtcatctccaccccatcccacctcccgcccacctgcccgcccgcccgcctgcccgcctccacgcgaatgagcagtgcccggcttaacctggtccggcctcgggcccacgtgcagtgtccgcatgcctcgtgtctgtctgtccacacgtccgtttgcgtcgtcccactaatgtgaatttcagcagcaagtgtggtgtttgttttttatttttgtctttgtctccgtgccgttgctgtcgttgtccttcaataaggttgactgcattcagccagtgccaaaagaggagcccagtcccgctaccaaattccagtccatcggggttcaggtagaggacgactggcggtaagtcggacagaggtggcggctgcttctcccctctcctctccctccctccgctctcacctctcctgctctccctaacccacttctccttgctggatttctaataaccaagctgggtttgggttgcgggtggtggcccaggcatgggaggctgggcaggggcgggcgggtggacagatgagcatttgctctgtgagaccagtcacccacgggggccatggctgggccaggacatggcgtcagctgccctgatgctggtggtcttcctggccccactgcagtaaacaggcaaccttatgaccttgtcctcgtgtgtgtgtgcgtgtgggcttgggcgggatggggcaagggctgagccaagaatgagatgggggctgtgggacccgcttcaggcgcatggtgagcagatgatgcatccgtttctctgtctcccgtgtgtccgggtcaaggcggcctctggtctctggccctcttggtgactcactccttcctgtccccaccccatccaccccctacccacagaagcagcgtcccctctcacagtatgtcctcccgacgggacacagactcggatacccaggatgccaatgactcaagctgtaagtcatctgagaggagcctcccggactgtacccctcaccccaactccatcagcatcgatgccggtccccggcaggcccccaagattgcccagatcaagcgcaacctctcctatggagacaacagcgaccctgccctagaggcgtcctcgctgcccccacccgacccctggctcgagacctcctccagctccccagcagagccggcacagccaggggcctgccgccgagacggctactggttcctaaagctactgcaggcagaaacagagcggctggaaggctggtgctgccagatggacaaggagaccaaagagaacaacctctctgaagaaggtgggtgccacatggatggtccttgggcaagggtagaaggtgttggcagctggtttcagctggtggccagcagcttccgaacttctgagtgggggtctcttaggttctcttcttgggctagtttttgagctcccttcttactttcttcgcattcttccatccatccacctatttaaccaaacctctttccagaaagggttgctggtgatagctgtttgttgtgcaggctgtgaggccacccacacctgggtttgaatcccagctcctcccttactagtgaagtaaccttggtcaggttactccgagcccccatttcctcatctgtaaaatggagctaatcctctgctcactatatgagcatgttgtaaggattgaatgtggtcgtgcatgtgaagggcctgatgacctgtcagacacagagaaaagtgggagcctaattatgccttcaacaacttttttttttttttttttgagacggagtcttgctccatcacccaggctggagtgcagtggctcgatatcagctcactgtaaacctctgcctcccaagttcaagcaattctcctgcctcagcctcctgagtagctgggactacaggcacgtgccaccacacctggctgatttttgtatttttagtagagacggggtttcaccatgttggccaggctggtctcgaactcctgacctcaggtgatccacctgcctctgcctcccagagtgctgggattacaggcgtgagccaccacactcagccaacagcttcttactgagtgcttcctgtgtgccaagcaccagggatccaactgggtctcaatagggtgtgaagaagttatgcttttattttctacttaagtttctacctatatcatgccaatttccaaaaattcccttgagaaattagttcaagaaagtgctagacacgtgtagggagcctagattcacaggtggttggaggggggttgggtggtggaaggcaggtcctgggaagctccaggctgttgacctgcacccacctggttcacctgtggctctggttcccattgagctactcctccacactcaggaaggacaggtcttcagagtgtccaaatggtttgacacacatcccatacatgatggagggggccctgaggacagcagcctttgatgatgcagaagactcatcagagtcattgttttcactgtcctctaggccagttccccgctttgatgtcacacccactagtgcaggggaactgttgtgaggaaagtacctagtaactttttacaataatagtattttaaaaaatcaaaacagagacaaggatcagagagcattaaaaggcttctaagagaaaacatccagcccaccgccctacctgggcctttccccactttcagtttttactagctgtatattctggtatttgtcttcatatatcttttaaaaaatgtgactgattatatttcctctttaaaattaatcatcatttctattaatttcctgttaccattggcatagatgagtgtttagctctcacacaacctctgtctccctttctcccaccctctgtgtacatcacagtttatgataaatagtaatcagtgtttctgtttactatgagtatgtaaatattgtttattgcagagcctaacagtatattattattgcgttttcttctttttacattttgtttttcctaaaacgaattgtttgccctgttgccacatttaaaaaatacactccatttgctaaattttaaaaaaattttttaagagacatggcctcactctgtcatccaggttggaagtgcagtggcataagcatagctcactgcagcctcaaactcctgggccgaagtaatcctctcacctcagcttcctgagtagcaaaggactaccacagagtgccaccatgcccagctaatttttaaatttttttgtagggacaaggtctccctgcgttgcctaggctggtctcaaactcctgggctcaagccatcctcttgggttggcctcccaaagtgctgggattacagacgtgagccaccacacccggacaacaatttctatataaatataaaaatgaagttaaaaataattttccctcagaatcttaaaggcaccatcattttttttatttttatttttttgagacagtcttgctctgtcgcccaggctggagtgcagtggtgtgatctcagctcactgcaacctccacctcctgggttcaagtgattctcctgcctcagcctcccgagtagctgggattacaggtgtgtgccaccatgcccagctaattttttgtatttttagtagagatggggtttcactgtgttggccaggctggtctcaaactcctgacctcagataatccgcccggcttggcttcccagaatgctgagattacaggcatgagccaccatgcctggccaccttgtattaatttttaaaagtaattttctcacttctatttgttctgttgtctggctctagaatttctgtcagttagttgctgtacctgctgtgtggatcctcaggctctcaccttttcttcctcatgttttttgttggacttcctcgaaggttttctttttcttttctctttttcttctgccctgtgatggctttactgagatataattcacataccacaaaattcacccttttaaagtacacatttagtaaactcacaatggcacttagtgtattcacagtgtggtgcaaccatcactactgtttattttaagaacatgttcattgccccaaaaagatgctctctgctcattaggagccgctcccacagccttaggcaacctctaatctttctgtctctggatttgcctattctggacatttcatataaacagaatcataccatatatggcctttttttttttttttttttttttttttgagacggagtctcgctctgtcttccaggctggagtgcagtggcgcgatcttggctcactgcaagctccgcctcctaggttcacgccattctcctgcctcagcctccccagtagctggaactacaggcgcctgccaaccacgcccgggtaattttttgtatttttggtagagacggggtttcaccatattagcctggatggtctcaatctcctgacctcatgatccgcccacctcagcctcccaaagtgcaaagtgctgggattacaggcgtgagccactgcacccggccccatatttggccttttgtgtctggctttcacttggcatgtttttgaggttcatccatgttgtagcatatgccagtatttcattccgttttgttgctgaataatatttcatttcacactacattttatttatccattcttctgttgatggacatttgggttgtttgtactttttggctattatgaataatactgctagaatattcatgtacaagttttttatggatgtatattcatttcttttggagtagaaatgctaggtcaaacttcgatttttgttttcctttttttgttgtaaaatatatataacataaagtttaccttttaactgtttttaagtgtgcaattcagtggcattaattatattcacaatattgcactaccatcacaaccatctatttccaaaactttcatctaaaacatagaatctacctattaaacagtaattccccattatcccctctgcctagccgctggtatcctctacttgctgtgtctgcgaattttcctcgtccttttgtgtttggcatgttttgaaggttcatccatgttacagcattttcatttttatggctgactagtattccattatgtgtacaatatataccacattttgttcatctgttgctgggcacttgggttgtttccaccttttggctattgtgagtaatgcagctatgaagactggcgtgtttgagtacctgtttttaattctttggggagtgaaattgctaagttatctggtaacgctatgtttaactttttgaggaatggctgaactgctttccatagaagctataccattttacattcctaccagcaaagcacgaaggttccagtttctccacatcttcaccaacacctgttatcttctgtcttttaaaaaaattctagccatcctaacggccatgaagtagatgaagtaatatctcattgtcattttgatttgtatttcccttatgatattgagcatcttttcatgtgtctgttggtcatttttatgtcttcttggaagaaatggctaaggccttcgcccattttttaattgggtggtttgtctttttgttactgagttgtaagtcctttatatattatgggtgctagaccctcatcatatatatgatttgcagatactttctcccattctggagactgtcttttcactttcttcctggtgacttttgatgcacacaggttctttttttttttttttgagacggagtctcgctctgttgcccagactggagtgccgtgacgtgatcttggctcactgcaacctccgcctgctgggttcaggcaattctcctgcctcagcctcctgagtagctggaattacatgtgcgtgccaccatgcctggctaattttttgtatttttagtagagacggggtttcaccatgctagccagggtagtctcgaactcctgacctcatgatctgcctgccttggcctcccaaagtgctgggattacaagcatgagccaccacgcctggctgacgcacaaaggttcttagttttgatgaagtccattttttccttttgttgcttgtgtctccacttattattttaaattatgagcatatattaataaaaaaataagataaacagttgaggcactcacaacctgactggcagttttgtgtgggtagggcttgttttaagtaggctttctatggaccccttcttagaatagtggttttaggctgggtatggtggctcatgcctgtatcccagcacttttcgaggccaaggcgagaggatctcttgagcccaggagttcaagaccagcctggtcaacatagcgagacccccatctctatcgaaaatataaaaattagccaggcatgatggcatgtgcctgtcattccagctattcgggaggctgacaagcggggaggatcacttgagcccaggaggtcgaggctgcagtgagccaagattgggccactgcactccagcctgggtgacagagtgagaccctgtctcaaaaggaaaaaatcataaggaagagaaaatatacttactgttcattaagcagaagtggatcgtcataaaggtcttcctccttgtctccacattgagtacactgaggaagaggaatggggaagaggaggaatgttggtcctgctgtctcaggggtggcagatgggaagaaaattgatacataagtagatctttgcagtgcaaacctgtgttgttcaagggtcagctgtatttcaccatatattcaatataaaactattgcaatatcttatattccttttcatagtaagtctttaaaacttagtgtatattttactcttacagcacatcttaattcagacaagcaacatttcaggtgcttactaacgacatgtggctagtagctgctgtattgagcacagattgagacagtaagcctggggcagggtgcacagattgcttcatgccaatagggtgattctgtggatttgattccctttaactttcctttactatacttaattctagttatttctagagcaagaagatgtttacctgcaaaggaaattatgtcataccaaacgatattggtattaccttcctgtctacctgggagggaagaggtcttttatgatgtttctggataaccacaccagaactcctgcagttgaacatgaactctagagggggcccttttcatagccctgtatcagttactgtaacttacagacagatggagtcacatagctcatgtcccttatccaaaatacataggtcagggaactcagcagtgcccacccacccaggtggctgcctgtattgactgaattttgcattgccctcttgtctaaacctgaagaactttaaacttgacaatgttcttttcagataatttatttttctgaattgtggttaaatatatataacatgaaaattaccatttcaaccaagtttacagtctgtggcattaaattcacactgttgtataaccatcaccaccgtccatctctagaacttgttttgtcttccccagctgaaattctgtacccattaaacactaactccccattccctcctacccccagccactggcagccaccactctactttgtctctatgagtttgactattctagctacttcatgtaagtggaaccatgcagcatttgttcttctgtgactggcgtatttcactttgcataatgtcttcaaggttcatccatagcatgtgtcacaattccctcccttgttaaggctgagtaatattctattgtatgtagagactacattttatgtatctattcatttgccaatggataggtggattgcatctaccttttggccgttgtgaataatgtttcctgtctcttaagaatgatactcttcattgaaattgcaaggctctctgattaaattctgtacatccactcaaggccctgacttgtgggcacaaaagttgttttttttttgttttgttttgttttgtttttgtgagacagagtcgcactctgttgcccaggctggagtgcagtggtacaatttcggctcaccacaacctccgcctcctgggtgcaagtgattctcgtgcctcagcctcctgagtagctgggattacaggcacatgccaccacgtccagctaatttttgtatttttagtagagacagggtttcaccatgttggccaggctggtcttgaactcctgacctcaagtgatctgcccacctcgccctcccaaaatgctgggattacaggtgtgagccaccacacccagccgtggccacaagttttaaggtcacccctcttaaatctgtgaggaactccaccaaggagataccattcgtagctgggcctcagagaatatctacaggctgggggagaggaaaggcattccagatggagggagcaaagacacagaagcaggaagggcataacaagtcacgccaaacctaatggcacaaaacaaccattttattatggtcacagattctgtatgtcagcagttcagaaagagcgtggcaggaacatcttgtttcttctccatacagcctggggcttcagatgggaaggctcaagggcttggggtgacatgacacctgaggtatggaattacctaaaggtagttaacgtgtgtgcctggcacttaaacaaggatgactcaaaggccaggactgccagccacagcccctgtgtatgtccctccacgtgcctttgctccctcgcagcatggcagccttcttgcatggtggctccaggcccaagtgtgtgttgaaccctgaggctgcatccttttctgacctagccctggaagtcacgtagtaactcttccactgtatttgactggttacaagcaagtcacaagcccaaggcggggcttcaggttgaaggagggaagtattagaccctacctcttcatagggaagtatcaaggtttcagaagaggaggagggacaggagagactgttggggccttcagaaaatacaatctgccacagcaaagaagcagttacatccactgttaagctgcagtaaaaagaacaattttatattgaacgctatgtcttgaacactctgtctactttgatacatagagatctagttcatttgtgttaaattcatacacatatactacattccctttgaccattttcctactgatgtttcagggttctttttttttttttttttttttttgagatggagtttctctcgttacctagtctggagtgcaatggcgcgatctcggctcaccgcaacctccacctcccgggttcaagcaattctcctgcctcagcctcccaagtagctgggattacaggcatgtgccaccacgcccagctaattttttgtatttttagtagagatgaggtttctccatattggtcaggctggtcttgaactcccgacctcaggtgatccgcctgccttggcctcccaaagtgctgggattataggcgtgagccactgcactggggccattttggtgttttcagcgtttcatcaacactctggtgcatgtctctctgccatgaggtgggagaacttctctggagtacttaccttggacagaatcactggatgggaggaaacacatattttaataaatgctgtctgattgctctccaaagaggttatatcagtttatccttacaccaagtgtttgaaagttgccatttccctagtatacttactgatacttgatcttgttggactttaaatcacttacttggtaagtgaaaaattaaaaccagttgatttatttcacatttacttggttactagagaagctgtgcatattttaattttatttatattggccatttaaacttctgtgaattacttgtatactctattcattcttctattggattctcagtatttttcaaattgtctgggcatggtggctcatgcctttaatcccagcactttgggaggctgacgtgggaagattgcttgagttcaggagttcaaaactagcctggacaacgtagtgagacctcatgtctactacaaatgaaaatttaaaaataaacaattggccaggcgcagtggctcatgcttataatcccagcactttgggaggccgaggcgggaggatcacctgagatcaggagtttgagaccagcctggccaacacagtgaaacctccgtctctactgaaaatacaaaaattacccgggcgtggtggcaggcgcctgtaatcccagctactcgggaggctgaggcaggagaatcgcttgaacccaggaggcagaggttgcactgagccgagatcacaccactgtactccagcctgggtgacagagctagactccatctcaaaaaataaataaataataataataataaattagctgagcatctgcggtatcacctgtagtcccagttactcagggactgatgtgagaggattgctcgagtgtgggagagtaaggctatagtgaggtatgattgtgccactgcactgcagcctggacaacagagtgagaccctgtctcaaaaaaacaaaaagtactttaaaaatcaatttgtagttctttatatatatggatagttacactgtgcctattataatatgacgaatattttctgccacattattgcttgtctttttttttttttgagacagagttttgctcttgttgcccaggctggagtgcaatagcgtgatctcagatcactgcaacctctgcctcccgggttcaagcgattctcttgtcccagcctcctgagcagctgggattacaggcatgcgccaccacgccccactaattttgtatttttagtgttggtcaggctggtctcgaactcctgacctcaagtgatccgcctgcctcagcctcccaaagtgctgggattacaggcatgagccaccgcgcctggcctgaagtctctttctttcttcagtgtttagtgatgcagattccatacttacgcaggggtatgtttctgggctctgttctgttcctcttttggctgcttctatgttaatacaactattttcatttatttgttatttaattttatttttttggcgagtctcactctggcaccccatctgaagtgcagtggcatgatctcagctcactgcaacctctgcttcccgggttcaagcgattctcctgcctcagcctcctgagtagctgggactacaggtgcatgcaaccacacctggctaattttttgtatttttagtagaaatgaggtttcgccatgttggccaagctggtctcaaactcctgacctcagctgacccacctgcctcggcctcccaaagtgctgggattacaggtgagagccactgagcctggctgactcctggctaatttttgtatttctactagagatggggtttcaccgtgttggccaggctggtttggaattcctgacctcaagtgatccgcctgcctcggcctcccaaagtcctaggattacaggtgtgagccactgcgcccagctgacacctggctaatttttgtatttctagtagagatggggtttcaccatgttggccaggctggtttggaattcctgacctcaagtgatccacccacctcggcctcccaaagtgctgggattacaggagtgagccaccgtgcccagctgtattaatataactttcaattaccatggctttgtagcacgccttggtatctggtgagtgctccttctttatcctttttgtgcagaaagaaaaactattcttgtatcttcattcttccaatataaattatagaatttgtatatcaagttcctcagaaaaattctgttgggatgaaaactggaagtagagtaagcttatagattaattggggaagaactgataactaaaatattgaatcttctcaactataagtcaactttatcactccatttattcaagaatcctattatatccttctatccaagtttgagtaatttctctatgaaggtctttcatattttaattttcatttaatttaattttttgagaaaaggtctcactctgtcactgaggctggagcacaatggcatgatcttggctcattacagcctcagcctcctgggctcaggtgatcctcctgcctcagctttccaagtagctgaggctacaggtgtgtaccaccatgctcagctaactttgagatttttttgtagagatggggtctcactatgttgtccaggctggtcttgaactcctgggctcaagcagtcctcctgctttagcctcccaaagtgctgggattacacccatgagccactgcacctggcctcctgcatatttttattagatttattccttagtactttctagtagtttttgttgagttttgtgaaattgatcatttaaaaaatatttgcggccgggtgcagtggctcactcctataatcccagctctttggaaggccgaggtaggcagatcatttgaggtcaggagctcgagaccagcctggcctacatggtgaaaccccatctctactaaaaatacaaaaatcagctgggtgtcatcgtgggcacctgtaatctcggctacttctgaggctgaggcaggagaatcacttgaacccgggaggtggaggttgcggtgagctgagatcatgccaccgcgctccagcctgggcgacagagggagaccctgcctcaaaaaaaaaaaaaaaaaatgcatagtctaattagtcacagctagtaggtagaaatgtttaatccttgtatgttgatcttgtgtccggcaaccaagagaatccaacatggttctcttggatttgcatcataaatgattatattgtttgctaagaatgccaattttgtctctctgattttttttttttttttttttttgagagagagtcttgctctgttgcccaggctagagtgcagtggcgtgatctcggctcactgcaagctccacctcccggattcatgccattctcctgcctcagcctcccaagtagctgggactacaggtgcccaccacctcgcccagctaattttttgtaattttaatagagatggagtttcaccgtgttagccaggatggtcttgatctcctgacctcgtgatccgcccaccgcagcctcccaaagtgctgggattacaggcgtgagccaccatgcctggccccttgtctctctgatcttattgatatcttgtccaactgtatggcaaggtgcttcaggacagtgtggaataataggtccatatctctaccttgtcctgaccgtcattcactcagtgaatatttattgagtacctaccttatgccaggtactgttgtagcttctggggatgtcgcagtgaacaaaacaaaatccctcccctcatgggaagggataccaaataaccaaatgtggtaagcagtaaccaggtgagcagtaacaaataaccaggaagggtaagagcagtatagtgtccactgcacaggcagggtcggtgttgctgttgcattcagggtggtcagggagggcatccctggccaggtgacctgtgagcagaaacctgaagagagggagagaggaagtctgtagagatctggggagaagaacttttcaggcagagggagcagcacctgactgatgggcaagtgcttgacatgcgcaaggctgagggaagccaccagtgggctgcagccatgagccagaggagagggatgggagatgaagtcagactgggggcatctcagatcacaggggtctcagaggccctttttttttttttttttttttttttttttttttttttttttgagatggggtctcactctttcacccaggctggagtgcagcggcgcaattttggctgactgtaacctccacctgccaggctcaagcaatcctcccacctcagcctcccaagtagctcggaccacaggcccgccgcacctggctgggagttttaccaagttgcccaggctggtcttgaactcctgaactcaagtcatctgcccatcagaggccattattaaaggcttggttttactccaagaagagctcatcagttctgagtgctgcaacttgacatacttttttaaagaattaatctgggccgggcgcggtggctcacgcctgtaatcccagcactttgggaggccgaggcgggtggatcatgaggtcaggagatcgagaccatcctggctaacaaggtgaaaccccgtctctactaaaaatacaaaaaattagccgggcacggtggcgggcgcctgtagtcccagctactcgggaggctgaggcaggagaatggcgtgaacccgggaagcggagcttgcagtgagccgagattgcgccactgcagtccgcaatccggcctgggcgacagagcgagactccgtctccagcaagaaaaaaaaaaaaaaaaaaagaattaatctggcttctctatccaaatgagaacctctgtgtaccttccattggcacacaaatggaagctgggagatgagttaggaggatttaacaatctgtgtaagagagactttaatggaggaatcagactgtggatatatcttgaagatagaacaggatttctcgacagattagatatgggtaagagtaagggagccaaacatggcttggagtctgagtgaagaagaggatggcattgccactgaaatggggaaaactataggaaatgtcgatctgggggaaagtcaggagtttggtttggaacatgttaaatttgatatgctttgttagacatcagaatagagaagtcaagcaggcagttggatatatgagtctggggataggtccagtttgaagattctatctgggagtcaccagagtatagattaagatgaataagatgagaatgcctaataagtagagaagacaagctgtctaaagactgatcccagagacatgaacacttagcggtggaaagggaggaataaacagcaagatcaaaggaagagcaattggaagccacctgaacaacgttctcaagggagaatccagtgtcaaaggcagctgaagggctcaccaagccagatctagaaaggcagaggtcattagatacataaagggccattttggtggaattgtgatggcagaagcatgggtaaggtagcctgagaggaggaggattaagagaagagaaaacaggagagtaattggagaccacatgcatggattttcctgtacaaggaagcagagaaatggagggatgtagggtcaaaggagacagctgtttcgttgttgttgctgttgttttgagatagggtctcactttgtcacccaggctgaagtgcagtggtgtgatctcagctcaatgcagccttgaactcctgggctccactgatcctcccaccccagcctcccaagtagctgggaacacaggggtgcaccaccacacctgcctaattaaaaatttcttttttatagagatgcaatctcgctttgttgcctaggctggtctcaaactcctgggtttaaacaatccccccatctcagcctcccacagtgttaggattacaggcatgagccaccgcgcctgtccttgttttgtttttttaatggagcaatataagcatgtttatatgttgctgagaatgaccttgttagagaaagggagcttattatgctggagagaaaacaggcaactgttggggttatccttaggtgagaaggaatcgaattagtgcccaagtagagaacagatagcttctccacagtgacaggagaaaggccatgtctgaggagaggtgaggtgaggcagatgggagcagagtcatcacctcagggtaaggaggtggagaggacgcgtaggacgtctctggagagcagatttgaaactggcatccaggagagaggaggcccaccagtcactccaaggaccactgagattaggtgtgaaggcagaactggaatgtgggagggatgcgtccatccaaaagatgagcttgagtttactgttttccattcattgcatgtctgtatcacaccactttctataaaatggtttgtccatttctccttaaaaaacttttgttttatatattttgaagatattggatggatcaagtttagaattgtaatattcctggcagatgttcactgatccattctgtttttcagaatctctgtttgtgtttgcctaagagttatatgtattatgactattacagtagcagacttcctttgattagtgtttgtctggtatatctctttccatccatttactttttacctttcactgtccttattaatcatgtctcttgtaatcagcatatacctggattttatgttttatccagtttcctgatttttattttagaaataggtagtgtagtccatttttacgaggtgacttctatatatttaggttcattcttaccatgttattttgggggatttgtgctttttaaatgtattttaatttatttatttaaatagagatggtctctcactatgttgcccaggctggtctcaaacttctagccttaagcagtcctcctacctgggcctcccaaagtgttggaattacaggcgtgagccactgagcccagcctccttttctgaggtgccttttttcctctttcttcccttcttttggattaactcctctcctcactccttttacaaaccctactagttttgaggctatattaattgggattacatttgcctacaaataacactaaaacatttctaaaaagtgatttaaacaagactgtttatttcattctcaagaatgtctcagatagtgatggtggagccacaggcttttttgtttccttgcagtttgatgccattaattggctttcattgataagatcttctcaactgtcagagtgctgctggatcccagcatcctaagtgcattccagccagcaaaggaaccaacagcaaaggagaacagctggcccacgcactgcttctgcttccactgctttggccagaatttagacatacaactatgcatatcttgctgcaggggagtctaggaaatgcttgattccaggctatgtgcccagttaaaaataaaaggtccacacagatcacttgttttcagaagcctatgctgtgcttagtagacagtgtgcacattatagagagttggcataatgctaacaacagaatccttattctaatcctgatcctagtataacttgttgtaggattctagtacttcgcatgccatgcctcagagttttaatgtgacagtactggctgggcacggtggctcatgcctgtaatcccagcactttgggagccgaggtgggtggattgcctgaactcaggagttcgagaccagcctgggcaacatggtgaaactccatctttactaaaatacaaaaagttagcggggcgtggtggcgtgcacctgtaatcccagctacttggaaggctgagaccggagaatcacttgaacccgggaggcagaggttgcagtgagcccagattgcgccattgcattccagtctgggcaacagagctagactccgtctcaggaaaaaaaaaaaaaaaaaaaaaaattgacagtactttgtcctgggaaattcacactatgcctaaaggcttgctgtgtttcatttcctctgaataaagttgctgttagatatgaaggaaaaaaaatcaaaagttctgtgtatggctgggcgtagtggcttatgcctgtagtcccaacactttgggaggctgaggcaggtggatcacttgatcccaaaagttcaagactagcctgggcaacataatgaaaccccacgaaacaccatgcctggctaattttatattttgtatctctataaaaaatacagccgggtgcggtggctcacgcctgacctcgtgatccgcccgcctcggcctcccagagtgctgggattacaggcatgagccactgcgcctggccgaacctgtgtcttaaaaaaaaagaaagaaaaggctggacgcagtgcctcacgcctgtaatcccagcactttcggaggccgaggtgggcagatcacttgaggccaggagtttgagactagcctggccaacatgatgaaatcccgtctctacttaaaatataaaaatcagccaggcgtggtgcgggcgcctgtaatcccagctactggggaggctgaggcatgagaattgcatgaacctgggaggtggaggttgcagtgagctgagattgcgccactgcactccagtctggacaacagagcaaagcgattctcctgcctcaacctcccgagtagcttggactacaggcatgtgccaccacacccggttattttttgtatttttagtagagatgaggtttcaacgtgttggccaggttgacctcaaactcctgacctcaggtgatccgcccacctcagcctcccaaagtgctgggattacaggtgtgagccaccgtgcccggcctagtagtttcttaatgttttgaaaatgagttgttgttactgattttttttttttaatttgttggtggttgggagaagtcagcttgtctgacactcactggtttgtcttagccagaatcagaagtgattacaattgtcaatgttgaatcagtcttgcattctcagaataaacccagctaaatttatgatatattattttagtacactgccgggtttaatatgtgatttaataattttgtctttgttcatgagacattggcttgtaatctttcctttctatccttgtcctgttgtagttttaaggttctctagcttcaaaaatcagtgtgggacgtttcctcttctcatagtctctgaaggaatttaacaacaggattttgccaggtgcagtggcccacacctgtaatcctgcactttgggaggccaaggtggacagctcacggtcaggagttcaagaccagcctggccaacatggtgaaaccccatttctacaaaaatacaaaaattagctgggcatgatggcgggtgcctgtaatccgagctacactcaggatgctgaggcaggagaattgcttgaactcgggaggcagaggttgcagtgagctgagatcccaccactttactccagcctgggcaacaaaacaagacaagactcggtctcaaaaaaaaaaaaaccaggattttatttcatggttgtgtataactctagttttgagtatcttttctagtatagctatatcacattatcctttactcattcctaatctttatttgcatctgtcttcttttgatcttgatcagtctgacagggtttgttaattttattaatcctcttatttttattaatttctcttctctttgggttaattgtattattcccttactaatgtcttaaattggaagctaattcatttttttcagcctgtccttttatataagctttgaagccgatgcatttctctttaactactactttagctgtatctgacaagatctgcaacttccactgtgatttctttgacgactgggttatttagatgtgtaaatctttgtttttatatgggagtttattagttatgttttcattactggtttctaacctatttatattaatgtcaaaaaacatgatctggtggctcatgcctacaatcctagcactttgaaaggctgaggcaggaggatcagttcagcctagaagtttaagaccagcctgggaaacatagcaggacctcttctctatttaaaaaataaataaataaataaaaaattaggccgggcgcagtggttcatgcctgtaatcccagcactttgggaggctgaggcaggcggatcacgaggtcaggagttcgagactagcctggtcaacatcgtgaaacccccatctctactaaaaatacaaaaattagccaggtgtggtggtgcgcgcctgtagtcccagctacttgggagactgaggcaggagaatcgcttgaacccgggaggcagaggttgcagcgagccgagatcgtaccactgcacaccagcccgggcaacagtgcgagactccatctcaaaaaaaaaaaaattagctgggcgtggtggtgcactcctgtagtcctagctacacaggaagctaaggcaggaggattgcgcacgcacagaaggtcaaggctgcagtgagccgtgatggcaccactgcactccagcctgggtgacaagacagagaccctatctcaaaaacaaaacacatgatctgtatgatacccagtcagttctttgtaatttaatttattgtatattttatggccaagaatgtggtcatttttagcaaatgttccatgtgtgagaagtatattttatatgaggtttagagttttctgtctgtgtgcgtgcgtgtgcgtgcgtgcatgtacacacagattttctttttagtcagagtctattcatctattgacagacacttgggttgtttctaccttttggctactgtgagtcaaactgctataaatattggcgtacaagtatctgtttaagtctgttttcaattcttttgggtttatacccagaagtggaattggttgatcatgtggcagatctatgtctcgctttctgaggaaccacccaactattttccacagcagctgcatcattttatattcctaccagtaatgcacagggttccaatctctccacatctttgcaacacttgcttccacttttcttgatagcttttggggtttgtttgtttgtttgtttgttctggagacagggtttcactctgctgcccaggctgaaattaacaatagtgccatcatagctcactgcagccttgaccttctgggctcaagcaatcctcccacctcagcctcctgtgtagctgggactacaggtgtgcaccaccatgcccagtttgtttttttttttttcttttggtagagaagaggtctcactgtgttgcccaggctggtcctgaactcccaggctcaagtggtactccacctcggcctcctaaagttctgggattacaggcaggagccttgatagctatcttaatgggtatgaagtatcattatggttttgatgtgcagttccctgatgactaatgctgttgagatgttgagcatatttactgaacatctatctttggagaactatccttgtacattttaaaactgggtttatctttttgttgttcagttgtagggaattcttatatatatatattcttggcattaaacccttatcagatacatgatttgcagagattttctcccattctgtgcgttggcttcatttcttcatagtgtctttttttctatgagacagagtctcactctgttgcccaggctggagtgcagtggcacaatctcagctcactgcaccctccacctcccaggttcaagtgattctcctgcctcagcacccccgagtagctgcgattaataggcatgcgtcaccagcctagctaatttttgtattcttagtagagacagggtttcaccatgttgggcagactggtctcaaactcctgacctcaagtgatacacccacctcagcctctcaaagggctaggattataggcataagccaccacacccagcttttttcttcatagtgtccttcgatgcataaaaagttttccatttaatgacgtctagtttatctgcttttttttcccttctttatctgctttttttttttccccttctttcattgcttatgcttttggtgtcttaagaaaccattgcaaaatccaaggtcatggagatttggtcttatgttttcatctgagagttttgtttgtttgagacagagtctccctctgttacccaggccggagtgcagtagcgtgatcttggctcactgcaacctctgcctcccgggttcaagtgattctcctgcctcagcctcctgagtagctgggattacaggtgtccaccaccaagcccggctaattttagtatttttagtagagatggggttttgccatgttgaccaggctggtcttgaactgccgacctcaccttggcctcccaaagtgctgggattacaggcatgtgccaccacatctggctattttttgtatttttagtagagacggagttttgccatgttgcccaggttgctctcgaactcctggcctcgagtgatctgcctgccttggcctttgcctttcaaagtgctgggattacaggcgtgagcctccacgttcataaccatgatccctctgatttctcccatccctctgtccccttttagaactctgatagatgcatgttctttctcttccatgcctctgaatctctttttagtagtttttcttttttattacttagtccctacttctgtttctaaaaagataaagtacccaggtgcagtcttatataataattaagactcccttttattcccactcttctttaaactaagccagacacaggtccccactgtctaccctggggagctcattttattccccccagcttaactattcatttaaaattaaagttttattctattcatggggcagctgaagcattttgtacctgaagcctttcagccctcctctccctgtagggctctgctactcaggacaagtcctcagcagggttgaatctctgtacgatctccagggtggccttgtttctatgatggcctgattttcctcctgctctagttccagagcccctgttttatctctttccattgtcttactatctctgctttgagctcttttacatattcttggataaatgttacaattttcatctattccctggcaacaatttctggtaagtattcatgtgccatttgctgttcctgtaatatctttaactcctgtgtcagttcccttttaattactaatttcttaatgaggtgaattctttcttgatgagctcttgtaagtagatcattgtgagagacgggccaggactgtgtcccaggctggcaggaatctgtacgtgggatgggtgcctggaagagttctatcaggattttcttctccacaggcaactacagggctcctcacagtgcaggacctccccacctctgtcattctccttgttgccggctaggttcaggaaagctcttgctgcagtccacactctttcttttttgtttttgagacagggtcttgctctgtcacccaggttggaggaatgcagtggtgccatcatagttcactgcagccttgaaaccctgggttcaaacaatcctcccgccccgccttgcctcctggatagctgggactatgggcatccactaccacacccagctaatttttgaattttttcatagagagagggtttcactttgttgcccaggctggtcttgaactcctgggctcaagtgatcctcctgcctcaagcctcctaaagtactgggattataggtctgagccactatgcccaagcctccttttttaatttcaaataagagattatttcaaataagagattattgggtatgctccttttgtttgtttggtttttgagatggagtcttactctgccacccacgctggagcgtagtgggcgtgatcttggctcactgcaacctccgcctcccaggttcagattctcctatctcagcctcccaaatagctgggattacaggcatgggccaccacgcctggctaattttgtatttttagtagagacagggttttaccaggttggccagactggtctcgaattcctgaccttgtgatccacccgcctcagcctcccccatcttgtttactttgtttgcttttcagtgatttctaagggggttggggatgggtggcactgtctttatgccagcaccttttgtgtgtggtgggggtgggggcaaggtctcactttgtcactcaggctggagtgcaatgctgtcatcacagctcactgcagcctcaacctacctagttcaagtgatcctcccaagtagctggggctacaggcacatgctaccatgcctggcttatttttgtattttctgtagagatggacttttataccccgtggcctaggcctctcaaagtgctcagctgtgccagtactttatgatttttttgaggcagggggtctcactctgtcccccaggctggagtgcagtggcatggtctaagctcaccacagcctctgcctcccaggtagctgggaccacagatgcgcactagcacacccagctaattttttgtatttttggtggagacctcctgcctccctaagtgctgggattacaggcatgagccactatgcccggctgatgccagcactttaaaactagaagtcataatacaagatcaaccttgtattcctgggttaaagagacttctcgattaggatatttattttttacaattcttctgatagatcctatttgcttatactttaagacttctacatttatgttagtgaaagtggtccattcttggcatgtcctatctgctctcagagttcttaaaaccagttgcatcattttccatgtttatttaatctctggaacggaatatataaaaaagggatttcctgttctttgaaagtttttaatacctcagctgtaaaactacttacacctagttcctttttctgagaagagttctgcttcagtttcttaaaaatatttatgagtctaatcagattttttattttgagactgagtctccctctgtcacccaagctggagtgcagtggcgccatcttggctcactgtaacctccacccgctgggttcaaatgattctcctgcctcagcctcctgagtagctgggattacaggcatctgccattatgtccggctaattttcatatatttgtagagacgggatttcatcatgctgcccaggctggtctttaactcctgacctcaggtgatctgcctcagcctcccaaaaagtgctgggattacaggcgtgagccactgtacgcagcctctcttaagaccatgatttatgtttttctggaaaatgttttacatttacactcagttttcatatttgttgccataacatatcctcaggaaatgggatggggttggctttatattgtttgtgtttttctcaatgagaatggattaatgtgtagataaaatgaagaccaccgccatcatgaaataatgagttctaccctaagggagtgtgggaggagattaaaagcatgatgccatcccaccaaaccctgtgctgtgctaaatcagtctttttccaccctctgtttctcagtcttaggaaaagtcctcagtgctgtgggcagtgcccagctactgatgtcccagaaattccagcagttccggggcctctgtgagcaaaacttggtgagtgtgattctccttcctccacagcagggcttccagcctttggctgcccactatactctgccagcccctcgaagcctctgtgccctcctctgtaacacacacagcgcggcttcctcatggtgctggaaggacagtggcaatgtgtgtcagtgtctagcacaagaaagggggcaaaagtggccctatcagatctctaatatctttccatgttgaaacagccacatggatggtaaagtcaattagcactggtttatttatataaaatatattctgtatcggccgggcacagtggctcatgcctgtaattccaacacttgggaggctgaggcgggtggatcacctgaggtccggagttcgagaccagcctgaccaacatggagaaaccctgtctctactaaaaatacaaaattagctgggcgtggtggtgcacacctgtaatcccagctactcgggaggctgaggcaggagaatcgcctgaacccgggagacagaggttgtggtgagccgagatcgtgccactgcactccagcactccagcctgggcaatgacagcgaaactctgtctcaaaaattatatacatatatattttttggccaggcgcagtggctcacgcctgtaatcccagcactttgggaggccgaggcaggcagatcatgaggtcaggagatggagaccctcctggctaacacggtgaaaccccttctgtactaaaaagacaaaaaattagccaggcgtagtggcgggtgcctgtagtcccagctactcgggaggctgaggcaggagaatggtgtgaacccgggaggtggaacttgcagtgagccgagatcgcgtcactgcatccagcctgggtgacagagcgagactccgtctcaaaaaaaaaaaaaaaaaaaaaaaaaaaaaaaaaaaaaaaccaaagaaatcccactgctgggattggtggcttggctttctccctccctcttacctgttaggagggctggccctgccagggtcaaaagcaaagtcctgggctgttctgcctgtgggaatgtgtgtactcccagcgggaggcagtggagtgagtgtttgtctccaagacctacagagacttgggggttgcgttgtcatggaacagagtgacacgagggaaacaacacagattctgtgacctttcccacctgggagtgaatcgggcttctctcggtgtcactgtcacaccatggccaagaacttctgtttcttccctgcaaaacgagaatacctgtctgctagcatacacatacattagggacaggagtgccttccttgccacagcccttagactatcccccaaagatccccaccactagggctggtgctgaccagaactggcttagattcattcatacagatacttacccagacactaggcctcaagagcccccgcgggtgctggcagggcccagaggaaccctgcttgttggggggttggggggagcaggacaagcctctgctgagctggccccactgatccccatctggcccacagaaccctgatgccaacccacgccccacagcccaggacctggcagggttctgggacctgctacagctgtccatcgaggatatcagcatgaagttcgatgaactctaccacctcaaggccaacagctggcagctggtggagacccccgagaagaggaaggtgagcatggagcagtgcggaggggaagtccagggacaaattcctggtcggcaataacgctgcccacatcggtcagtgctgcttggctcccttctccgtgtgtcgtctttgagctggggtctcacatccatcactgcgtggggtccatgcttggcacttgtctggcatgccgcttgctccgtgtagttgaggctgcccctgaagcatgtgtcctgccctgcatgtccagaaaaggggatcctgggagaggcacgcccacagcctcaatcacgttataacagaggaggcagcaaaaatggtcccttctcctggggccctgctgccaggagtcctggggtctggagccagctctgtgaccttgtggtagccagcctcttccctgaggcttccttctgcaaaccagaaccagtgacccctgttgaaccgtggccctgtctaatcccctagaatagcctgtaaaatgggacctgaagccctaaatttgtctctgactgtgactcgggctagttcctgcccgagtctcgggctcccggtgattcaacatgagggtggacaatgggatctgcccgtccccgctgctcgagcgctctcggagtctaggcttgctttctgctccagtgccttgagctcttcccactgtcagtcatcgcttctcgtggcttcctgattccaagtgtgtgttgcttgtgcccgatgcggggaggctggggtggagactccagctgccggcatatggtgggggtagtgccacacaaaacgtggcacctttattttatttttgttctctcctcactgtctcactaaaggaagagaagaaaccaccccctccggtcccaaagaagccagccaaatccaagccggcagtgagccgcgacaaggcctcagacgccagcgacaagcagcgccaggaggcccgcaagagactcctggcggccaagcgggcagcttctgtgcggcagaactcagccaccgagagcgcagacagcatcgagatttatgtcccggaggcccagaccaggctctgagaccatgcaggaggaaagaaacgattttaaatcattaaaaacacaaaaactaagtgcgaacggaacagagttttctcaacctttgctatggttattctgtctagagaccctgagccaactttcaaattgacgcatacaagggctcacaatttggcttttttgggtccctcccagctttaggttatgaagattttactcacaaaaaaaatcaacaaaaatcacgaaactagaaaactttttttttcctcttgctggccgtggtggactagatagatggacgtcggcaactcccggcccagcctccatactgcggtctttttactcgttctatctgatgagaactcacactagcttgtttacaagatgacgacagtccaagggcagccttgggcacctgccatgtccctcctttccccagctatccccgctctgaccttgattttcattcttatgtttttctcttttcccttcagagctcacacagtggtcaccattgtggcaagcggctttctgggtctcagccctctctgcggttgagggcccagaggacagagagatggacatgcgtcccctccctccccccgccaagtgctcacacacaacctcacgcgcacacacacacacgcagatggaggcgcctcactgggaggtgccccgccagccctgggcagtgtcaggcaggactcactcaccgctgagcagatgagggaagttttagtcttggcgggtggaaatgagacgaagccacagttatcacactccagactcctgcccttttattttctccagccccttcttccttcagcaaaatctaggactcccgagtggcttccagggggccgtcagtcctcagccgcgcctgtgtccggtgcccgaggggcgggcggcggtgtctgtatgtatgtgtacatatgcacatagaccttagagtgtatagttaacaaacgcccatctgctcacccatgcccacccagcgccgccgccgctggctctcggggcacctggcaggaggcgggtgtgtgaatagcatatatttttacatgtactatatctaggtgtgtgtacaagtgtgtgtaaaaatatataccttgtgtgtaagcagccctttttttttttggtctccacccccctccccccgccccgcactcctaagggcccatctgcccagcctctgagttttctgttctattttttttttaaccccaattatccttctctctctcctgcccccgcatcccactcccagggtgtcacgagccctgagctgcaatggcccgggcctgcagggcggggtaggggagggcaggggctgagccccgaagccagctcagtacctgaggggctgctctatgctgtgtatgcgcctctctggcatccgagacatcctcttggctggcgcttgctgcagggggggacccccccccgtccccaggtgaaccaagggtct

SEQ ID NO: 8539 - DNA, 145 bp, Homo sapiens
tcaagcaattctcctgcctcagcctcctgagtagctgggactacaggcacgtgccaccacacctggctgatttttgtatttttagtagagacggggtttcaccatgttggccaggctggtctcgaactcctgacctcaggtgatc

SEQ ID NO: 8540 - DNA, 151 bp, Homo sapiens
aggttcaagcagttctcctgcctcagccttccgagtagctgggattacaggcatgcgccaccacgcccagctaattttgtatttttagtagagatgaggtttctccatgttggtcaggctggtctcgaactcctgacctcaggtgatctgc

SEQ ID NO: 8541 - DNA, 195 bp, Homo sapiens
tcacatgccagctctgtgatctggggcgggaagatggagctgaccgtcccctctcccgaaaatcagtgtgcagcacttaccagcttcctgtttgaaataaacccttgaaagatagatgctatcacaggagccaggataggctgataaagacgaccctagaggacagtttacaccccccacagatccacagtctgc

SEQ ID NO: 8542 - DNA, 195 bp, Homo sapiens; identical to SEQ ID NO: 8541

SEQ ID NO: 8543 - DNA, 1703 bp, Homo sapiens
gcgcggccggattcattcctttggggcgcggagcatggaggagctgtgcggccgcaggcggagcagggcggcccgggcggcggtggggacaacggtttccctttgaaggggacggacaaagcccgagtgaccagcggcggcggggaggactagtccccgggcaggtagtggcggcggcagcggcctgccagggctcgggccggggcctgaggtgcccgcggaaggcctgggcgggaaggagggcgccgggggagccgaaggcgggcagcgggctggaggccacagcttggcccatcgggagggggttgtggtcgatggaggagattgggagggggctgccgttgtctggaacagggagaggggaaggttgtgttggggcgactgtggtttgaggaacctgcggatcatcccttggcggggggtggggggtgatcgaaatggggcgggcgaagttaatgactaaaaggcaggcggatttcctgagagccgtgagtagttttaaaggaaagagaatctttcggggcacagttttggccttagccggggtttggtgtgtccgacctttttgttctttctcgaaacccggcctcaggccttccagcctggcgcccttggccagctctcctgcagttgcaagaaagagaaacatttctgaacccgagtctcctgcctctttcggttgtactctccctgggcgtgtgcaaagcaaaactagaacaaagcttggctggttagagctggaggcgagaaaacgggctgcctgtagtgtttaaattttccgcacatggaggagactgcctgcgaccagaacatttgggtctctgtgtatccttctgtatttttctttaccaccttttctttgggggtgggggggtgtgtgggatggagtagtgcctgaagtatagcttttattcctttcttcccacagaagtggaaattaagaagtgttttgccttcttctatagaaaattaaatgctgctactttttttttctttctctagtttggtgccctggttgtcagatgttggaaagcagtaggacggaacatactcttcgtggttgtgtatccgttctggggtgcagcaattaacattggactttggttcctgtgactcttgcctgtgtcgatagagttaaactggagctctgctttgaaagataaataaagcacagcctctcaactggacataaatggatctaaagacagcagtatttaacgcagctcgggatggcaaactccggcttctcaccaaattgttggcaagcaaatccaaagaggaggtttcctccttgatctctgaaaaaacaaatggggccacgccactcttgatggccgccaggtatgggcaccttgacatggtggaattcctcctagagcaatgcagtgcctccatagaagttgggggctccgtcaattttgatggcgaaaccattgagggggctccccctttatgggccgcttctgcagcaggacatctgaaggtggtccagtccttgttaaatcatggagcatctgtcaacaacacgactttaaccaattcaactcctcttcgagctgcgtgtttcgatggccatttggaaatagtgaagtaccttgtagaacacaaagctgatttggaagtgtcaaaccgacatgggcatacgtgcttgatgatttcatgttacaaaggacataaagagattgctcagtatttacttgaaa

SEQ ID NO: 8544 - DNA, 1703 bp, Homo sapiens
gcgcggccggattcattcctttggggcgcggagcatggaggagctgtgcggccgcaggcggagcagggcggcccgggcggcggtggggacaacggtttccctttgaaggggacggacaaagcccgagtgaccagcggcggcggggaggactagtccccgggcaggtagtggcggcggcagcggcctgccagggctcgggccggggcctgaggtgcccgcggaaggcctgggcgggaaggagggcgccgggggagccgaaggcgggcagcgggctggaggccacagcttggcccatcgggaggggttgtggtcgatggaggagattgggagggggctgccgttgtctggaacagggagaggggaaggttgtgttggggcgactgtggtttgaggaacctgcggatcatcccttggcggggggtggggggtgatcgaaatggggcgggcgaagttaatgactaaaaggcaggcggatttcctgagagccgtgagtagttttaaaggaaagagaatctttcggggcacagttttggccttagccggggtttggtgtgtccgacctttttgttctttctcgaaacccggcctcaggccttccagcctggcgcccttggccagctctcctgcagttgcaagaaagagaaacatttctgaacccgagtctcctgcctctttcggttgtactctccctgggcgtgtgcaaagcaaaactagaacaaagcttggctggttagagctggaggcgagaaaacgggctgcctgtagtgtttaaattttccgcacatggaggagactgcctgcgaccagaacatttgggtctctgtgtatccttctgtatttttctttaccaccttttctttgggggtggggggggtgtgtgggatggagtagtgcctgaagtatagcttttattcctttcttcccacagaagtggaaattaagaagtgttttgccttcttctatagaaaattaaatgctgctactttttttttctttctctagtttggtgccctggttgtcagatgttggaaagcagtaggacggaacatactcttcgtggttgtgtatccgttctggggtgcagcaattaacattggactttggttcctgtgactcttgcctgtgtcgatagagttaaactggagctctgctttgaaagataaataaagcacagcctctcaactggacataaatggatctaaagacagcagtatttaacgcagctcgggatggcaaactccggcttctcaccaaattgttggcaagcaaatccaaagaggaggtttcctccttgatctctgaaaaaacaaatggggccacgccactcttgatggccgccaggtatgggcaccttgacatggtggaattcctcctagagcaatgcagtgcctccatagaagttgggggctccgtcaattttgatggcgaaaccattgagggggctccccctttatgggccgcttctgcagcaggacatctgaaggtggtccagtccttgttaaatcatggagcatctgtcaacaacacgactttaaccaattcaactcctcttcgagctgcgtgtttcgatggccatttggaaatagtgaagtaccttgtagaacacaaagctgatttggaagtgtcaaaccgacatgggcatacgtgcttgatgatttcatgttacaaaggacataaagagattgctcagtatttacttgaaa

SEQ ID NO: 8545 - DNA, 1886 bp, Homo sapiens; identical to SEQ ID NO: 8060

SEQ ID NO: 8546 - DNA, 457 bp, Homo sapiens; identical to SEQ ID NO: 8059

SEQ ID NO: 8547 - DNA, 1218 bp, Homo sapiens
tagcaggtaagtccattttatcatgtaatatttacatggatttgctcattgtttaggagagagtggcagtggaactaaaacactcccttctcattaggacctggctgtggataaaaatttctccccaggtccatcccatcttatgcagtgacaatgacctgtaatgctatcctgacaccaactggtaacatactgcagtataattcccgggctaaccacccagagtcagcacagaccacacaagttccagggcatagtcctcaaaaagatgcccttacttcatacgccaactgctttttgggtgaccccaggccactcatactttggaccaaataggtacaaattcaggggttaccatcatcccttcagtttgataattcactagaatgactcacagaattcacaggagcacagtacttgccattacagttttattataaaggacacagatcagcaacagccaaatgaagagacacatggggcaagatctgagtgggttttgaacacagggcttctgtgccctgtctttgtggaatctgggtacatcacccttctggtacggtgatgtgtttaccaaccaggaagctccactgagcttcaatgtccaaagttttcacaggggtttcattacgtaggcatgattgacctaatcatctgccgtataattgagctcagtctcagcccccttgtactctccagagccgggctgactcaaagctctctaatcatgcagttggtctttctggtgaccagcctctctcctgctgagtcatcccatctcttagcctaaactcagatgtgatccaagggctcatgaataacacagaaacttctgtcatttgggaaactccagggggttttagaaatctccctcccaagaatcagggacaaaactagtataagtctttattatacatcaggtgtactgcatttttctgcacattcatttgtgcttttaattaagcacttaattggaaagaaattttaaatcttaactgaaagttagccccttctcttctcttcctcttatacacgattacattcattcctcaaaatattctcttcacattatttaataaaactgatattaatccactactttctaaaacttccatcattctaattcagatagccttcaactgtcacctagaccatgacaggtgccactaaactggtcttttttcttccatacttgcccctctactgactatgcctcaa

SEQ ID NO: 8548 - DNA, 1223 bp, Homo sapiens
tagcaggtaagtccattttatcatgtaatatttacatggatttgctcattgtttaggagagagtggcagtggaactaaaacactcccttctcattaggacctggctgtggataaaaatttctccccaggtccatcccatcttatgcagtgacaatgacctgtaatgctatcctgacaccaactggtaacatactgcagtataattcccgggctaaccacccagagtcagcacagaccacacaagttccagggcatagtcctcaaaaagatgcccttacttcatacgccaactgctttttgggtgaccccaggccactcatactttggaccaaataggtacaaattcaggggttaccatcatcccttcagtttgataattcactagaatgactcacagaattcacaggagcacagtacttgccattacagttttattataaaggacacagatcagcaacagccaaatgaagagacacatggggcaagatctgagtgggttttgaacacagggcttctgtgccctgtctttgtggaatctgggtacatcacccttctggtacggtgatgtgtttaccaaccaggaagctccactgagcttcaatgtccaaagttttcacaggggtttcattacgtaggcatgattgacctaatcatctgccgtataattgagctcagtctcagcccccttgtactctccagagccgggctgactcaaagctctctaatcatgcagttggtctttctggtgaccagcctctctcctgctgagtcatcccatctcttagcctaaactcagatgtgatccaagggctcatgaataacacagaaacttctgtcatttgggaaactccaggggttttagaatctccctcccaagaatcagggacaaaactagtataagtctttattatacatcaggtgtactgcatttttctgcacattcatttgttgctttttaatttaagcacttaattggaaagaaattttaaatcttaactgaaagttagcccttctcattcctctatccctcttatacacgatgtacattcattccatcaaaatatctcttcacattatttaataaaactgatattaatccactactttctaaaacttccatcattctaattcagatagccttcaactgtcacctagaccatgacaggtgccactaaactggtcttttttcttccatacttgcccctctactgactatgcctcaa

SEQ ID NO: 8549 - DNA, 679 bp, Homo sapiens
ctgctatgctctgccctttcctcccattcataggctccagctacatggactttgctgtttccataatatgccaagcttgtttctacctaagggcctttgcaaatgttcttctttcagcctgcagcactctacttgttcctttacatcctgcacatctctccttaaatgtcatcaactcagagaggctttctctggtcaccttttctaaagaggtcccatctccccactatgtcattctttatcctcttaccctgatttttcatttccccaaaacagctatcataatctgacatcatgttgcatatttgttttttattgtatgtctccttcatttgaatgtaacctgcattagggcaacaactttgtttttttcattgttgtattatcgggacttagagcagtggctggcacatagtgggcgcttagtaaatatttgctgaatgaataaatgactgaataaacaaatgaatgaacaagaaataagtaatgatatatctttagtgacttagcctagattcttaataatgcaagtgatagctagagtaaaaatgtatggcagctgaaagcacaggtattagtctgtctcagttcacatgccagcttggccatttcctagctgtgtgaccttggggaatttgcttaacctctctgagccttattttgtctctttaaaaaaaga

SEQ ID NO: 8550 - DNA, 679 bp, Homo sapiens; identical to SEQ ID NO: 8549

SEQ ID NO: 8551 - DNA, 135 bp, Homo sapiens
ggtggcaggcgcctgtaatcccagctactggggaggctgaggcaggagaatcacttgaacctgggaggcagaggttgcagtgagccaagatcacaccactgcacttcagcctgggcaacagagcaagactccatc

SEQ ID NO: 8552 - DNA, 32012 bp, Homo sapiens
ccaatgtggcagaaacctctatcacaatcagcggcattgtgtatgtgatcgactgtggctttgtgaaactccgagcctacaatcccaggacagctattgaatgcttggtggtggtgccagtctcccaggcatcagctaatcagcgagcaggacgtggtggtcgtagtcgctcgggaaaatgttatcgcctttatacaggttagtgtggctttccctaagggtttttgactttcttatagtcagcctgggcaacagagtgtagcaaatgtttactcctaatggtagaacttaacataaaatacaggccttcctcacaaggccctgtgtaatcagatccccactgctttcctcactctaaatatggtgtttctttgttactagtccccattggccaaagctggcctgtgagtgactgcttatttgctatcctgttctaacctaacatctgggcacaggcctgtgtagccatttgtccctagggtgtgggctgtgtgtcctggagcctgtctttcttgcctttctttcttgacttaatgtgctgtttttgtattccaagatccctgagtcttgcggagcctcacattgggttccccttttacttctggttcagagcatctttgccaagtgaaaatggaaggtctgtccggagactcattcatagaaaacaaatagttggtgagctcctcctctgtgctgtgcatcatgctaggctctgagggaacagaaggcaattttaatactgtctcagcctttctggagctttctatccagcttgaagacagccttacctatagacagtgatggacccagagctgctctttctctgcacttctcttctgtggggaatgctgctgacattttccccagttgtccagactcaatttccaagtcattgttaattctcttctttatccagtatccatctgcattcacttaaccaggcccagggttttttattttgttttgtttcttctggtgtggctgcccctaaagaaggtccaggggttttagctctgccatttgtctcttcttttcctttctggttattattgtccttgttcagtctttgatgttgatctttcttttagcagatgtttgcagagcacctgctgtatgctggccacggtgctagagcttggagatctggggctagtaaccatggtctgtggccacagtgactgacagtctggtggtggaggtagacctcaaaacagatcagcatattatggtatgatagggagccataaagaatcgggagccttggaagcagagagcagaggcttttccttgggctgttttccctgcccagcagatcttccttatctttcaaatcctctctcagatggcagttccctcatgaagctaccttagatgccttctcctagaagctggtgttatccttctggggatttggggagtacttcacaaccagggtgttgtttgagcctgatcttactggcaatacagtccttatctaggcgaagaggtgattggggagattcaatttcagcgcaccaggcagagggaatggaaggtacaagtacttgcagggaaggaagtgggtttggaacattcacagaagggagggaataggcagaacccagggcctgaggaccaagggcaaccactgaagatgctaagaaggaatgactagagtggaaaagggagagccaggactgaaagggattctgacatgcagagaaggtttcaagacatttttctcttcaaaaattatttattggggtgaaatttacataacacaacattaaacacattaaagtgaacaatttattatattcacaatgttgtgtgaccactgcctccatctagtttcagaacatttcagccactccagaataaaatcccttatgctttaagcagtttctccccattctttctggctaccagtccctggaaatcaccaacctgtgttcttctcaatggatttctctcttttggatatttcatataaaaagtcatacaatatgtgaccttttgtgtctggcttcttttagcataatggttttgaggcttatctacattgtagcatgtacttcattcctttttattactgactaatattctgttgtatagataaaccacactttgtttattcatttattagttgtggacatttgggctgtttttgccttttggctattgtgaatagtgctggtatgaacctgcatgtacatgtacttgagtaggtgtttttaattcgttttggctattacagggttatatgtaattttgtttaacttttaaggagctcaagttacttttaaagaggccagcattatctcatgtgccaagaaatcatggactaaagataggcaggtggatttgggtgaaaagtcactgaatccctttgcatgagcagtttagtggaagtggggttggggagggcccctgactgtaatgagtgcattggtgtccagcctctaggcctccacaggagcctccagaaagtattgctttgaacagggtaccacctgctcagaccctccacattttctcaaaccatccaggatttttcctcagcttatcttctcctactaaccactacaaattgcttctcagctgaactactacacgacatgctctctgcatgagaaacgcttagataccttttccttgagctgtttcctctttgcccaacagatcctccttgtccttcaaatcctccctcaaatggcaacatgcagcttccctggaggccttcttccagccaccctgcttcctccttccctgagcctccatttctctttgggaggaccactccttgggacttttcctatttctccttgagggtcaactgtttctggtccaggtcccaggcccctgcatatcactgaagcttttcaaggggattggctgtgactcctacagcttctggccccatgcttcacacacttgagtcctcaggagagcttgcctgtcattgaacttttaggaaacacccacttcctgtgagcttttcagcagggtggtcctcttatgtgttaactttgtttctcctttggttagtagtgtgcttggaaaatggggttatcctatcaagaagctgtaccccaaattctcttgaaactaaaggaagtagctcatttggaacttcctgctgttggccgtcatccagaaccttctagttagacccaatttgtatcaattagtccacagaatattggttgtctgttttctcaaagaaaacctttctgaagtttttcggggatagtggtatttcttcatggcacttttttttttttcctctagttaactaaagctttatgatctaaatggaagttgggtcacccttgtattgtttaagaagggtgtacatcagttacaatgttgactgatgtgggaggttttggtgggtggagcattctctatataatccttaagctttctgaatatacatgaaaatgagttaatctcttcctcttttttccccacccttcctgcctagcttttataaaaaggccttcttccaaagtctcttctccttccccctccctttctgcccttcctgtcttgggatctctgtgtcttaggatgctttttcctgtgtaaggtcacctcttcttcctggtagggcatgtaaacattcatttcttggtttggggcagcattggattctgggaatgatattgtgtacctggcttgttgatttaaaaatttgatttggacaatttttgctctttataagatttggtcatttgttgtattttggtgatttatcttgaaattgttctttgcttgtatgtgaagctcttgcttccttgacttattccaaacagagatggtggcaactgggaactgatagtgattcagcaagtacttgttggtttgatttaatgttttgctgacaaaaaacattaaaaaacagaattttagataaagttttataaaggtgtattcaaatatatttatctaaggcattttaaaaatagaatggtctttcctaagtataaaaataactttatatcatggtatcatgtgcatctgcttctagaatcctagagacccttgttcaagatagagaagaaaatttgtcccttggcatagtgattgcatttgattgtgacatttggtcccaaacagttctgatttcctatcctcagaggaagcctttgacaagttgcctcagtctacggttcctgagatgcagcgtagtaatttggcacctgtcatcctgcagctgaaagcactaggaattgacaatgtcctcaggttccacttcatgtcggtaagtcctgcctgctgtctggggccatagggaggctagggagctcacagggggatgtcaggacattgtcgtagggcatgccatctttcctttttttccctactcaggtcatgtgttgtgtgtctgctttgcaaccaggccctgtgcaggacgtaggggaaaacagccagacaaggtagcctcaattcctattcttacatagttcctgttcttgtctgctggggaatagagacaagtaagtgggtaattacagagcagtgtgcccagggctctgagagacaaaggaagggcctcccaggtgaaacctgaaacccaaatagaatctcaccaggttaggagtggagagttccaggacagctagtctttgtagaggcctagatgcaggagtaccatgattgggggatccttcctgcagctttagatagagctgcaggaagacccttgtgcctgattgcttcctgagatgatttctaggagtagaatgactgggtcaaagggccgttgtcctgtttagggtcctgttacatggccagattgctttaccaatgtcaactctagcagtgcctgaatgcccaccttgtggtacttccattgtgccatgttatcttctttgggtttgctgatttgattggccagagagaggaaatcacctttattataattatttttaaatttttcataagatagatttttataaaaacatttattagtcagtttttatttcttctgagttgttaagctatttatctgttagaatttgtgtcagttagtgattttcaagagtcctttgaatattaaagacattaatttttataatatttcttacaaatattttctatttatattttactgttttttttttaatgtgtggacattctaaacatattcacagtaatctatttttgcctttatgatttctttggctattctttttttctttctttattttctgagacagtctcactctgtagcccaggctggagtgcagtggtgccatcttggctcactgcaacctctgcctcccaggctcaagtgattcttgtgcttcagcctcttgagtggctgggattacaggtgtgtgccaccacgcctggctaattttttatatttttagtagagacaaggttttgccttgttgaccaggctggtctcaaactcctgagcaggtcaggtgatccaccccgtctgggcctcccgaagtgctaggattataggcgtgagccaccacccccggcctctttggttattcttgcccttatgaagtacttcttatatttgggtcagttaatacatattctctcatattttcttctagaatttttatgatttgagaactttgttttttcccaactgtatatgatatgacaagtctggaaagtctggattcttggatagtaaagtccctaatgtcatatgtgatggtaaactaggtgaatgaaagaatagaacatacaaatatcaactcccccaaagaaaattgtgtacttaccataagtatagggaaaatggaccctttgattattggtgtagagtagaagatattataaagaaaagataaacaggctgagcgtggtggcttatgcctgtaatcccagcactttgggaggccgaggcaggtggatcacttgaggtccggacttcaagaccagcctggccaacatggtgaaaccccgtctctactaaaaatacaaaaattagccaggcatggtggcatgcgcctgtagtcccagctacttgggaggcttgaggcaggagaaacgcttgaacccgggaggtggaggttgcagtgagctgagattgtgccactgcactccagcctgggcaatagggtgagactctttcttaaaaaaaaagaaaagataaacagtatgtgctgatttgaaagcttatgaaaagccccgcatgtaaaattaaagaaaaacatacagtgacagaaatgacagatcagtatctcaaaaaatatgaagagtttttatatgcacatcatttacagtaaatattcactaaataaagctaaaggaaaaaaacagcacaaattcaaatttcaactatcattaggacatgttgagcttctctaggagagaggtgactgcacgttgatatagctataaaggatgactttacactaattttttttttttttgagacagagtctctctctgtcacccaggctggagtgcagttgtgcgatctcagctcattgcaacctctgcctcttgggttcaagtgattctcgtatctcagcctcccaagtagctgggactacaggaaagagccaccatgctcggttaattttttgtatttttagtagagacggggttttgccatgttggccaggatggtcttgaacgcctgacctcaggtgatctgcccaccttggcctcccaaagtgctgggattacaggtgtgagccactgtgcgcagttgactttacactaattaaatgattgagtataaacaaaaatggtgaaatcgaaaactgccacaatttgggaaagtaaattcctcccatgttataccgtttctgtccccatggaggactttctgacaacatttaatgagccgtagaaatgtctgctatttcttctcataaaaatttctcctgaaaaaataattcagaagaagaaaaaaagcttacatatgtgataatgcttatagcatttatattacatttaaaaatataaataatgaaaattatcgtaaaacttttggacagttgaaaaatgaaaaaaaaaatacaaatttatcttcacatatttccttctggttattatcccctgaaattgtggtttttatgattgaaattacagagtacatataattttgtatatttagcaatgttatttacaatggtgaaaaactggaacaatttaattgcccagcaataagaaaattgacttttttatggagtatgattgtcatagagtattatgcagccatcccaagtagttactgtgaagtttgtatgggtgcaagaaacaatgaaaacagaaaaacatgtagtgagaagaccacactaaaactatacataaacagtaattccagatatgttaaaacagtgtttctgtattatcccaaatcagttgaggtcacagagaaatactagtgaatgtgattagatgaaaatactatggataagatttttgtggagagggggataagttttttttgttaattgactggaaatcgggccaggaattgagtcagagctgaccttgttagctttttctgtaattgttaaaagcctagttcagagattgctattcctgttacctcatccactctcagtataaaagatcccacagggtttaagctccttcatttaagtgttgcccattttgcttctttgtagagaaagatgttgtaagcaccaaggaagggctagtggatcatttacatgatttgctcaatggtgatttgttgaatcctctctgtgtaatgaatccaataggtttagttcctgccctcgtgtgttcacctgtgtgtacggtcactacaacttttaaaaaagtttaactttggtctttggcaaacaaagtagggaaggtagactgggaaaaatgaggcctgagttcagctttgccaccaactgcctatatgaccttgttcagctgtcttttccttattgcagttcagtttcctcatctgtaaaactgagctaaaacaatgtgatgaataaaatacatttgttatgtgaatgcatttagaaaaaaatgctatgtgaatttagaaaaaatgcatttagaaaacatcctatgcagtttaaaaatgtactgtaattttattacctgggttattagaaaccacataatttagagagaaaaaatatgatgcctggcacttaggtgctcagtcaagatttgtagaaggaaaggaggtaaagatctggaaaatcagactgaggctcactacatcagctttgcttatgaactttaaggtctctagagctattattttttgaaattcagattcgacatatgttgtagtttccagacagggattaagaaaaaacaaattcagcgtatgttatttacccaccacggggcctggagtgggtctatgggggatgcaaagataaatcatccccgagccctgagtgctgcagtgtcctggggccccggtgtggtagaaggttgagtctgtgaagtaaaaattagaaatgtctcaggagggtttaaggaaaatgaagaggtagtttaagatagggacctatcacgtctgatggaggggaggatgagggagcacttcaaagggaaatgtttcatcaagctgagccttaaaggccaagcagtacaagggtgcctagaaggacaggaaggacatttcaagaggtgccaacagcaagaacagaaacatggaggctgggaagaatggggcatgttagaggggagaatggatttgaaaaggaaacagccacattttaatgtttgttgcccaaataaattgattcaggaagatttttatgttttttccagccccctccagcacagtcgatggttcaagccttggagttactgtatgctctgggaggtatgccagtttctctcatcattctctcttattatgtgttgtcttttgtgatattagtgaggtcatattcactttagggattttagtatcttcaggaatgggattggttctccccatatatataatccccctaatgatactttattgaaataggaagttgggaccataattagacacatgaaagctaattatgacagccagtatataaaacatgccagttcgtcagaagctattagtaagaatcaccagggctacactcctaagagatgtctagagatcagcagttccctaccaggatgtcagatcttacctccccagaccttttttctccacccaacaaccacatccttaaaaatcgtggctcagtattctctccctaaatcctcttcatttcattcctggagttgcttgtggagaattggggacattatcagcttctaacaccatgttacgggggaacttctattcagttgtcgattgaagatgttattaggttggtgcaaaaataattgtggtttttgccattgaaagtaatggcaaaacccgcaattgcttttgtcccaaccttaatagcgtttatcttgacatagagaaaatcatagtctgaattcaccgctttggggagtactgtttcttctgtgattggtaccacaaatgaatataatttccaattttgaattaagttttagtggagattttgctttttgagatttattttgagtgttactttttttttaagtagctgtattgaagtatagtttatgtactatacaattcactcgtttacagtgtacaaattcagaggcttttagcatattttcagggttgtgcaaccatcaccacagtctaattgtagagcatattcatcacccaaaaaagaaatctttacccattagcgccgaacttctcattctctttccccctagtcccccagcccaaggcaaccactctctggttcagtctctatagagagtttttatctctataggtgtgccttttctggacatttcatgtaaatggaattgtataatatgtggtcttttgtgattggcttctgtttcagtctgtctgctgttgctataacagaatgccagaggctgggtaatttctaaagaggtttatttgggtcacgattcaggtggctgaaagctccaagattaggcagctgtatttgaggagggcctcagcctgcttccactcaaggtggaaagcaaaaggagagtgggcgggtgcagagatcacatggcaagagaggaagccaggaagagaaacagaggaagccaggctcttttaagaacctgctgtcatgggaactaatccattactcaccctgggtaagggcattaatctgttcatgagggatcaccctcatgacccatacacttcccagtaggccccatctcccaacactgtcacgttggggatcaaatttcaacatgagctttggtggggacaaactacatccaaaccatagcagcttctttcatttagtatcatgtttcacaggttccttcatgttgtaacgtatattcataccttatccccttttatcactgaataatattctgttgtatggatataccacatattttttatccattcattagttgatagacatttgggttgtttccactttttggctgatataaataatgctgctataaatattagcatataaatgtggttttggtggacattcccaccagcaatgtatgagagttccagtttttccacattgttgccaatgcttgtaattgtcttttgtgttatagccatcctagtgggtgtgaaatggtatctcttggttttgatttgcgtttccctgatgagtcatgatgttgagcaccttttcgtgtgcttgctgcccatttgtaaatcttctttggagaaaagtctgttcaaatcctttgcccatttttatgtgtgctgttgtctttttttttttttttttttaaattgagttgaagttcttcatacattctgggcacatattcttatcagatatgtggtttgtaaatatttctcccatttttgtgttttggctttttacttacatgtacttactttttacttattagtattgtttgcagtacaaaaattttaagtttttgtgtggttccatttatctgtatttttcttttgttacgtgtgcccttggtgtcatgtctaagaaacttgcctaacttgtagtcattaagatattctcctaggttttatagttttggcccttacattaggtctgatccattttaagttacttttttggtatggagtgaggtaggggtccatcttcattcattatgttgattttacttctctgtgaatagccaattactgatttaaaagatctccagtgatttaaaagaccttcagctggatttacataagatcagcctggagtgaatgtgtgttggagaaggtttccacccccttcttctcaagcatgtaatgggaactcgaaagcacatttcctgggctgatctgtagtgaggatgagagaatgttgacagcataggagtttttatttgggctggtttttctccagtcaaacagaatgaaatttaagatatttcctatttcttcaataccctaaataagctggaaaagatagagggaccccccgcctccccccgccagcttcatttgatttcaagctgaattaccacctttaaagagatgtcttactgagctctgccttactgtgagatcttgcagcgtttaagtagtaaaacagtagtctatatcttgggaatccaatacctggatattggcaaggtattgccaatagagggcaagaagggcaggtggggagttgaaagagtcagcccagttcagcaaaatgttcaggaggcagttgcatgaacagggctggtgttggcaccagagggatctgggttagtgtttagattccaagttgctggccctgtagttgctcattgttgttctcattgtggctaataaagagatactcaagaccgggtaatttataaaggaaaggtttaatggactcacagttccacatggctggggaggcctcacagtcatggaagagcaaaggcatgtcttatatggcagcaggcaagagaacttgtgcaggggaactcccatttacaaagctatcagatcttgtgagacttattatcacgataacagtatgggggagactgcccctgtgattcagttacctccactcggccccgcccttgacatgtttacaattcaaggtgagatttgggtgggaacacagccaaaccatatcactcatttagtatgagaagggcacaggacacgggatgccatcgataccatcctggcacatctgtggcctgtccggtcctggaggtggtagaaagtccagacagtgagggggcaatggagatggcagagaaccaggagagttgggggccgggagctggcgaagagtagttccaagaagcagcggccagcagagccgagtgctgctgaggccatcaggaagatgccttgcgtttggtgctacccagttgttaggttcttgggaagagtggtctcttcggagtagtgggaacaggtgaggctcttgtggattgaggagagggtacaagcaggagaaggctgcagggggatttccttataattaagtccttgaatagaagtctttagaagtatcagttttttaaaaaattgggtattcaagagctcagtggagatcttttcttcttttaaggtaatggcactctagtgtcaaatggagtttggtgtagtgcatgaatcatcttttggatactttcttctttttagcatacattatcttttattctctcagcaactgtgtgccttccaacacaatggtacctgccttctgatttcttttgttgttcttatggcaggtctggacaaagactgtcgcctaactgaaccgcttggcatgagaattgcagagtttcctttgaatcccatgtttgccaaaatgctgcttgaatcaggtgggtagagcctgatagcttgaattgattttattttgactgtcagaggtgttgtttgcctgaattctgagcaccctggggaagagggtacaatatggtaaagaagtatatatatatctgtaacataacatttattgttttaaccattttatgtgtgtagttctgtgatacaaagtacgttcacattgttgtgcaaccatcagcaccatccatttctagaactttttccatcttttccattgaaactccatacttggtaaacacaaattccttattctctcctctgccccgcccctggcaaccaccactactttctgtctctatgaatttgactgctctgagaaccctcagaagtgcaatcacacagtatttgtccttgtgactctcttgtttctgttagcataatgtcttccaggttcatccatgttgtagtatgtgttaaaattttcttcatttttaaggcggaatagtattttattgtatatctataccatgttttgtttgtttatctgttgacagacactttggttgcttctaacttttggctattgtgaataatgctgctatgaacatggatacacaaatatcattttgagtccctgcttttatgtttattgggtatatagccagaagtggaattactaaatcatgataattctttaatttttaaaaatgtatttttaattgacaaataataattgtatatatttatgagatagagtgtgatgttttaatctatgtacacattgtagattcagtcaagcaaattaacatattcaccaactcaccaacttatcattttttttgtgctaagaatttgtgctaagaatgttaaaattctattctcttagcaattttgaaatatacgatacattattattaactgtggtcaccatgcagtgcaatagatcactaaaacctattcctccagtctaactgaaactttgtaccctttgatcaacacctcctctttctccattcaccccctgacccaggggatctcccagcctctggtaaccacctttctactctctgtttctatgagattgacttttttagattccatatatgagtgagatcatatggtgtttgtctttctgtgcctgccttatttcacttggcataatgtcctccagttccatttatgctgtcatgaatgacagtgttctcttcttttttaaggctgcatgttatttcattgtgtgtgtacatatttatataaaccacattttctttcttcattcatccagtgaatggacacttggattgcttccaaattgtggctgttgtaaataatgctgaaatgaatatgggaatgcagatatctccttgaaataccagtttcagttcctttgcatatatacctagaagtgtgattgtcagagcatataagtccatttttagttttttgaggtagtgccctactattttccattaataggtgtaccattttgcatttctgccagcagtacacgagggttccaatttctttgacttcttcagatttttgtgaggacatgggttctaggttaaaagatctggaagtcttctcgtaattagaaatcaaagtcatctagaaagtataatttgtttttttacctctgggaaagacagtttaattttttcttggttttgtctaacttttatgtcaactagcaatttatgaagatgtactttagacccagtatggggaaagctaactaattatgttttggaacaaccacttgttctcagccttccatttagaaacaggattcttttttttttttttttttttgagacagtgtctcactctgtcgcctagactagagtgcagtggcgcaatctcagctcactacaacctctgcctcctgggttcagttcaagcaattcttgtgcctcagcctcctgagtagctgggattacaggcatgtgccaccatgcccagctaattttgtatttttagtagagatggggtttcactatgttggccaggctggttttgaactcctgacctcaggtcatctgcccgccttggcctcccaaagtgctgggattacaggtgtgagctaccacacctggccgagaaacaggattctaagtgtggactggggaagtgcatcattcatgagatgggaggtagtggggagatgggacgagcagtgtagtgtactctgccttgtgccctggagtggtgattgctggtgactgtttccaggcgttccagcagcccccagcgtgctttgctggtctagttgtgccttgggcttcccagctgagatgaacccttttgagaaggaagccacttcatagaaggggtcaggagcagagaaacagcagaaggggcacaagccgctcattccctgtcccctctcggacttcctgccaggattccagatgttcccacaggagggtagggagcaggtgcggagctgacctgcccttagtgatggggccagtcttgaccttggcttatagtcagagtcccctatatttcagctgcagagggcagtaacacctccttttttggagtccttcaaggctactattcatctgggttacatatgggacttcacatttggctgagtgaaatatttttattttataaacttcatttttttgtttttatttttctgagagagggtcttgtgctgtcaccctggctggaatgcagtggcgtgaacttggctcactgcagccttgacctcccagctttaagcaatcctcctgagtagctggaccacaggcacataccaccatgcctggctaattgtttaattttttgtagagatggggttttgccatgctgcccaggcttatatactatacactttaaaaattaagctctagaaaaaatatgatcttagtcttcagtgtggtgcaaggaaagtatcagaaaatgtctttcacttcttgttggcacattatatggttgaaaccaaacatgctttttgttttacaggaaacttcggctgttctcaggaaattctaagcatcgctgccatgatgcagatccagaatatctttgtggtccccccaaaccagaagtctcacgcagtaagtcagctctgtccccaggctgtctgtaccagtctcttttgctttgagctttcgttgtcaaaactgtactcaggaactgctgaagacagagctgtacaaatgtgatctgctcatgttttgagtgtttattccgtgcttgatgttgtgtcaggtgttttgcaggcatcattccactttatcttcattataagcctgggaagtagatattattatcatattttatttatttatttatttattgagaggaagtctcgctctgttgctcaggctggaatgcagtggcgtgatctcagcccactgcaactgcactctgcctcccaggttcaagtgatgctcctgcctcccatgtagctaggattacaagcgtgctccaccacgcccggctaatttttgtatttttagtagagatggggtttcaccatattggccaggccggtctcgaactcctgacctcaggtgatccgcccttgacctcccaaagtgctggtattacaagcgtgagccaccgtgcccggcctattatcatattttaaagatggaggcatagagaggttaggtaactcattcacagttgcacagccagaattgttggctctggattcacagtccagagccccacaccttaaccattgaactaccaacttctagtttctgtcagggaaattgtcattcagactgctctgctagaaaccttggtgggcacattagtgacataagaagtcaggtgccagggtatagcaggctgattctgggcaccacacgacatcatggtcatgttgcaggtgggccattataagctagagagatccaatccccacctaaggtgcaggcatcagcaatgactaattgagtgaacactggaaagacggaaggacaagttttgatactgaagagatagatactcagaagtaaggtgtgttgatagaggtaggtcagagatgagttcaaagtcagttcctgtttgaaagtcagagaattagcagccttatgcatggaggggctgaatttgtatgtgtaatgaggaggagagagactttcttagggattgttgggatcctccttgtcagttgtataactatagattacaaagtttttctgcctctgtgcccagatgcttatgtctgtttttgtttagttttgtttttaattaacctggaggaggagagagacaagaacactaacattttatcaaatttctttgccagataccttgtaataaattatcttaatccacagcaatcttgataggtttagtttcctgattttacagataaggaaatcaaggctgagagaggttaagtaaccaagctgagttctttcaagatatggcagagctagaatgctgcaaactaggtctttctgaatccataacccacacgctattcaccatgcaatattacttccagtgcaaaagtcaatttctttctttctttctttttttcttttttgagacagggtctcgccctgttgccttggttggagcgcagtggtgcaaacatggctcctgggctcaagcgatccttccacctcagcctagtagctggggcttagaggcatacaccaccatgccctgctgatttttttttttagcttttgtagacatggggtttacctatgttgcccaggctggtctcgaacttctgggttcaggcaatcctcccaccttagcctcaccaaatgctgggattataggtgtgagccaccacacccagcaaagagtgaaattctgaatgttgcttcattctttccagattcgagtgcaccgtaaatttgctgtggaggagggcgaccacctcactatgctcaatatatatgaagcatttatcaaagtaagcacaactactgctcgaagtgccgcctcaacacaccaccctctggaggtgatctaggagggaggatcccagaagttcagttcgtaaaggaatgtccaagagagcccttgattttcctgttagatttattgccagtacttctaactggtgggtcgggctttctgcctgagtttgtggtgaggtattgctgagaagaacacaggaatcattcattgctttcccttgcttggagatatggtacactagtggcaggccagtggcccagcctcacgtcatctcacatccactgtgcagtagacagaaaggcaacatttgaataggaagttctgttacattttctgccaggtgaatgaggctgagagcaacttgtagtcctgggttgaatcttcaaagctgtcccagctgccatgagaagacatttagttgagatctgtgcatattcacatatcccacccatatttagctataagtgatgttaattttttattgttaatattctttaaaactaagcaaataatacagcttaaagttctcatgaaaaattgttaataaaggtgatgaaaatgatgaaaaaagtaaccttacataaaagaaagggtataatacttcagatttttaatactcatttcttaaatactcttttagaagtgaagaaatactaaatttttgtttaccagtgatttgaggaagattattcagttggtgaaaagttttcagaaaaaagaaattcactctttttgagacttacggcttaaatcagttaaaattcatttgtacaggcacaatgtatcatctgcagtctgaagctttctctaccactagaaagtgggtataggtctacattgtattattctatggttgccttcttggaatatcttctattaattacattttcttttttaaagcactttaacttacaatagaatttcagaggtacatttccacagcaataatttactctaagacataatgatcatacttatgaatgcagaaaaaattaaatactgttgatagaaaaatcatgctttggggacaaataatagtaatttgtaaattatttctacattggcaagtgtcatattgttggcttctagtataataaagtgatacattcaagcatgccaaagaagaaaagttgatttacaaagaaccacgtggagaaatggttctttctgatagttcacatctcatgaaggtatgtaagattgaaaccgtttctgcgtgtcattaagttctcatttgccctttagtgtaaagagtgaggttgcagagcagtcagatgtgtgcaaggttgttaacatctgttttgagagatggggcaaaaaagggccagttcccatctttagatcttatgccgttgaacagcacatgggggaagagagaagaatgatctttacaacatagccttagtcgagaacatatctgttttctaactccctctctctgggttgttctgtagcacaataaggactctaaatggtgtcaggaacatttcctgaattacaagggtcttgtcagagctgcgactgtaagagaacaattgaaaaagcttcttgtcaagtttcaagtgcccaggaagtctagtgaaggtgagaagaaaccgtcccagctggtgacctcccttgcttcattctgttgagttgtcttcctaaagttctcatgctgggctggtgcgaggcagtgtggcgtgctctgtaccaacactgggttttatattttgagttgcctgcatctgtgaaaagctgaaggtcaagttgcgtattttttccaaggaggtctatttttctttctgatgggcattcttactaaaggaatttcatagcccatgacaatacttaagaatcactaacagtcacatcagtgcacatcatgtcattgattttcccatgtaggctttgcaagaaaaattactttttgatcagtgatattagtagctattacataaaaattaaattttatattcaaagacaagtattattaaagcaagtgctggatatttagcctaggcagccactaaaggtaagacagaaaagtactatgtaagacgtagtctctggcctctagcagtgacagtgactactattaatcagggacacagtaggttacgctgtggcaggggttctccaaatattctcttgctcaatctcgcactctgtgaggtgtcggtaatgttatcctcattttacaattagtcgtaagatcctagggagaaggtagattaaattcaggaccacgcaactggtaaggaggagagccagatctgtatgtggctcagaagtctacgcttttaaggaagtgacacacccgcctcagcagtcagcctgaaagcctagtgtgccaggtactcagccacatcctcagcaccattagtacttggtaacatttcctgagtgcttataagtggctagacagtgcactgagtgttccatgtgtttattaatttaatgctcacaacaacgctgtgaaacgtgtgctcttttccccatcttataggtgagaaaagcgtggctaagaggtaaaatgtaacttgctgaagttacacagtgagggtatgatggagtcagaacctgagcccaggcggttccatttaagtcttcttttgtctttatactaagagcaagtgattaaacaatgacggagtcttggcttttactctaagggaacagtgtaatgaagggagagattcatatggatagacaaagtactaagattatcagtcctcttcgaagttaaagtagtagatactttagtaatcatagaagacgtgctggcagatgtggaaggaatgccgggaagaaggaatccagagagggctagcttgggaagtctttcagcttccttgaggtgtggtgggagtccggtcaagctttggggtctggttgaattagaaaatggtggcaaagagcactctagggaaggaggactggagacaagtgcttggagtgaggagtatatgagacgctcagagaatatttgatgggtgaatacactcacgagagagggaagagttgaaacctgggccattgagccatgttggagtcattgatagaaacaggatgcttacaaggagcacctagttggagagcagctcgtcaaacgcctgtcacccagcaggtagatgacagccttacttcagcaattggtgttcttcacctgtgtttcattatcagacccctgcccaggagaaaagttaaatttaaattctacccagcctgagaaattaaatactaaggaataagattttgtagggtaggattgagctttggagggctaccggccattgtagtgtctaagatgctcccctccccctgcctccaagaaccagtttccacccctttggaagtgatatcacccctgtttagagtgcatattttacatggaaatttcttatggacaataggagagaagagactggatatcggattagatcatatttagacatgtagatttgagattttatcagctcagtgcttaggaaaaatacagaaaatcatggagactaaataaattacatgcaaatttaaaacatctaagggttaaaaaatagaaagcaattagtgaaagatactttcagcagtcatgagataaatgataaagattaaaaactttattatagaatgattttatttaatatatttaggaaaaaacagttttcaggttgataaatgggctaaggattagaacaaaaaattcacaaaagaagaaatatgccgatagtaatcaaataaatgtaatataaaagaaggtaacagaaggtaacactttttgccaaaacattgctagtaagaatgcagtgaaactgccatttttatatattgttgatggctttggaaatagtaccacctttatggaacttacttaccaacatgctttattccattggatctaagataccatcatgtgtaagaaacatcgttattttatgtgtcaccaaagaaaaaaaatgctgccagttatcattgtaaaatgctgtcctaatttcagtgaattaaagttagaaaaagagcgagtcttaaaattgatgagatgtgatatgtcattaaccataaaaataacattagccttttgcacaacaatttggaatgtatcctatggacatcatctaatagtggggaagctttattcatggaagatgttagctgtagcaatagaaacaccagttaaaatggaacatttgaaaaatttgaagaattacttcaattttcaaacactagctcataaccacagaagtaacgttgtatactatctccagtttgtgttttatagaaagaacattgttgccatatgacactcttttacaaaggagttctgaggtcactgaccagcctgcagagcagcactcttaggttctggtgcccagccatggtccagtcatctgtggcttaggggaggttggaggggtcccaggttcaaggagcagaccagcattgttgtcagcagcagttgtggggagtgggacctccttagatggtgctggggcaggcatccagcattgggaagggtagggctggagccatttcaggagagggtttccaggtgtcttgaagcagcctggggtggtgctgggagtggatcctgtgcattagagcacacggagcctagggcaggcaagggtttcacccgcctctctgttggctgcctatgtaggtgacccggatctggttctgaggtgcattgtctccggcttcttcgccaatgcagcgaggtttcattctactggagcttataggtaacatgatacttggtgaagtcatttgttaaaggaacaatcttacaaatgacccaaaccccacagaaagctgtgcagagatagtaattgcataattatttgtaatttctaccatgtctccttccaaaactgagttgaggttagcgacatagctttaagcaaaatatcttgactttctaaaaatgattctcacatattcagctcatctatatgttgtatgttttagaaggatgacaattatacatcttgaggctggtaatatttcaattctaatgacagaataatatgacctgaagaaactattaaaaataatgtttctcagagaagttattttacaattggctagtttattatgtctttagagatctgcacgactgaagtcccctcccaccctggtatagtgtggccacgtctggtgtctttggaggtagccaggtgtttctcatgtgctggatgtgcctcctgctacataacctgattcttccagttccattttctaggcataggaaatcactcattgatgccttcctaatggtctttactatattcaaatgcagtgaaaactaagcatagcttaggcatactgtagcctgtcagtatcatgattctccaaactaatcattccagtgctttgaattgttacttttattctgtcttttctgtctttggctcattttagtttcataacctcagtgtagcctcctaaaagtgtagctatcatcattttctgttctttaataagagaacactccaaagaatttctccccagctcttctatgtattattttgtcattaattttttttcccagagaaaatattactgccctgttatcttgaggtcagccaagatatcccttgtcctgggctcctgttaatgagtccagagttgcactgagccttttttaattttgacagccagatctgctccatctagtatcctagtagccgactgttggaactgcaggatagcactttacaatgatctctagtatgttctctttgttactccaggcatgttgtagcctgtcagtattgtgattcatttgcccattgtatgagctcacctccccaccctgagttgtctgtatttgaggcaacttgtccatgtggaggcgacccccacggtggcccgagatcttccctaaggagtgctgccagcttgtcatcttgattgctcctactctcctggagagttagcaattttgactagcgtttggaaaattcttttatcagtgtccttagcaacaatgtgggctacctaagaggttccaggctaatcattcctttgagacaacatttagtgttgatcagctcaccaccccctggtaggacagcccaggaccccaggacgctggctttattacaatgccgacgaggcattccgtcacagcacttgaagcacttcccccaagaaacagatcattctactgagttggaattggaagtactatttcagagaaattaatagtccagtattgagcttttttttttttttttgagatggagtttcgctcttgttgcccatgctagagtgcaatggggtgatcttggctcatcgcaacctttgcctcccagtttcaagcgattctcctgcctcagcctccggagtagctgggattacaggcatgtgacaccacacccaactaattttgtatttttagtagagacagggtttctccatgttggccaggctggtcttgaactcccgacctcaagtgatctgctcgccttggcctcccaaagtgctgggattacaggcatgagccaccatgcctggctgtgagctttcttttttcattatcgttacgtccccctatagtcattatctttagtatttaactttgctttttagattatagaagaaatcacatgtattatttccattccaaaggaaattgttttgaaagagcacctgcagaagatacacataaacataggcagagcattttattcctaaatgttttttctaagtgtccgcgtgttgcttttctcctcttcgctttttccacgtgatttattcttgacttctggggtggcagccaggagagggatcaagaaaggttgcaagagaagatggagataattgttttgcttgtgacgagttcagtctgcatgcttttttggtaatattaaaaatatctgtgggaaagtcttgctataagtatttaaaatgtgcttcagacaaaattcttctatgttccaaggaccatccgtgatgaccatgagctgcacatacaccctgcgtcagtcctctatgcagagaagccgcctcgctggtaagctcatcctgctgcttagcctgtgcctgctttgaacagggccatgttcttgtttttctcctgtacatgtttcttgacatcgcctctagaattgctgctctgggccgggcgtggtggctcacgcctgtaatcccagcactttgggaggccaatgtaggcaggtcacctgaggtcaggagttcaagaccagcctggccaacatggtgaaacctcatctctactaaaaatacaaaaattagccaggcgtgatgggcacgtctgtaatctgagctactcgggaggctgaggcaggagaattgcttgaacctgggaggcagaggttgcagtgagctgagatcacaccactgcactctagcctgggtgacagagtgagattccatgtcaaaaaaaaaaaagagaatttctgctctggcaaagagcttcttaagcaaacagtgatatttgtctactcactcatccactcagcaaacgttcattttcaaccactgactggatgcttagccctgcatgaggcacagctatgcagagatgaattgggatcccagctcacggttcttttttttttttttttttgagacagagtttcgctctgtcgcccaggctggagtgcagtgacggcgctatcttggctcactgcaacctctgcctcccaggtccacgtgattctcctgcctcagccacctgagtagctgagactatagatgtgtgcaatcacgcctggctaatttttgtatttttagtggagatggggtttcactgtgttggccaggctggtctccaactcctgacctcaggtgatccacccacctcggcctcccaaagctctgggattacaggcatgagccactgtacccggccccagcccacagttttgacatagggacagacacagagtcaactaccttaggggaagggctttactagcagcatggatgaagtgctgggctcagcacatcatgtgccagtgagagtcagggcaggcttcatggaggagataacattcattctgaacctggaaacaagagtgttcagtcagaaaggacccggagggtattctaggtagagaagtagcaggggcagagccatggaacataaaggaacctcatgcgtttgggaagtggggaatcattggtatgggtggcccatgcaatggtgctgctctgtaacactgcctaggaagaaagaggtaagcacagaagtctagagtaggcctttagacatctttataacatttcaatggttaagtttatgtttgtccaatttaataataaaaattgggggcttatatttttcttgtttacaatttcatttttctagaattcatttatattgtattttaccaataaaaagtactgattaaaagtactgatcaaccatggattggattttgtttttttgagacagtgtctcactctgtgtttttgagacagtgtctcaatctgttgcccagtggtgtgatcttggctcacttcaatctccaccttcggggttcaagtgattctcctgcctcagcctcctgagtagctgggattacaggtgcatgcaaccatgcccagctaatttttgtatttttagtagagacggggttttgccgtgttggccaggctggtctcaaactcctgacctcaggtgatctgcccacctcagcctcccaaagtgctgggattacaggcgtgagccactgtgcctggcccagattggaaattttaaagacgacaacaacttgtccttctccaattggaagatggagaagccctgggaaaaagggtggggtgtgtgtgaagagagggagagaagatagcggtagatttgaaggcaagaaagtctgtggtcaaacactttgtaccctagaattgcagctttcaaaatgtggtctccagcccagcatcagtatcacctggaaacttgtacgaaatgcagcttctcaggccatgccaagtcccattcaatcagaaactggactagggcctaggactccattttaacaagccctccagatgtttcttttgggcagtaaagtttgagttctgtttccctagaccaaggaatcggatttatcctgtagccactgcagacctagaagttgcttaggttgaaagcaccttggtcggttctgggtttagaaatgttacccagtgaccacactaatgtggtcaggatacgcacactcgtgtgcaggataatttgaagagtgcccacgcctgtcatctcagcacttttgagaggctgaggccagaggattgcttgaggtcaggagttcaataccagcctgggtgccatagccagacctcaactctcaaaaaaaaaatgagccaggcatggtggcacgtggctgtagtactagctactcaggagactgagacaggaggatcgcttgagcccaggagattcaggcttcagtgagccatgattgcaccactgcactctagcctgggtgacagagcgagaccctgcctttaaaaaatttttttttttaaatcaagagagatgcaaaacctcaattttagatcctttttttgctgacttttgggtggttaaatttgggagttgcttaaaggagaaaggcttttctttttcttgcttcattcctaaggagctctgaagggcaaagaaaggttggggaaatagagccagcctgaagccatgccataccattcaggtggcaaagaaagtgccccccagtcacggcctctttgcagggggggcccttctttttcctttgatcagctgagattcacttactggtttttgaggggtggggaaccacagtatggctggtatgtttataacatgggaagccctgaattaacactttggatgtttcagaaactgatatctactcatatgcacacctaaaatcaggggactggatgttatgctcttggctcttcggttgtctattacctgagccttagaaacattttttcccttaaataaaggtataatttatttacagtgcaagatgagttttgacaaatgtgtatacccatgtaacctggacccacataaattatacaatattgttatcattttagaaaattcctttgtgtctctttacagtcagttcccagcctctttcagaatcaggcaagtctttgcctccatttctgcattttctaataaagtcattaggctcagttcagagttctgtaaatgcagatgaaggatccagaaaggtccttcgcggataactgagatgttccagaagtcattgaggatttagagtctcatctgaaaaatggacacaccattacccagcacttaggtcttgaggctgtggtgagcaacataaatgcatgtgtttagcacagtgtctggcacatagagtagaacctgttaaaggttaaaggaaacagcatgtctacctgtggttcctgactgtcatcacaagagggggaaattagctcatgtttctttctcatttcagggtcatctataacgaagttatacagacctccaagtactacatgagagatgtgactgccattgaatcggcctggctgttggagctggctccacacttttatcaacaaggaacggtaggaatgaactgagtctgtgccccagccacctgttcacagcctctccatgtttttaaatgtactttttttctccaatttaatgccctatgtgtgttccccctaggggtgcatagggtggaaaggccattaccatatccccaaaacattctgggaaagcactctagcgtttaattcatagtgaagtgcaattaaaaataaatccccctaatctcataagaaaaaaaaggtatcgctttctcgctttctttctccttttgctcttccaaactatttttttttttttttttgagacagtctcactctgccgcccaggctggagtgcagtggcacgatcatggctcactgcaagctccgtttcccggattcaagcaattctcctgccttagcccccatgtagctgggattacaggtgtgtgccaccacgtctggctcatttttttctttttcttttttcttttttttttttttgtatttttaatagagacaacggtttcaccatgttggccaggctggttacaaactcctggcctcaagtgatccacccacctcagcctcccaaagtgctgggattacaggtatgagccagcaggcctggcctgagctaattaaaaaaaatttttttagggatggggtttcactatgttgcccaggctagtctcgaataactgggctcaagtggtgctcctgccttggtctcccaaattgctgggattacaggtgtgagccaccatgccaccagttcgttttttatttttatttatttatttttgggacagagtcttgccctgtcatcctggctggaatgcagtggcacaatctcagctcactgcaacctctgcttcccaggttcaagtgatactcctgcctcagcctctctaatagctgggattacaggcgtgcgccaccatgcccggctaatttttgtatttttagtagagacagggttttgccatattggccaggctggtcttgaactcctgacctctggtgatccgcccgccttggtctcccaaagtgttgggattacaggtgtgagccaccacgcccagctccttttttaaaagggttacagccctgtgctgtttgtggcctgaaaatacttgctttacatattttgcccaagtttactgttgtttacagcagaagagaaagtctgaaacctttttctccattagggccagaattggactacacaatgtttccaaagcgatatttgaattgattgccacattgaaaaattgggagatttcatattaaacatgaatttctggtttctcttgaaagacatgtttagtctggcaacactaggcttgcgttcctacgtggtggcatcacaggggcttaggggtggctgcctgctgttagtgacatcgccaggtgccgtagtcccatgtcacttgcttacttgcctgctgcactcttggagacatttgaatttgtgaccctgtaaatggaaggatctcctcatctctcctgctccagcaaagtcaagggacattgccctctcaaaattttataatatttaatttttatgtaatcaaacaaaaaccatttcacacctttatagttcttcacacatcccaattcagatatttcagctggaaagcagatcagcctgcagggactgataaaaatgcagtgtgtgttgtctttgctgaattaggttgataagaataaacctggtgaaagaaaggcttttccttcaaaacctctcaggtggaaagcagcagacttcaggagtcaagagaagggatcagaaaggtaaactagaggttgaaagaggaatggtgcagtggtcaaaatgcctgttaaagtaagaagatgcagacagccagagaaggataagcctgaaattgtcttggattcatttagactcttggaaacagaattagcccagaagctgagtcattttcccttctcagctcaaaattccagtttctttaggtcaaacccacaaagttaaagagcaaatagcttcagaaatttgaagaaaataacaagcccaaatttcttcatttgtctcttctctccaaatggcttttttatttttaagctcatcacctccactgtcatcggagtatttttagagaggctgggacagacctttagaaatcacctagtgcggccgagcacggtggctcacgcctgtaatcccagcactttgggaggctgaggtgggtggaacacatgaggacaggagttcgagaccagcctggccaacatggtgaaaccccgtctctactaaaaatacaaaaattagccgggcatggtggcatgtgcctgtaatcccagctacttgggaggctgaggcaggagaatcacttgaacctaggaggtggaggctgcagtgagccgagatcacaccactgcactccagcctaggcgacagagcaagactgtccccccaaaaaaaaaaaaaaaaaaaaaaaaaagaaatcacctaatacaacaacctcattgtataacgatggtccccaaaccacagagaaacttgtgttgtttcttaactgtatagtccaagggcacttctactattaacttgtccaaagcagattgatttctcaaagaacctccagatctacaggggttgcccatgtatggtagatgttcctttactgaacacagtgcagcacctcacaaccttccacagcccacagatcattcacggctctgttcctggcacctttggagactttccatcaccactgtttttcggaatgttgctctcaccctgtgtggaggcctgaaatggttcagagtcagctttgtttatattcaacattcttcccagaaaaaagcaccaaaaatggccccacaggcacaatggcgtcatctcccatccccaagctaaggccgtggatatctaacattagctgtaggggttatatcaggtgacgtgtagagagagaattcagagaaattcagcaagacctacagctagacaggggaagaacggggtgacctattcagagatttgccttctggcttttaaattatttttccttattctcagagatatcttcattattagggaaaacccttttaacgaggcctttgcaagagcctgtagtagtcctccctcaggtgtaagcagatggaaagtctgagttcttgtagctcatttatacccgggtcctgttcgctctgttgtctctcacgtcatacctggtggtgcgctgtgtcttcgttcacgccctccattttttcagggcctgcagttctctctgggggcgatgcggcttgatgttgtggggccatgtggctgtgctaagtagtgggcacaccagctccggagcagtcagggtgggcattctcatgtgaggctcccactgtgtgttagttggcacggcttagggatctcttggttattgatgattagtaatgggctgtcgggtatatcccagttgatgagtggagggaggtctttcattaaaagcttgtatttacacactctgcctcaaaggcatatttaaggatttctgccacttttggctttgctttagaatgtaaaaaatacttcattttccaatcctattatctgatgcctatgattagaatattgtgcttcgtgttattcataatggtagaaagtgacatttctggggaaaaaaaaaagtgtcactaggaggtgtcctttctgttttcccagcaagcttgtaccctccatgtgggcagaggccatatctttatctccatccttgagcatgggtacctggtgtgttgagacgcttggtaaattgacttccttggtcctaaagagaggataatttttcttgactattgtcaggaacttcttggagatttgagatcacttccagactgagcccagtctcctgagcacagttgtctg

SEQ ID NO: 8553 - DNA, 293 bp, Homo sapiens
tttcttttttttttgagatggagtctcgctctgttgcccaggctggagtgcagtggcgcgatctcagctcactgcaagctctgcctcccgggttcacgccattctcctgcctcagcctcctgagtagctgggactacaggcgcccgccaccacacccggctaatttttttttgtatttttagtagagacggggtttcactaagttagccaggatggtctcgatctcctgaccttgtgatccgcccaccttggcctcccaaagtgctgggattacaggcgtcagccaccgtgcc

SEQ ID NO: 8554 - DNA, 414 bp, Homo sapiens
acaagactggatgtctggcagtgaggcctgggaagctgtaagttgtaaaagccccatctcgggtggttctgatgaagtggtgggcttgggaatcctggggacaggagttgaagatgtgaagacatgcagcccaatggacagatagcccccagcggggagatcagagcttcgagatcagagcgtcaggtctgagtgaaagctgataaattgtttcttcacaagtgtgcttagaccccagcccaattccccttacgtgtttccccagaacacagatctgtggggttgggattcttccccaggcaggttgtggcagcaggcatcaatgtcagctcactatgaattttcctgagtcttgcaaaaatgaggaatgtgtagtaatgagcattttataaagcttaagtttattctctataa

SEQ ID NO: 8555 - DNA, 437 bp, Homo sapiens
gacccttgaacttttggtgtgcatacttgaacaatacagcctaaagttcgtatctttttgccaatcaatacatagatattaagatgcttttattctgttttccctgtttttgtcttctgtgttattctaatatgtgacctccactcaattagtcatcattattttttatggtagattttttttattgtagtaaaaaacataaaattttccatttcaccctttgtaaatataagttcagttgtgttaagtatatgcacattgttgtggaacagagccccagaactttttcattttcaaagctgaaactctgtacccattaaatgactacctgttccccagtcccggcacccaccattctccttgcacccaccattctccttttggtttctatgaatgggactactctggatacctaatagaagtggaattagacaaca

SEQ ID NO: 8556 - DNA, 437 bp, Homo sapiens; identical to SEQ ID NO: 8555

SEQ ID NO: 8557 - DNA, 1938 bp, Homo sapiens
agattatgtttttcctgacttaactgagaaggcaggttccattgaagacaccagccaggctcaagagctgccaaacctcccctctcccttgcccaagatgaatctggttgagcctccctggcatatgcctcccagagaggaggaagaagaggaagaggaagaggaggagagggagaaggaagaggtagagaaacaagaggaggaggaagaggaggagctgctccctgtgaatggatcccaagaagaagccaagcctcaggtccgtgacttttctctcaccagcagcagccagaccccaggggccaccaaaagcaggcatgaagactccggggaccaggcctcatcaggtgtggaggtggagagcagcatggggcccagcttgctgctgccttcagtcaccccaactacagtgactccgggggaccaggactccaccagccaagaggcagaggccacagtgctgccagctgcagggcttggggtagagttcgaggctcctcaggaagcaagcgaggaagccactgcaggagcagctggtttgtctggccagcacgaggaggtgccggccttgccttcattccctcaaaccacagctcccagtggggccgagcacccagatgaagatccccttggctctagaacctcagcctcttccccactggcccctggagacatggaactgacaccttcctctgctaccttgggacaagaagatctcaaccagcagctcctagaagggcaggcagctgaagctcaatccaggataccctgggattctacgcaggtaaagtgaggggcatgcgggccaccaccctgtaccttctttcacagagcctggccatccccagggctagtgtggcatgggggcaggatctgccaggttgaggagggaggccctttccacagcacgtagaaccccatggaacttgtggggatgcaaacctcagggccaacaatgggtgttctccccacacttctgtgcaaaggcctttggagaaacttggtggcctggcctgggtttcatttgttcatgtgttaccattgccacccttagacatcttttgttttttttttttcccgagatggagtctcactctgtcgcccaggctggagtgaagtgggcatgatctcggttcactgcaacctccaccgcccaggttcaagcaattctcatacctcagccccctgagtagctgggattacaggcatgtgccaccatgcctggctaatttttgtatttttagtggagacagggtttcaccatgttggccaggctggtcgggaactcctgacttcaagtgatccacccgctatggcctcctgaagtgctgggattacaggcattagctaccgcacccagcccacacttagacttctgcactgattctaccagcagctagagctagtggctgacctgtgctttccccatcccatctcaccaccctcctcctccccaccgacacccatgtgcatagcaggcacaagtcagtgttcacacccactgacaccgcaaggaaaagaaaggagccccagaatattaacaataaacttgcccttgaaagccagcatgtggggcaagctctctgcagcctggcccctttgatatagtcccctacttcctgggaataatgcctggcctcctcctctcactcaatacattccctgcttggtccccaaagacattcgagtttgtactccttggcatggtgcctcacagaggctgtcagcagccccctcgctgtaatacgcctccactggcctccaccttccagcttcccaaaaggcctccgaccggggctctctcccctgtccctttcctatgccttcgtaactgtcgcccttctttctgtctcctcgcacaggtgatctgcaaggactggagcaatctggctgggaaaaactacatcattctgaacatgacagagaacatagactgtg

SEQ ID NO: 8558 - DNA, 1938 bp, Homo sapiens
agattatgtttttcctgacttaactgagaaggcaggttccattgaagacaccagccaggctcaagagctgccaaacctcccctctcccttgcccaagatgaatctggttgagcctccctggcatatgcctcccagagaggaggaagaagaggaagaggaagaggaggagagggagaaggaagaggtagagaaacaagaggaggaggaagaggaggagctgctccctgtgaatggatcccaagaagaagccaagcctcaggtccgtgacttttctctcaccagcagcagccagaccccatggggccaccaaaagcaggcatgaagactccggggaccaggcctcatcaggtgtggaggtggagagcagcatggggcccagcttgctgctgccttcagtcaccccaactacagtgactccgggggaccaggactccaccagccaagaggcagaggccacagtgctgccagctgcagggcttggggtagagttcgaggctcctcaggaagcaagcgaggaagccactgcaggagcagctggtttgtctggccagcacgaggaggtgccggccttgccttcattccctcaaaccacagctcccagtggggccgagcacccagatgaagatccccttggctctagaacctcagcctcttccccactggcccctggagacatggaactgacaccttcctctgctaccttgggacaagaagatctcaaccagcagctcctagaagggcaggcagctgaagctcaatccaggataccctgggattctacgcaggtaaagtgaggggcatgcgggccaccaccctgtaccttcttcacagagcctggccatccccagggctagtgtggcatgggggcaggatctgccaggttgaggagggaggccctttccacagcacgtagaaccccatggaacttgtggggatgcaaacctcagggccaacaatgggtgttctccccacacttctgtgcaaaggcctttggagaaacttggtggcctggcctgggtttcatttgttcatgtgttaccattgccacccttagacatcttttgttttttttttttcccgagatggagtctcactctgtcgcccaggctggagtgaagtgggcatgatctcggttcactgcaacctccaccgcccaggttcaagcaattctcatacctcagccccctgagtagctgggattacaggcatgtgccaccatgcctggctaatttttgtatttttagtggagacagggtttcaccatgttggccaggctggtcgggaactcctgacttcaagtgatccacccgctatggcctcctgaagtgctgggattacaggcattagctaccgcacccagcccacacttagacttctgcactgattctaccagcagctagagctagtggctgacctgtgctttccccatcccatctcaccaccctcctcctccccaccgacacccatgtgcatagcaggcacaagtcagtgttcacacccactgacaccgcaaggaaaagaaaggagccccagaatattaacaataaacttgcccttgaaagccagcatgtggggcaagctctctgcagcctggcccctttgatatagtcccctacttcctgggaataatgcctggcctcctcctctcactcaatacattccctgcttggtccccaaagacattcgagtttgtactccttggcatggtgcctcacagaggctgtcagcagccccctcgctgtaatacgcctccactggcctccaccttccagcttcccaaaaggcctccgaccgtttttctctcccctgtccctttcctatgccttcgtaactgtcgcccttctttctgtctcctcgcacaggtgatctgcaaggactggagcaatctggctgggaaaaactacatcattctgaacatgacagagaacatagactgtg

SEQ ID NO: 8559 - DNA, 779 bp, Homo sapiens
ttcataatggccaggagaccacacaacagagacatttaatgagaggggtttcacgagggattttgttagaactttaacatcagtcattgcacaggagctaaggcttataaaatatgagtatggtcaggaatttaataaaagtacagtgatgagcatgcctaaatccatgttctctagaatgtaagcttggtgaaagaagggactttgttcattgctagtctacaaaactaggacatttcataacgcaatgtaggtgctcagtactttttgctaaataactaaaagtatgtaaaggtaaaaggtttgaaatttttaagcgcattttttaaaacttaaaatgtatttggaggagaaatcctgcaagtaatcttaataaaatcatttcaagtaaatatttgaaatgtagaacaataagcattatgatgatctgaaataacattaatttgattgtaaccctattggggttagttcccaccctttgttccatcttgagcagagatgtgctgcatttcttaacgtttggtctctatacattataccatctgctgaagtttagctttgtgtgtgtgtatatgtacccatgtgtgcactttaaatatcagtacaaactgataaacaatgtttctggttaatgttgcaaaaatggaacactgtattttacataattgattttctactcctgccctgtgaattaaggcagagttttactgtaatatttgcaagtatccaaaatggttactgatgacaaatactttttaataaatgtcaaaatcacaata

SEQ ID NO: 8560 - DNA, 908 bp, Homo sapiens
tttaacaaattgtattattacacattcctagttgctgcttgtaatagaacagatttcaatctcagaaatgtttatctgagagacatagatcaggtttacaaggacaagaggtcaaagtcatgccacagacgatccacaccacctatgtatgcactctctctcttgcacacacacacgcacacgcgcacacacacgctgagtctcatgtgcttacctcgtctgactgccgctggtgttatatgtagcttccatgcctggaagaggcacatatggtaacatggtgtggctaaagtaaagcaaaagtacaaaagcaataggtaagggcagtgggataacaggaaaggttttgatgttattgtgggtattagcacatgatagccccaagaagacaagaaatgtcagttactcagaaagaggaaagctttccaaccaggagagttatatttatgtgcccatcactggaatggaggcagactgacaggaagattattttctaacttgaatggaaagaaggcagagacagaaagaaagaacagtggctgggcaaggtggctgatgcctataatcccagcactttgggaggctgaggtgggcagatcgcttcagcctaggagttcaagaccagcttgggcaacatggcgagaccttgtttccacaaaaaatacaaaaatttagccaggggtggtggagtgcacctgtggtctcagctactcaagaggctggggtgagaagactgcttgagcccggaagatcaagactgaagtaagccaagactgcaccactgcacttcagcctgagtatcagggcaagaccccatctctaaataaaaataaattttaaaaaatttaaagaatatattataccactcagttgtgtactgactaataaaatctgacagtttctataac

SEQ ID NO: 8561 - DNA, 480 bp, Homo sapiens
ttttttttgagaaggagttttgctcttgttgcccagactggagtgcaatggtacgatctcggctcaatgcagcctctgcctcccgggttcaagcaattctcctgcctcagcccctcgagtagctgaaattacaggcatgcgccaccacgcccagctaattctgtatttttagtagagacggagtttctccatgttggtcaggatggtcttgatctcccgaccttaggtgatccacccgcaccggcctcccaaagtgctgggattacaggtgtgagccaccacgcccagcctcaacttcttaacatctaggcctcaatactttttctttctttccagagaataatatatccagtcaacctgcattctagtcacttccagacatagcctgtatctacatatgtaaaaaaattacaagaatgtgtaatccattttattgctatggaattttataaggaaaaatgtaaaaaggaacagactttt

SEQ ID NO: 8562 - DNA, 1577 bp, Homo sapiens
tctccacaaattggcagttgggtacttccccactgtcatcacagttgagctcattttaacatatattcaaagaagctttttagtttctactcctgaattgtagtgttcaagttatttgccttcctgggtaagaaaattttaacccaagtctgggattctctggcacctgtcttttcccatcttttaatgagttggcaagattaggtcaaatttcaatgctaaatttgattttttgaattttaaatagttgcactttatttcatgctgaccaccaacttaatttatacattttaaaataaaattatcctagaagtgttgtaaacgtgggaaaattttaattagtgttggaggtcattagattggacccaggtttaaatataatgatctcttcacagcttatttgatgtttaagagcaacttgtgtgatcttagctttgcaggttttctgtaatttatgtagcacaataaaggataaccagttgactgtgttactggactctgagttctcacagctagtttcatctaagcttggtttattatcatttctgctttggatttttttgtgcatcacatgaatacttagaaatccatttgttttcagtgtagtacctagggtgaagtagatgctgcacaagtaagtttaagggaataaaagtcccgacactttatatacatgttgaggggcacgatttaagagactgaaacagtttacattaaactgtttttattttctgccagtagactctatctgcttaaaaaaataaaaattgttcaacccagtgttctccagcatcaggacattacagttgtaatctatgttgtaatcttttcaaataagaaaagctactccttattctctacagtgtaggcttaattttagaaccgataatttactatatctgcattattgatatttttaagtagtagttttaaaaataattatttctatgtggagggtgttttaatttgggattttttttttcttgtaacaggtgctatttgtaaatatgaaggggaaaagtcacttagttaaaagtctagcttatgtcataattaagatacaattattcatttcatgtttgattctattaaactagtggcaaaacagaattggtcccttagttttttagattacctttccccctatatcacaaaaatatctctttccatatgatctcataattgaggcaaagaagctaagggtttatttaaaatgtgtataagcttgaatttggtcaacactgcataatttgaaatcactctgcatttgtcactgcagcttactgtatgcttgaaaggccttgtgtgtttgtcttaattttagtgaaaaaattagaatttctgccattcatgtacaaaaaaattacaactacagcaaacaagataaaaatgctggtttgcattaatactgttttagtcttaagagcaatttatattatgtgaaatgctgttacacatattttgttggccatatttcattttgagaaacagttgttcaggtacaaacatgacaaacaactctagctatgactcttaatgttcaattgcaaaataaagatgtgctttagtaatctaaa

SEQ ID NO: 8563 - DNA, 1149 bp, Homo sapiens
tgcatcacatgaatacttagaaatccatttgttttcagtgtagtacctagggtgaagtagatgctgcacaagtaagtttaagggaataaaagtcccgacactttatatacatgttgaggggcacgatttaagagactgaaacagtttacattaaactgtttttattttctgccagtagactctatctgcttaaaaaaataaaaattgttcaacccagtgttctccagcatcaggacattacagttgtaatctatgttgtaatcttttcaaataagaaaagctactccttattctctacagtgtaggcttaattttagaaccgataatttactatatctgcattattgatatttttaagtagtagttttaaaaataattatttctatgtggagggtgttttaatttgggattttttttttcttgtaacaggtgctatttgtaaatatgaaggggaaaagtcacttagttaaaagtctagcttatgtcataattaagatacaattattcatttcatgtttgattctattaaactagtggcaaaacagaattggtcccttagttttttagattacctttccccctatatcacaaaaatatctctttccatatgatctcataattgaggcaaagaagctaagggtttatttaaaatgtgtataagcttgaatttggtcaacactgcataatttgaaatcactctgcatttgtcactgcagcttactgtatgcttgaaaggccttgtgtgtttgtcttaattttagtgaaaaaattagaatttctgccattcatgtacaaaaaaattacaactacagcaaacaagataaaaatgctggtttgcattaatactgttttagtcttaagagcaatttatattatgtgaaatgctgttacacatattttgttggccatatttcattttgagaaacagttgttcaggtacaaacatgacaaacaactctagctatgactctttaatgttcaattgcaaaataaagatgtgctttagtaatctaaagtacagaagttttgaagattattttatgggagtttttcatggcgcttttctaacagtggttatatttagtaactggttatcaggaatggagagaatgacaagtgtaaaatttatttctggagttattgactcac

SEQ ID NO: 8564 - DNA, 496 bp, Homo sapiens
tgcctctagaatagaaacttttcagaaaatttgcacatactgtttgtaagtataaaataattgaattctagacttttggagtgtggaagggtgtttgtgtgtgaaggtaataaatgtgttgctgcatgtgtttaccatagagaacgttgccaggctttgtcaaatgaggacattgttgtgagggtgtgacttttgtgaagccagaaaactgtgcctaagattcattacagtgagtatgtgcagaggcccctgacccagtaaatgctttttgcctttttattcccaatgtcttggacagttgagacaacttggcccaactctgaattgtagcagtgatgtcttatatgcttacgagtttatattaattcagctgaacaagaactacatcttaaaccacctttgtaggtatgattaatacgtgcaacagctgctttaaaaggtggtatttattattcatcactcatgaaacttgactcagtgaggacttcattatttt

SEQ ID NO: 8565 - DNA, 106 bp, Homo sapiens
cacgcctgtaatcccagcattttgggaggctgaggcgggcagatcacaaggtcaggagatcgagatcatcctggccaacatggagaaaccccgtctctactaaaaa

SEQ ID NO: 8566 - DNA, 840 bp, Homo sapiens
aagtgtatgcgtagggtaaattttgagcagtagggttgctaggtcatagggcacctgcatttttatgtactaatattgtctaattgttctcagacacaattatacccgtttatactcttctaccaaagcatatgagaatgtctgtttctccacattcttattagaatttcatgaaacttaatttacctgcttatctcagagaagaaatattttgacattcatttcttctgtaaggttaagtatctttattgatcccttctattttttacattacattccacattgattgcctttccttatttttatattggttatttgacattttaatcatgtgagatgttggaaattaaggaaactagtcatttgtcagtcatatatgttgcaaaaacccactgtgctttttgttttgggggctgacgggagggatatgaggacatttttaatgcttgtataaacaaacataccaatcttcttgatgactttggtgtctacctgcaagggctttactctagttcctagtcacattccatttgtgactgaagctttcttaaccaccatccaaataaccaactcagaagactgatactctgctttctacttttgatctccctggccttgttgactgctctcaattacgctagagctcttccagttccacaagttaagctgtaagcttgctaaaatcagttgtgcttatgtgctttcatatgcatacagatttatctttattatgtcatttaattctatatttcataagccaatgaaatgagagtgtgaaaagaaggttgggcttttgtgaaagcctttaaaagtgagtgattaaaattttaaggattttta

SEQ ID NO: 8567 - DNA, 2470 bp, Homo sapiens
ggcagaggcccagaaaggtcaaggctgctcgtggccggagctggagacccagcaaggttgatgccacccagggccgaagcaggggactgctccgaagttccaccaagactgaggctttctatgactcaaactggagcctcagcaagactgagtatgcccaaggccagggccagaggtccagcaaggctgagggtgcccagggcaagagccagggcatgagctcaacttccagcaaggccgagtccacctggggacccagcccaagtctcagcaaaactgaggttgatcaggacctcacctactatgaagctgtctgaagggaccatccagaccctcccttcttgctggggaggggatgagttctacccacctccccacactggcactcagccagctgcctccttccagagcaattaaaagtcttagcaacagtcctctggtcccacagctgagtttattatacttgttttcttttacaaaattaaaaacatctaaaaccaggcccaagtggcagcttgagtccctccatttctggaaactgagaaggctccacctggcttgatatggacacagggtgtggggtggaggggaggaggtatggtgcccgaccaaggaggcaaggggcaagggtggcagactgaggagggagcaccgccacgagccacagtccctgagttataattcacagtaagaaggctcaggctgcagggggaggtcaaggctcagtgaggttctggggtgaccaggggtttccctggggaaggtggccggggccaagatgctctcgagccagtttagaggccagggcccttcctggccatctgtcccgtggcctagccgacactccgttcatctcacttggtgctctgggttcctgtgacagaggcccctggcctttcctgcatggcctggccatcaggggggccgaggacaccactcagagagtcagaggaagaaggcgattcgggaggccacggtcttgcagccgttggaggagaagagctgctcgtcttcagggaagaaggtggtgctgtccagcacagcctggacaacctcatcccttggctccaggcccagctgggccagctcgttgagcacgcagtgccggacgtggtgccgctggagcgggaggaagggcaccactgcgtctaggaggcgctcttccatgatgcccgagtttgagaagccatctgcaggaagggtaggtggggaggggactttgtgcttcacaagaggggagaagccggccccaaacccccaggggcaggaggaaaaatgctggcctcagttccctcagccaccttctgggtgtaggactcaggggctgtaaggctcacccaaagtcacaaagctgggagtgccaaagccaggctcagaactgccgggtcagtgggcaaagcatgagaccccgggagagcctggctcctgggtgtggggtgaagccgcccgggagggggctgctgagccagactcacggtgcgggttgtccagcaccgcgcgggagatgaccggctccagctcctgcaggaggatctcctcgcggtcccgccggctgcgccacgcctccaatgccacctggttgatctgctcgccacccgtgttgctaaaaccatgggggacccaggctgagactcagatgaggactagcgcagggcaggattggaccctcgcttccccgctgccacctgacataggaacatggctcagtgcggggaggagccaactccactgaaaacgctccacttccccctccatggtgtccacatccatggcccctgtaattcacctacacatgccacgtactttatagtttacaaaacacttttgtgtccctcaactgactttccctcactgaacttccaggaaggcatcggggcatcattattggccccgctgttcagaagcagagacagaggctcagagaggcggagccatgctgcctgaggaaacacagcgaggattctgagagctgggactaaaggacaagaactctgttcctatttttcccaggcctgtgtcctcctcaccacaaaagagggaaaacttcttgacctggcagggcttccacaaagaagtggcgatcaaaaagactgagcccagaatttgctgagaatgtccaaagggaaatcaaccaggcggaatgacaatgtcatctctgagagtggcggagggcactgggaaagcccagctaagcccatggggaactggattctgctgggagcacaggctaaggctgtagagctgaacctctgagaagtggcccccgcactgtgcccactgcaaagccgggccccacctgatgaagatgaagatggctttgcggtaattggtcccgtataccacccaggaggagcccaggaaaggccgcaggacttccatcaggcctgggggcatcttgtccatctcatcgaagaggaagagggagcggccacaggcagtgaggttcccttggacccagctcttcagatcc

SEQ ID NO: 8568 - DNA, 4087 bp, Homo sapiens
ggcagaggcccagaaaggtcaaggctgctcgtggccggagctggagacccagcaaggttgatgccacccagggccgaagcaggggactgctccgaagttccaccaagactgaggctttctatgactcaaactggagcctcagcaaaactgagtatgcccaaggccagggccagaggtccagcaaggctgagggtgcccagggcaagagccagggcatgagctcaacttccagcaaggccgagtccacctggggacccagcccaagtctcagcaaaactgaggttgatcaggacctcacctactatgaagctgtctgaagggaccatccagaccctcccttcttgctggggaggggacgagttctacccacctccccacactggcactcagccagctgcctccttccagagcaattaaaagtcttagcaacagtcctctggtcccacagctgagtttattatacttgttttcttttacaaaattaaaaacatctaaaaccaggcccaagtggcagcttgagtccctccatttctggaaactgagaaggctccacctggcttgatatggacacagggtgtggggtggaggggaggaggtatggtgcccgaccaaggaggcaaggggcaagggtggcagactgaggagggagcaccgccacgagccacagtccctgagttataattcacagtaagaaggctcaggctgcagggggaggtcaaggctcagtgaggttctggggtgaccaggggtttccctggggaaggtggccggggccaagatgctctcgagccagtttagaggccagggcccttcctggccatctgtcccgtggcctagccgacactccgttcatctcacttggtgctctgggttcctgtgacagaggcccctggcctttcctgcatggcctggccatcaggggggccgaggacaccactcagagagtcagaggaagaaggcgattcgggaggccacggtcttgcagccgttggaggagaagagctgctcgtcttcagggaagaaggtggtgctgtccagcacagcctggacaacctcatcccttggctccaggcccagctgggccagctcgttgagcacgcagtgccggacgtggtgccgctggagcgggaggaagggcaccactgcgtctaggaggcgctcttccatgatgcccgagtttgagaagccatctgcaggaagggtaggtggggaggggactttgtgcttcacaagaggggagaagccggccccaaacccccaggggcaggaggaaaaatgctggcctcagttccctcagccgccttctgggtgtaggactcaggggctgtaaggctcacccaaagtcacaaagctgggagtgccaaagccaggctcagaactgccgggtcagtgggcaaagcatgagaccccgggagagcctggcccctgggtgtggggtgaagctgcccgggagggggctgctgagccagactcacggtgcgggttgtccagcaccgcgcgggagatgaccggctccagctcctgcaggaggatctcctcgcggtcccgccggctgcgccacgcctccaatgccacctggttgatctgcttgccacccgtgttgctaaaaccatgggggacccaggctgagactcagatgaggactagcgcagggcaggattggaccctcgcttccccgctgccacctgacataggaacatggctcagtgcggggaggagccaactccactgaaaacgctccacttccccctccatggtgtccacatccatggcccctgtaattcacctacacatgccacgtactttatagtttacaaaacacttttgtgtccctcaactgactttccctcactgaacttccaggaaggcatcggggcatcattattggccccgctgttcagaagcagagacagaggctcagagaggcggagccatgctgcctgaggaaacacagcgaggattctgagagctgggactaaaggacaagaactctgttcctatttttcccaggcctgtgtcctcctcaccacaaaagagggaaaacttcttgacctggcagggcttccacaaagaagtggcgatcaaaaagactgagcccagaatttgctgagaatgtccaaagggaaatcaaccaggcggaatgacaatgtcatctctgagagtggcggagggcactgggaaagcccagctaagcccatggggaactggattctgctgggagcacaggctaaggctgtagagctgaacctctgagaagtggcccccccactgtgcccactgcaaagccgggccccacctgatgaagatgaagatggctttgcggtaattggtcccgtataccacccaggaggagcccaggaaaggccgcaggacttccatcaggcctgggggcatcttgtccatctcatcgaagaggaagagggagcggccacaggcagtgaggttcccttggacccagctcttcagatccttctgtaggggagagacaggagttccaggggagctggagaaactcccccaacaccagacctcttcccaaaccaaaactaatctcctttctagggaaggatgtggtcttccagagagcaccaacctcttagtgagactgatggtgaaactgtatcccagattggggcagagacttgcccaaagtcacacagccagtcagaacagggactcaaacccaagcctcccacttccctgttcagagctccttccacgacacttgctgctttctataaaaggggaaggctccttcctgctccctgaaactacacagcagtgttgacggctgaaactgatcagcctggtgggtaccctgcaatcaacaacagtagtagtaagagccaatatttcctgatgcttcctctgagccacaaattggggctgatttccagcaagacaacagtgcagattatctgacaaacataggtgctccataaatgatatctgcaatggtataatctcatgtccctcacaacaaccctggcatgtaggtactgccagggttccttactgccccaaggaatcaaagtactccctgccaggtagaatgacaccttcccaagttctgtgcaggatgggtcctgagggctggggctgcagccgtgtgtggcctggagcaggtgactcccctgtctgggctcaggacttactccctagggtggcaccccatggtgagaacagtggtcaaggacgcatccagcctaccttgtagcgctcgatgtggctggggtgggggaagtggaggacgggagaaaagtggtgcacgcgggggctgcggaggccgccctggaagaggtagtgcgccagcagggagctgacataggatttgccggtgccggtccagccgtgcagggagaggaccagcggcttggtgggggctgggtcccgcacaaaggccttcagcgccttcaccaccagcgccttggccagatgctggccggccaggtgctgagccaggtcacactccagacctagggccacaggaggatggtgaggacacatcccaccgaggcagaggttcaaggagaacatcatgtctggaacctggtctgggactcctgtgtccttacgtttgtccaagctgcctatgcacatggcacgcaaaccttggggtctgtggcggaaaagagccaccttcgggcctgattcagctcggcagcgcccccaccaggcggtcctctagattgcactcagctctaaatgcgagctgtcaacggggtcagccgcagaccccgcccatccccaaggcgcactgcacttctcctttgacggccaggccattccggggaggcccaagaacttccaccaagggttctgctggctgaggcctctctccaggttggcagggcctcctggacctcaacgggtaccctccaccctcccaagtctgcgggccccgcccctcggtcccaccctctgggtcctcagcttctctggccggcgccagccgggctcccagggctcccagcgctcccgcgtctgcccgcgtccgcccgcccctcgctccgggctccctggcgcctcacccggcaagtcgggccggaagtcgcattcgcaaaaggcgcccaaggtgcagcgcagg

SEQ ID NO: 8569 - DNA, 4087 bp, Homo sapiens; identical to SEQ ID NO: 8568

SEQ ID NO: 8570 - DNA, 3898 bp, Homo sapiens
ctgctgatgaccaacctcttcccgggcatgtcggtggaggaggtgcttagcacccagatagcccacctggccaggctgcagctggagcagatggtggagggcagcctgcaggccggcagcccacaaggcattgtggggtaagccctggagcaaggggcacaggccagggctggggaatggctgcagctccaggctcctctggctccagctgcatgacggggccgttgtctagtccttggagagaccagcatgggccagggagactgacaatacctggggggtatcgtttggcaggatgcttaagcggcacgagttggagcgccagaaggccttggccctgcagcactcatggaagcagggggagcctttgattgcgacctccgaggagctgaaggccacccctgagattccgcaggtaaaaccgggaagctcagagggagaggctgaggcccctgaggaggaggaagaaaaggagaaggagaaaaaagaggtaagtggagtacaggccagggctcggagcccttggggtctggggcacagcgtaccccagcccagggctgaaggatgcaggccagtggagtctggcttccaggcctggctctgcactccctcagctgtgtgatgggctggggacatcttgctatgagatggggatggtaccagcaaggggtgctcctgacggagggtgtgtggggatgtgggccctcagagagaggagtcacagccctgctcatggtcactgtcatgaattctactgtaggcactagccacttgccacttgtgccagaattttttgtttttgagtcggagtcttgctctgtcacctaggctggagtacagtggcacaatctcggctcactgcaacctccgcctcctgggttcaagcaattctcatgccttagcctcccaggtagctgggattacaggtgtgtgccaccacatccggctaatttttcgtatttttagtatttttgttgggcttaagtgatctgcacacctgggcctcccaaagtgctgggattacaggcatgagccactgcacccggcccccagaattttcttaattcttaaatttgtttctgaaaacctcttattgaacgtaacataaatatagaaaagtgcacaaatcataagtaccggtttgatgaattttcacaaactgcattacacccatgatagcattatccagatcgagaaagaacattttcccagctcccagaagccccttggggcccccttcgaggcccctcccgtaacccaccccacctacaaggctgtcttgattcctgacaccaaacatgagtttcgtcttttcttcacataaatggacagcatggtgagcgtcactcacgctgcggcgggtggcagcggcctgctccctctcgctggtgctgcagaatattccgtccttgacagtcccacagtgtgttcctctgttctactgctggtagacatcaagtacactaatgttcaaaggaaacttgaagcaattgaagtagaggaataccagcatcccttgccatcaatagaaaatgtggctgggcgcggtggctgacacctgtaatcccagcactttgggaggccaagatgggcagattgcttgagcccaggagttcaagactagcctgggcaacatggcaaaaccctgtctctgcaaaaaatacaaacattagccaggcatggtggtgtatacctatagtcccagctacttgggaggctgaggcaagaggatctcttgagccccagagtcatttgaggctgcagtgagccgtaatcatactactgcattccagcctaggtgagagagccagaccctgtctaaagaagaaaagaaaaaaggaaagaaagtgctagctcttcagttttctagctcatgttagaatgaatattaaagtacacaccttccctctgtgtgacccctgaagtcagaggccccctcccccagggagacgttgggctgaagtggatggagcccagagcgcaactcccagctggcacctggagcactatggtgtacctcgctgtctacaggtgtgaacgtgggcagagacccgcagcctaggtagggtctggctgtggcagccagcagacctggattcaaacccggcctctctgcttcttagccgagtggccctggacaggttgcttaggggctctgagctttggtttcctgttcagtgaaatggtcattagcagctctccccatccctccgtcttcacttgtattaggagaatggatgggggtaaagcctacagaagctcctcaagtcctccgtaagcattccccagggcacagccctttacaatttacagaagcctgttccacacctgaactaattttcattttgcagttgaaaaaaaccaaggcgctagcagccccttcaacacaaccgttctcacggcaccatgcctgtctagcctggtcgctccccttcctgccaggcttagcctctgcgtgtccccaccccaccctaacctggcaccttcaaagacctccaagctcaggagaatgaccaccgaggggcccagggctgctggccttctagaggtgcagctgcacgggcctcctaccatctgaactacaaagcctgtttcttgccataggagaaaaaatcagagctcatacctagcaaggtggcgtccctgtctgacagctaccttgaccagacctcttcagcctccagcatgagctgtaagtccctggtgcttccgccaggcctcaggaagctaaggcagcagggtggtcaaagctcaggggtcgaagaccgctggcctaggtgtgcattcggccccgctgctgacagctgggtggcctggggcgagtggctctagagcgggagtaacactgttgcggggctgcccaggacgaggtgaggcttgctccaggcacttcatggtagctgctgctctgctctcatcccctcctagccctgtccctgaaataagcccacaaaccttgtgcatggccagggggcttttagccccagtacatagggccctagcctggaggagacagaagtgaagaatggggaggctgctcctcagaggccccaaggcgggtgtgcgcagtcctcgctcgggaggcgagtggcagggcccaggccccttcttcattttgtgaatccagcaaactccccaagtgccctgggccaggcctgtgctcaatactaggcacaggaatgactggcatagtccttgccctgagacatgaattctaagctccaacaggaagaaggctcccaggtgacccacagccaggagacagggcagacacagtgcgggggaagccggggtgtgggtgcatttagcgccttttagtggggacgaggatggaaaagcaggagggtgccaggcggggggacgcaggggccctgctggggctgtctgctgcaacaggagcacagagggcaggggcagccacagagcagaggcctgggactgggagaagggggctcctaggcatctcccccatctcacagccccacccctcagggtctgggtcgctgggggctgggcgggggtgatctgcaggtctttccctttggtgatgcgaagcctctgggccacaggccagtgtgagattgggaagccccttttcccagagctgtccagggcaggtgcggcaggcctgatgggtgcttttggcacccccttcctagtcaggaccacaggcacctcagagactgagatgtcggctatctgccaggaatacaggagcacctcagccaccgccgtgacattctctgactcgtcactgttgaagacgcaatcctcggactctgggaacaacagggaggcactaagccatggtcccagaaaaatcaaggccacccagggccagaggcagagccttagcaagactgagcccacccagagccagaggcggaactccagcaag

SEQ ID NO: 8571 - DNA, 3899 bp, Homo sapiens
ctgctgatgaccaacctcttcccgggcatgtcggtggaggaggtgcttagcacccagatagcccacctggccaggctgcagctggagcagatggtggagggcagcctgcaggccggcagcccacaaggcattgtggggtaagccctggagcaaggggcacaggccagggctggggaatggctgcagctccaggctcctctggctccagctgcatgacggggccgttgtctagtccttggagagaccagcatgggccagggagactgacaatacctggggggtatcgtttggcaggatgcttaaacggcacgagttggagcgccagaaggccttggccctgcagcactcatggaagcagggggagcctttgattgcgacctccgaggagctgaaggccacccctgagattccgcaggtaaaaccgggaagctcagagggagaggctgaggcccctgaggaggaggaagaaaaggagaaggagaaaaaagaggtaagtggagtacaggccagggctcggagcccttggggtctggggcacagcgtaccccagcccagggctgaaggatgcaggccagtggagtctggcttccaggcctggctctgcactccctcagctgtgtgatgggctggggacatcttgctatgagatggggatggtaccagcaaggggtgctcctgacggagggtgtgtggggatgtgggccctcagagagaggagtcacagccctgctcatggtcactgtcatgaattctactgtaggcactagccacttgccacttgtgccagaattttttgtttttgagtcggagtcttgctctgtcaacctaggctggagtacagtggcacaatctcggctcactgcaacctccgcctcctgggttcaagcaattctcatgccttagcctcccaggtagctgggattacaggtgtgtgccaccacatccggctaatttttcgtatttttagtatttttgttgggcttaagtgatctgcacacctgggcctcccaaagtgctgggattacaggcatgagccactgcacccggcccccagaattttcttaattcttaaatttgtttctgaaaacctcttattgaacgtaacataaatatagaaaagtgcacaaatcataagtaccggtttgatgaattttcacaaactgcattacacccatgatagcattatccagatcgagaaagaacattttcccagctcccagaagccccttggggcccccttcgaggcccctcccgtaacccaccccacctacaaggctgtcttgattcctgacaccaaacatgagtttcgtcttttcttcacataaatggacagcatggtgagcgtcactcacgctgcggcgggtggcagcggcctgctccctctcgctggtgctgcagaatattccgtccttgacagtcccacagtgtgttcctctgttctactgctggtagacatcaagtacactaatgttcaaaggaaacttgaagcaattgaagtagaggaataccagcatcccttgccatcaatagaaaatgtggctgggcgcggtggctgacacctgtaatcccagcactttgggaggccaagatgggcagattgcttgagcccaggagttcaagactagcctgggcaacatggcaaaaccctgtctctgcaaaaaatacaaacattagccaggcatggtggtgtatacctatagtcccagctacttgggaggctgaggcaagaggatctcttgagccccagagtcatttgaggctgcagtgagccgtaatcatactactgcattccagcctaggtgagagagccagaccctgtctaaagaagaaaagaaaaaaggaaagaaagtgctagctcttcagttttctagctcatgttagaatgaatattaaagtacacaccttccctctgtgtgacccctgaagtcagaggccccctcccccagggagacgttgggctgaagtggatggagcccagagcgcaactcccagctggcacctggagcactatggtgtacctcgctgtctacaggtgtgaacgtgggcagagacccgcagcctaggtagggtctggctgtggcagccagcagacctggattcaaacccggcctctctgcttcttagccgagtggccctggacaggttgcttaggggctctgagctttggtttcctgttcagtgaaatggtcattagcagctctccccatccctccgtcttcacttgtattgggagaatggatgggggtaaagcctacagaagctcctcaagtcctccgtaagcattccccagggcacagccctttacaatttacagaagcctgttccacacctgaactaattttcattttgcagttgaaaaaaaccaaggcgctagcagctccttcaacacaaccgttctcacggcaccatgcctgtctagcctggtcgctccccttcctgccaggcttagcctctgcgtgtccccaccccactctaacctggcaccttcaaagacctccaagctcaggagaatgaccaccgaggggcccagggctgctggccttctagaggtgcagctgcacgggcctcctaccatctgaactacaaagcctgtttcttgccataggagaaaaaatcagagctcatacctagcaaggtggcgtccctgtctgacagctaccttgaccagacctcttcagcctccagcatgagctgtaagtccctggtgcttccgccaggcctcaggaagctaaggcagcagggtagtcaaagctcaggggtcgaagaccgctggcctaggtgtgcgttcggccccgctgctgacagctgggtggcctggggcgagtggctctagagcgggagtaacactgttgcggggctgcccaggacgaggtgaggcttgctccaggcacttcatggtagctgctgctctgctctcatcccctcctagccctgtccctgaaataagcccacaaaccttgtgcatggccagggggcttttagccccagtacatagggccctagcctggaggagacagaagtgaagaatggggaggctgctcctcagaggccccaaggcgggtgtgcgcagtcctcgctcgggaggcgagtggcagggcccaggccccttcttcattttgtgaatccagcaaactccccaagtgccctgggccaggcctgtgctcaatactaggcacaggaatgactggcatagtccttgccctgagacatgaattctaagctccaacaggaagaaggctcccaggtgacccacagccaggagacagggcagacacagtgcgggggaagccggggtgtgggtgcatttagcgccttttagtggggacgaggatggaaaagcaggagggtgccaggcggggggacgcaggggccctgctggggctgtctgctgcaacaggagcacagagggcaggggcagccacagagcagaggcctgggactgggagaagggggctcctaggcatctcccccatctcacagccccacccctcagggtctgggtcgctgggggctgggcgggggtgatctgcaggtctttccctttggtgatgcgaagcctctgggccacaggccagtgtgagattgggaagccccttttcccagagctgtccagggcaggtgcggcaggcctgatgggtgcttttggcacccccttcctagtcaggaccacaggcacctcagagactgagatgtcggctatctgccaggaatacaggagcacctcagccaccgccgtgacattctctgactcgtcactgttgaagacgcaatcctcggactctgggaacaacagggaggcactaagccatggtcccagaaaaatcaaggccacccagggccagaggcagagccttagcaagactgagcccacccagagccagaggcggaactccagcaag

SEQ ID NO: 8572 - DNA, 3899 bp, Homo sapiens; identical to SEQ ID NO: 8571

SEQ ID NO: 8573 - DNA, 118 bp, Homo sapiens
gggaggctgaggcaggagaatcgcttgaacccgggaggcagaggttgcagtgagctgggattgtgccactgcactccagcctggtgacagagcaagactccatctcaaaaaaaaaaaa

SEQ ID NO: 8574 - DNA, 118 bp, Homo sapiens; identical to SEQ ID NO: 8573

SEQ ID NO: 8575 - DNA, 1448 bp, Homo sapiens
ggagaccagttcctggtgcctgcccatgaggcccgcggaacccagagtgaagaccagcgcccagcaggcgcagcttcggagtcggagctccaggaggaaggacccaagctgggggaggagcggcccaagccgcatgccggggcgctagaggagagaggccccaggcccgtggtctccattgtgaggccccgtcatggtccaaagagaaagcctgtcaagtgagggggctctcggggggaaggagctgcagccccggggttggggcacacaccacagtaggattcctaaatcctgcactcctgcagggaggattctcgtccccagccactaccatcactctcctcccgttcctcaagagcccccgtgtagggagcagcaggagagtgggagcttcagggcttgtaggggcctgggctcactggcctctaagcctcttgggcctggggtctcattgaccaggaacgggacaggcgtcgagccctggggctgtgggcaggctgggctattccctgggccagggaatgggagccagggctggagcctggctcaagtctcttgtccctggctcaggtctctcagcctcccgggccttcgtgcccatcttaaggctgaagctgagctgccacccaagctgccgctgcaggaggaggagccagaggacagccagagtgagccctcaccatctgccaaacagcacaaaaaagccaagaagcgcaagagcctgggggctcccgtgctccacgctgtggccagcatggtgtctgcacccttagagacattgaggctggagcgtgagtggcagtccctggactgttccttctccccctgcctgtggggcccgacatggcacaacctggcgctctagcctctgccctgccctgggtctttgcaggaaaggcccagcgcctgcggccgctgtaccagtacgtcaactattgcaaccctgagctgaaccaggcagggaagggggacggggaggctgaggtggaggcagaggcagagctggccccggttcccgaggagggaggtgtggagcaactgcaggccttgctgcccttggcaggtgagctgggcccaggcctcgctttgccctgtcccagtccactagtgacccccacccatgccctggctcccctcggagaggaggctggagaggagcctgggggcttgcccagcttgggggtgagtgaccacaaggccgaggtggataagtcaacccaggtggacatcgacaagatgctgagtgtctgcactgctccacttgtccccccgctctctcctcagtacaagtgactgtcccgccccactggtggctcccctccttccacgcctgaatttggcttcaggcttcctgtgggcctaggccctctggtggcgggggcaaatttggcacctgcccccacttgggactttggtcttgctgaaaataaatatttttctttttcaaa

SEQ ID NO: 8576 - DNA, 21010 bp, Homo sapiens
cggaagtggaaacggaaacctttttagggagtccaaggtacagtcgccgcgtgcggagcttgttactggttacttggtaagctggtgtgaggggaacctgggagggtcagctccggtcctgggtcgggaggggtgggggccagaggattcagggccggaggttctggtgggggcccagtgggcgggacccgaggacggaggggccgggaggccgagaggggcggggtcgcggcggggcctgagggacggaggccgggatacttgggaaaggatccgccggccttgaactcccgcctccgccgcccctaggcctcatggcggtccgagcttcgttcgagaacaactgtgagatcggctgctttgccaagctcaccaacacctactgtctggtagcgatcggaggctcagagaacttctacaggtgcggcgggagccccggggcttacggtggcggggaggcgtgcgcaggagtcaagagctccggcagtgggagggtgccggcccctctgccccgccaccaccgagtccatgtccctacagtgtgttcgagggcgagctctccgataccatccccgtggtgcacgcgtctatcgccggctgccgcatcatcgggcgcatgtgtgtgggtaaggcaggtggaggacgccgagggagggagtggtctccaagcaccattaattacacccccggagggaacccggagtgacctagggattcccagggtatcatctgttatctctgggcactatagaatctctcaggccaagcgtcaggagatcggggcaaccctctagcaaaggctgctggataatagtaataacaaataatgtaaagtgctttcactcctgttctcattccttcgtcacaaagacactagaaggtaggagttactggcctaacttgactgatgaggaagttgagacttgacctaagtgactcagtaagttccacacctagttcctagtgttggagaaggatttttctcttttttttttttttttgaggccagatttttgctctttcgcccaggctggagtgcagtggcaagatcacagctgtctgcatcctcaacttcttaggctcaagtgatcctcccacctcagcctaccaggtagctagggccacaggcacgtgccaccacacctggctaatttttacatttttggtagagacgcggcctccctgtgttgcccagcctggccttgatctcctgggctcaagtgatcttcttaccttggtctcttaaagtgttgggattataggcgagagccactatacccagccgaggatttgtatctcatctctccctgccactgactgggcaaggtgctttctctttctaagcatccatttctgtctctgtaaagattagctaagatatgcggtcttcctgctcagttacgttggaatcttaaattccctttaccacatctctaccctaccttcctacctgtcagcactgttaattctggtcgttggtcctttcctttttattattattattatttttttttgagatggagttttcgctcttgttgcccaggctggagtgcaatggcacgatcttggctcactgcaacactctcttcaagtgattctcctgcctcagcctcccaagtagctgggattacaggcgcatcccgccacacccggctaatttttttgtatttttagtagagatggagtttcaccatgttggccaggctggtcttgaactcctgacctcaggtgatcctcccacctcggcctcccaaagtgctgggattacaggcgtgagccactgcgcccggccggtcctttcattaagctggatctgtcttccattactgctgcccattgtttcttagttctgctcattgaggtcacttttagaagtctgtttattttatttttttacttttactttaatttttaaaaatcttaagcctgcttgggaggtcgaggcaggtggatcacctgaggtcagcagttcgagactaacctgaccaacatggagaaaccccgtctctactaaaaatacagaaattagccgggtgtggtggcgcatacctataatcccagctacttgggaggctgaggcgggagaattgcttgaaccctggaggtggagctcaccctgcggtgagctgagattgtgccattgcatttcagcctgggcaataagagtgaaactgtgtctcaaaaaaaaacaaaaaacaaaaaacaacaacaacaaaaacttaagcctagtgacctcaaagtattttcctattcagttaaaatactctgatctctaaccatgcccttaggacttgaagcaagttctgacaacaagggagattttagcttagtccttgtgtattttatgatgggagtgacctggaattcagaaattgattggcgtgtatttgtagattgttcattcttgttgctgtatggtgtgttttgtgtaagtatatcacaacgtattcatccattccatcgacagtgcatttgggcagttttcactttggtctgttaggaatagtgctgctggccgggcatggtggctcacgcctgtaatcccagcactctgggaggccgaggcgggcggatcacgaggtcgggagatcgagaccatcctggttaacacggtgaaaccccgtgtctactaaaaatacaaaaaaattagccaggtgtggtggcgggtgcctgtagtcccagctacttgggaggttgaggcaggagaatggtgtgaaccggggaggtagaacttgcagtgagccgagattgtgccactgcactccagcctgggcaacagaacaagactccgtctcaaaaaaaaaaaaaaaagtaatagtgctgctatgtttttttagtgaacacatgtacatatttctactgggtatatgatacctaagagtggcatggcagagtcacaggttatgtgactatttagtagtagttgcagatgatgccagataattatctaaagtgattgaccaacttacactcctgtctcagtatgagagttcagttgctccatatatctttgccaacacttggaattgatgacttgtaaaaattttagtcattctggctgggggcagtggctcacacctgtaatcgtagcactttgggaggtcgaggtgggcggatcacctgaggttaggagttcgagaccagcctggccaacatagtgagaccccatctctacaaaatcacaaaaagttagccaggtgtggtggcacgcacttgtaattccagctactcaggaggccgaagcaggagaatcacctgaacccaggatgcagaagttgcagtgagctgagatcgcaccactgcgctccagcctgggtgacagagtgagactctgccttaaaaaataataatctagccattctgctatgtgtgtagtgttagctcagttttttttgtttttttgttttttttttttggagacggagtttcgctctgtcacccaggttggagtgcagtggcgcgatctcggctcactgcaagctccgcctcccgggttcacgccattctcctgcctcagcctcccgagtagctgggactacaggcgcccgccaccacgcctggctaattttttgtatttttagtagagacggggtttcaccgtgttagccaggatgatctcgatctcgatctcctgaccttgtgatctgcccacctcagcctcccaaagtgctgggattacaggcgtgagccaacacgcccggcagctcagtttttaagtagcaaaatatacagctaatgccaagagctcagcttccctcccagttggtgatggtgaagtaggcaggatttattgggattcctgggtggtctctggcctgccctgggtgttttccagatcagtgggttggagggctgggctctgggcctaaagctttcctgggaaagctgattgggctgggctgagtggtatcctcagcccctagggctcagcaggcatcttgtgtattcaccctctaatttgggtttctccagggaacaggcacggtctcctggtacccaacaataccaccgaccaggagctgcaacacattcgcaacagcctcccagacacagtgcagattaggcgggtggaggagcggctctcagccttgggcaatgtcaccacctgcaatgactacgtggccttggtccacccagacttggacagggtgaggcagcccaacttgacccaagagtcacagggccatcctagtcagtggttagccactgttctttcccaacaggcagcaattaggggtctctcctgtggtttttctatatgggctcttgagtttcaggtactcattggaatagtgataacagaggccttatcaagtgtcagaaagaagctggggagggtatgaatccttcatgattggggagattgaaccatccagtcctgcatcctgggccaggataggtgattgactgttgaacttttgactgtgggtgagaggggaaagaagtgatattgagaccagcctccagctgttcagggcatgcatgaatattaggggcttcacagctgcccttgactctgctctaagctgtacttcctcctttctctgggtgaggctttcatatgaggtacagaggagaaatgaggggctcagggagccaaggcctggatgcttctgggcatggagaaccttggttctggggctgtaagttctgagccctgaacacaatatctttgattgacaggagacagaagaaattctggcagatgtgctcaaggtggaagtcttcagacagacagtggccgaccaggtgctagtaggaagctactgtgtcttcagcaatcagggagggctggtgcatcccaagacttcaattgaagaccaggatgagctgtcctctcttcttcaagtcccccttgtggtaagcattcctgtcctctgaaccccgtctcccgaggcagatccttttgcctagtgtttgggagtctgggtcattacctgccacagtttgggactggggctgcaggtcagggaggagcagggtttggggagagtcttcattgaggagggagagaatttggtgccgtgactcacattgagcccatcccttggcaggcggggactgtgaaccgaggcagtgaggtgattgctgctgggatggtggtgaatgactggtgtgccttctgtggcctggacacaaccagcacagagctgtcagtggtggagagtgtcttcaagctgaatgaagcccagcctagcaccattgccaccagcatgcgggattccctcattgacaggtacctggggcctctcctttcttctgctcagggttgggggttaacttgcattttgagagtatggggaaaagatgtcatctagaatgggagcctaccagtttgttctggtagcttctcgagtgtgagagcatatctgtacactgctgagcagataagagccagcatattcaaaaaatatttcttgagcatctgctaatcctcatctttgtggtttttcagggctaggatactagagcagtagctgcttgagcagcttgtcagagctggtcccgggatgagggctgaggcaggcacctcacttgagagtgaggtgggctctgtgaaacagctactgaccgtgcgctttcctttctcttcagcctcacctgagtcaccttccaagttgttccatgggctcctggctctggactgtggccaaccttctccacattccgcccaatctgtaccggatgctggcagggaggtggcagagagctcactgggactgaggggctgggcacccaacccttttccacctgtgcttatcgcctggatctatcattactgcaaaaacctgctctgttgtgctggctggcaggccctgtggctgctggctgagggttctgctgtcctgtgccaccccattaaagtgcagttccctccgggccattctgaatgtgatgtttggggccctcagcctgtgtacaatccctgcactctccagttgttccagcattctgggaagatagggtgggatgaacacaacacacacccaacccagttcaccacctccacacacgccattcccttctcctctaccatcaggatgtgaggcttcatcctggggcaagaaacactctccactacagttctccttttttcttttttctttttgaggcagtgtctccctctgtcacccaggctggagtgttgtgacgcaaggatggctcactgtagccttgacctgttgggctcaagcgatcctctcgcctcgtttatttttttgtagaaacgaagtcactgtgttgcccaggctggtttatactcctgaactcaagcgacccaccgcctcggcctcccaaagtgttgggattacaggcgtgagccacggcgcccggtctagttctcacagttttcacccgacttctgcgccggtcttctctggccttgaaaggcagagagtccgttccgattttcccctgagctgggcaagtcccctgtgagagctctggggcatctggcttcggggcattctttgactaaggtggatggaggttgcaggtcttttcctgggtgggcgtggggcggggcagcgggttcccagcgtcctcctggcctgggcgtcttggaggctgttgggatgcattccgtccccttgcgcggggcggggccttgaggcgctggggcgggattggcgggggacggtcgcggagccccgccccgaagcacagggtcgagtcccttctttccgctccaacgcacggagggtgaggtcggtacgcggtggtggcgtcacggcgccagctcctcccgacgccgaggtgggttccgggagacccgcgggtctggctgcgagaggtgagggcagagccggggcggggccctagcggggtgtcccggcgacccagaccttaaagggcttctcttcttgcagaccatgggggctcagctaagcggcggccgcggcgccccggagcctgcgcaaacccagccccagccccagccccagcctgcggcgccggagggcccggaacagccccggcatccgccccagccccagccccagccccagccccagccccagcccgagcccagcccgtgggggccgctggacgacgtgcgcttcctcatcgcctgcacttcctggtactgacggcgtcctccgcaggatgtcgcccgtctgtccgccgtcccctgtggttcttgcctgccttgtctcctctccccacgtccctgcgtctcttacaccccctcccacccgaggctccccagagatagcagagaattcgaagaggtcgccggggactggaaagaagtcccggcagggccgccttcgcagtctacaccccagcctgcttcccagcctacacccagacccagctcagaccttcgtgaccaccccatccctttctccggctggctgggtcgggggcatccctctctgtcgctggcttccagaggcaggacaggcctcctggtaagcccgcaaagttgctgacctcctgacttcgtctgccttttattaatatctgtattgctgataaccgtgctcttgactatgtgtcccaggtcatgtcccaggtcatggagaagcccgtgccacagtgaccctccccatactcctgggggggctgctctccatcctggatcgtaaggaggcatcatcaggctgtgttcctggaaccccaataaccctgggcccccagggccagcctgttgtagagggaggctatctgaccgccggtctggcagaggagatgggtgggcagctcccagacaccccaaaggacccggttctcttcccagagcgtcctaaggttactcttggaacctgatctttgttccctcatcccagggaaatgacacactctgtatttctgttttatttagaaatgatttaaaaaacattatacaaaggctgatcagtttaaaatgtgactgacactgaaatgctgtgatgtcccccaggctgaggggaagctaggctctggggcccccagtgctttgcccctctgtctgccctgtcctggggtgatggacaaacagatgaccacaggcaggagaatctgagattggaagcctctaggctgagccctctgggcctggccccacatccctcacctctgcagcctgggctgcctgcctccatctcctgttcattctcagctggcctgccaggagccaatggggagcctggcgggaggcgggggtgcctagagctttcaagaagtgagagcaccaacctgaggagtggacagggaccaggaagtgggggaagggaggccaggaagaggtggatacaggagacacttctcatctcatctcagaccctagaggggtccacagatggggacacaagacccagccagcccactggatggcccgggcaagtaacaacctctctgtgcttcatctgagggcacggtgagagttaccgtcggcctcccagggcctaacacgagtttcatgtgagtggacaggtgtgagctaataaagtgctttgcaaagtataaaacactgtacaaacctatgaatcactaatatctccgcagttgttccctgcctgtcccagggagcctgcccttggccaaaatgagaaaaaacaaggatgatgacaggggacacagcggacccacatgggcacctctgggacaagagattttgcttgagacagctcccagggcagcaggagtccctgtctgtgctacagggtaagccgaccccaatcccagagaccacagggtcgggggcaaggcccatgcaggctcagtgagcaggggtggcatccgagacccggccagcacgctggagactgcctgacacctttttggctttggcagagagccagtgggcattgatgaacccattggccttgtctagggctcctcagtgacaagcagggctgcctccgccgtactgtggagcaaggcaggccaagccctaggaactcctgctggagacagtgaagggcgggccagtgaaggtcaaaaagggagccccctcagcttggggctgctaccggtaggggtgtccttctaagagcagtgtgggaagatgggcccagtgagcgaggtcagcaagggccaagctctgggaaaacactgcttccagccgagagattgagtcggcctcagagtagctggagtcggcctcagagtagtgggggcactgagcacttcagacgccctggtccccttccgaaggactcccaggctctgccagtgttggccctgcagccatctctgcctcacctaactggtgaggctgagctccaggctgcaagtgacagactggagcaaagctggggacagtgacaatagaggggagtggaggacggtcacaaactcggatcttcctccagaaatggggtcagcttctgccccagctctgtagccataggagcagagctcagctactggggtgtctgggcgctagagtggccttagcagcaccttggtccttgtcgcctgggggagggccgctatgctggcctcatcaccaagacagtcacctctagttcacctaaagcctcaagcagcctttgcaaaatgggacagtagtgacaggacatttaaatattcacgatgtgacagctgggtccttgtcagacccagctgggccacagccctgcctgcagcatgtgaccctaaatcctgggtctccgaagagaccctgacaagtggagcaggtttcctgagggatctgccgtctgccagcagggaaacccaggcttgttgctcactgtgtcagaagcaggggtcctgtagccttggaggacagtggggtgggggtagggggacatctgaccagcaggtgttggcaaaaggggaccaggactggtggtatctcccggatgggggatgagagctagtgctggcttcccacagagggtgctgggttccagccaggagtggagctgtggtacctcatggacaccacaggatgccgtgaccacaggggctcctcctggcatggtccctgcctccggatggagcctggcctattcccttaagtagggagtagtttgcccaggacagaaggctggcagctgggtgccagacacccaccctggggcacagcccccataattccctgccccacgctcagcctaggccaatgcacccaccacttcagctgtacgaccccagcctagggccctgctggccctggtgagcactggccagagctgcccctcagaccctggtgaggaagggcctggctggccagaccaagtggatagagagggctctgggctgctcacacccattcctggactggccgcttatagtaggtgacaggctgagggcctgtcttgttcttgaactggaagatggtgtagaccagcaccaggatgcagagggacaggatgcaggggatgaccacggccacggcgttcacggagcccggcacatcgttgatggtcaccatgatgtccacgtcgtcctggggcagccgccgctccttccgccgctccacctccttctggttgcagcccatccagtcacgcaggatgttgcgcgggtagcctggctccacgctcagtttctggttgtcaaacttccagtagtcccggcccttgtagaaataggtgtaatctgcagaaatacagcccagcatcaccactcccagacacttccggcacctgctctggggcagtgtgaaaaggagggcacaggcactgtggcaagggaggcaaggtgggcacacctggaggtttggggtgcagtgcttggctgagtcatggagtaagaagctgcagagggggacacccgggacctggagtggtccgcctgtcatctacgggtgctaggaaaccagaggggcttcagggagaactgggacatggttcactttgtgctgcccagacaggaccccttgcacgcaagcctgggtcacagctctgtcacactgtgcgcacaggtcccccttgccccgctcatgtgggctccattaagcctcagcctggctcctgcttgagccaagggaggcagggagcaagatttcaccttgtgttgacagcaagacctctctgcaattatggatttttttggcttggcacacatcacttcacaacacagatgcaggacctttgggagccttctgggagagaggctgggcagccctgccaatcactccctgggcaaccaccccagggctcgagcaacagcctgagcggcccagccagtgggcaaagcagcttgcttaggccgtcctcattggctggcttcccaccgtggctagggctttcattggtctcggtccttgatgtcacctgtctctgaggctccccaaaaagggagatcttgtgcgtaaagcatcaggtatacaagacagccaacaaatagcagctgtggccattggctttctcagcagtgaagcctcctcagagactccttcccagccatctctaacacggccccctctagctcgttgctctctcccagcatttatttcctttttttttttttttaagacaaggtctcactccattgcctaggctggagtacagtggtgcagttgtaactcactgcagcctcaaactcctggtcttaagcaatcctctggcctcagcctcccaagtagctgggactacaggcacatgtcaccacgcccagctaatttttgtattttttttttgtagagatgaatctcactatgttactcaggctggtctcgaactcctggcctcaagtgatcctcccacctcagcctcccaaagtgctgggagtctttcccttatagcgtctgttgccatcttgctttatgcccctagacttggacgtctgcaagtcctgttgactgctacgtccccagctcccaccacacaagctgtctattattatggagtgagtgaatgaatcctgtcaatccacataaactgaaacccatgatgatgacaatgatgatgacgatagcagctaaaatatacagcatggatggtgtgctaggcattatttctaagtatgctacataatttgtcttctttaatcctcacaaaaccattatataaaggtaggtactgttattatcattttataaatgagaaaacagaaaacttattaaagatttgctcagattcatagtgagtggtactatggtggttacgaacccagccagtccagctctagagtctgtgtttttgaccatatcaatggagatctatttaacaaacactcctggaggcccactctgcatctggccaggctagcagctcctcctgagaagctcctaggctggtggggagacaggctgagtgtctgatggcagtcgtgggggctggtggccagcatggcttctaggaggagttcaggaaacataaaaagtttctctcttgatgcagtggctcacacttgtaatcccagggctttgggaggctgaggtgggaggattgcttgaggccaggagtttgagaccagcctggccaacatagtgaaaccctgttgctacaaaaaaatgtaaattagccaggcacagtggcatgtgcctataatcccaactactcgggaggctgatgaggcaggaggatcatttgagactaggaggttgaggctgcagtgagctatgatcatgccacagcattccagcctaggcgacagagtgagaccttatctcttagaatttaaaaaaaaattttttttgaaggttttctttccatcttcttgccctcgagccctgtgaaaaagtggctttgaaacatgcatgcccatcattgcttttcagattgggtaactcaaggcgtccctggagtacactgaggataagtgtttgagaaatgctgtctgaaggaatgaagtcagtctatgacaacgtctctctgccgtgaatcattcctgcagatgaaaaagtgtgacttggcagctggtaagtgaattaatggaccacgtgaacatgggtagatatgaggcagttgtctgccaccaggtgttttttcaaacctggacgcccatgggcactgagtatgcccgtgggcactggtgaggaccacataaaaccggctccccatgcccaccctggcccggcccttacgtacatccttccttgctgatgaaggctccttggggagcctgtgggatgcccttccacacggtgatgggcttagggtagccagggtccgtggcccgccgctcctcgctgtagcgccagtaccgctcgcctttgaaaaagtaggtcttgcccacaggttcccagcgcagagctgtgtcaatgccttcacggggcaaacagctgcccagctcccccaggctgtgggggtacccaggctccaccgtcacctccttaaacacccaatacttgtcacctgtggccaagaggagcccaggatcagcttccccagtcactcagtgccgtttgcccatcttcagggtgtcaggtgaaaacagtctgatgccctcagccccttggcccagttagagttgggaagggcacgaagcctgaggccagtcacagatcctggacaacttgcctctgctgcctgggctccgagtcccaccctcttttgttcatgtgacttgctcctctctcctctctggtgatctcagccacttacatgactttgcatatgcactaccactccccaaacctgctaccagtgacacccgactctgaggctctcccactggacctgagcagcagagccagaaaccctgacctccctcggcctaccggcagctctgcattggctggctccccagagctcctcatctgcaccacagaggggctccctcctcatcaccttctgcctcccaggtccccaacagggagtcctagcctcactgttgaccctctctttccttctcctctcagtattcagccacttcttttttttaagatggagtttggctcttgttgcccaggctggagtgcaatggtgtgatctcagctcaccacaacctccacttcctgggttcaagcgattctcctgcctcagcctcctgagtagctaggattacaggcacgtgccaccatgcttggctagtttttgtaattttagtagagacgtggtttcaccatgttggtcaggctggtctcaaactcctgacctcaggtgatctgccagccttggcctcccaaagtgctgggatttcgggcgtgagccactgcgcctggccgagtattcagccacttctgaggccctctgactctcctggcagctgtcccctgcccttcagctgcacggctcctccctcatttgggcctcatgagtggcgcgctccagaaccacctcagaaatggctgccctgcccctgccatgtctgtcacctcctgccctctggctctctgctgctcggaaacattccatgaatttccagccttggcctaatggatcaagaccacattctggcctggcagccagggctcttcaggatttgcctccaaatgacctttctgggccatttctcacagctttccaaggcggggcctccgtggccatcaggtgggccttctaagccctgtggccgtccgtacacatcccagccctgctcctttattcagccgttgtccctctggaatgccttccttgcttctcactatctgtatctcacccatctgaggtctggcccgagtcaagataactgtcatgaaacaacctagcacagtgctgggtacagggtgggcaccttagctccctcccacaccctcccccgacctccccagcttgagtgacctcttccctctgggttcttacagaactgacccgatggcctcccatgaggtactgggtggtcttcaattgcttgtcccacactctacttcatgtggacgaagctggtcaccccaccaatctcggcacatacagattctcagtctcactttctgacttgatttgtcagaggtcagtgtctccgttagactagaggggccctctgaggacatctgcctcccaccccgcctcttccagtttagatgggaaaaaggaggtcccaagaccttgggcagggaactgtcccacagcacagtctacattacctttgaagaagacaaatctcccatcggccctttcataggctgcgtcgatgcgggcaggcaggcccttccagaactgctcgatctgcatggggtagccctcctgcactcggttattgcgcagacgccagaaccagcgatcctgggaggaagcgggagagggggagagaggtgtgtcaggccctgcctccgaacccagtgattgcagctgtggggcttaggtcccaacagcccagccctccaccgagactgtccattagctgcttctgacttttaaagccctgggaggaagacaggatgctcctgtaactgtcttcaattcagcctcctgctgactcttgctgctgggtggacaatgagacaaacagcagacaggcctggtgtggaaaaggaggtgtgagggagccggaaaggatgatgttggggcctggagtggccacatgggggcagtggagcgtcactgacatcagccagactggtcctcgggacagtgggaggctggggtggtcactgagcctgggccgagcgccctccatgaggctggctccatccagcagggccaggatcatggaagccaagtcatgggaattccctcgagacctgggcatgaattcacattcctccatttatagctgcatgacctaggcctcacctgcaagtgcaggtaataatggagaatcagatgagagattctaggcaaaatgcccagaccagtacggggcacacagtccatgttgagtaaatggcagctaaatagtccgagtccagtaaaaacgcctcttgtaactggtgcctcagtcttgggctggtacacaagcagtctaggcaaggcctgtagcctccaggcctcagttttctttctttttttttttttttagatggagtctcgctctgtcacccaggctggagtgcagtggcgcaatctcggctcactgcaagctccgcctcccaggttcatgctattctcctgcctcagcctcctgagtagctgggactacaggcgcccgccaccacacccggctaattttttatatttttagtagagatggggtttcaccatgttagccaggatggtcttgatctcctgaccttatgatccgccctccttggcctcccaaagtgttgggattgcaaggcgtgagccactgcgcccagcctccaggcctcagttttcttatgtgtaaatggggatgataaaacccggacctgcctatgaacggttcagttggatcaaagtagaatgagtgcagaagaagaagcatgatttgtaaaagatggtacaaaagctagtattttaaaaggtgttttacaaagcactttcacatccaggtttttgaccttattttgactttcatgtctctgttaagttgatctgagatatacggagtcttaagaaaggccaggtgacttgcctagagccactcagtgagaagccagactggggctgactcacgctgcccgattcctgcgcagtgctcagtgcgtgctgggagaactccacaaggggagcgaggcagcctctttcaccatcctgtgtgatggagccaccctgcccagatccccttcagagaagggcttgttgccccagtggccagcagtgtggccagcaggcagttttcaactgtcagcccctttggggatgttccctgcttcagagagctctcctcagtcactggatgcccttcctcatccagtgattgaatgaggtaggggttataatgttccagatattttggacccaacgtaggctgagtgacaggccaccgtagccccagagctccctgcgggggtggctgaggctgccatgggcctctgttgccacttaacctctccctcttccctgtcctgcttccttctccccctcacaaatgttgattctgaaagtactctctaatcgaaatcctgcattccagaccccacctcagagttcactccccgagagcccaacctgcaacacgtcaagcagactgccaccctgtcagtccatggctgatggaggacagatgacaagatataccctgggctgctgccagtagcagcccctcaagccttggtagggtctggagtcagactcagccaccactgacctagcccctactccaagttgaccatcttcagagccgggtactcactggatcttcacacactctttgttagaggaatgactcccccaggtttcggatggagaaactgaggtcccaagaagggtggtcacagaccagaagccagcttccagcactttctcccagcattaaccccaggggaggtgagggatcacccatctttccccctccctcttgggaacagttgattcacccagcagcactaggaagagaccccatgccctggccactgggctagctcctgtccaggccccattgtaatcgaatcccaaatcaggagccttccccagctccatgatgtcggggaggaggaggaaaggtcaggggccagctgggtggtgccaatccattggccctaccttaaagacaaacatctcgccccggaagagggccactgtgttgaagttgccgtcacagatgttgggtttggtgcctggtgtggatggccggtccccgaggggcggccgagggggcctgggctggcgctcgtgtttcctctccgatggtgagtggatcctgcggacggggagtgtagggagtggccttgtgggctccagaggctcggctgggggtcctggagagaggagctgcatcttagagagggggcagccgtttcccgcctcccattgccagtctcagcatcacccaggcagctctgagacaagtctgtcccagttcagcctcctgttccctctccccagtttaactcccccagtctttgagaaaatggatgaaaatagccattagaatgggactctcatctttccatccccgaatctggtatcttctcttttctctctcctgttacagagcaatcatgtccttccttagggtcagcgctcttccttaggccataccctctttgcccccttcacacgcactggccccacttcctcacccccttcatttattctctttcccaccccagtgcagcttctacccgtcacccactccaactgctctgccaagatcatccaatggttacttgactcagactttaataagcacatgcatcatctggggatgttgctaaaatgcagatgagggctcagagggcctggggtggggcctgagagtttgcattccttcacactctcaggtgatgctgatgctgctggtctgaagactacattttgagcagcaagattcatagaaacactttcctggaaacactctcttggttgtcctcctgcctcatgggctgttctttctcagtctcctttgctggctgcgtgtcctcatctgccctactctagaggctggcgtgcccttgggtcctcttctcttccgtctctacattttcatccttaggtcagtgcttcttcacttgggctgcatattaggatcacctttgggagcttttcaaactggatgttcaggaagcaccaggccagctctccaacttttttttttttttttttttttttgagaaggagtctcgctccgtcccccatgctggagtgcagtggcgtgatctaagctcactgcaacctctgcctcccaggttcaagtgattctcctgcctcatcctcccaagtagctgggactacaggcacgtaccaccacacccaggtgattttttttttttttttttttttttttagcagagatggggtttcaccatgttgaccaggctggtcttgaactcctgacctcaagtgatccacccaccttggcctcccaaagtgctgggattacaggcgtgagccaccacgcccaatacccaactattaataaaaccaaatctctagagctgagggctgggtgtctgtgtttttttattagaatcccaaggtaattccaaagggcagccaagttgagaatcactgctctaggtggtctcatccaggctcatggctttacagacctgcatcagagctgtccagtagagtgttctgtgatgatggaaatggtccatatctgcatcgttcactacagtagcccctagccacagccacatatggctactgaggtcttaagatgaatgactagttcttagtgtgactgagacccactaaagaactataactgaaatgataattttaatatatttttgggggggtagagacaggggtctcactttgttgcccaggctggtcttgaactcctggcctcaagcaatcctcccacctcggcctcccaaagcgctaggattacaggtttgagccaccgcgcccggcctaataaatataaatttaaatttcattactatgaaatttaatactagtttatttaatagtagtttatttaatacatactagtgtatgactagtggttactgtattgaacaacaaagatcccaaataagtattccagcctagattttttttttttttgagacggagtctcactctgtcgcctaggctggagtgcagtggtgtgatctcagctcactgcaacctccgcctcccgggttcaagtgattctcctgcctcagcctcccaagtagctgggattataggcgtgcaccaccatgccaggctaattttttgtatttttagtagagacagggttttgccatgttggccaggctagacttgaactcctgacctcaggtaatcgcccgcctcggcctccagcctagaattttgagctgcagactggtggaccctattgcttcacaattacaaaagctggaaaccctgggggcatccttgaccctccctccttcctctcaccccatgtctgatctgtcagcagatcctgttgttctacctttggaatagcttctgggacccacagcccccacctggtctctgctgctttacttgtggaggtcctgcctgtcctccagggctctggctgggtcatctcctccagagggagccctccttctgtgctccgtagcctgtgggctgtgggtgcctgtgctgtcttgacaagcatttgctcaagtaaactggtctccctagctcacctgacttgaccagaacaagaacctcacataccagtgtgaacagaactgggagagaggtgtgtaggaggcctttcatatcttacctagatagcagtagcttctcatctttcaccttttctttctttttttttttttttttttttttttttttttgagacggagtctcgccctgttgcccaggctggagtgcagtggtgcgatctcagctcactgcaacctctgcctcctgggttcaagtgattctcctgcctcagcctcccaagtagctgagatttcacttgcccaccaccacacctggctaatttttttgtttgtttgttttaatatttttggtagagatggggtttcaccatgttggccagactggtctcaaactcctgacctcaagtgacctgcctgcctcagcctcccaaagtgctgggatttcaggcaagagccaccacgcctggccctcgttttttctttttaaagaacaaagctctggttatagtccccatcacgctgtatcaccgttactcctgcagatgtgtgaacctgcctggctagaggtggaatctatgggagcactcagtcaccatctggtgtgggagggagggagagaagcatgaagggacggggaagagtgtggaaggggaggggtaaaggagagggaatgggtggccctcacctcacttttgtccctctcagttacagctcagaccctcccctaggtttcccaggtgtgccaggggaagccttgccctctggccaggcaaagccattggaagtctgtaaaggtcacacacagagaaacagcagcagtgctgatgatagcaacgtccccctccctcgtcccctgccccatgacaggtaggcagtcacagcccagccccgaggaaggagcagtcccccctctccctgccacacaccatagatcttctggatgccctggagatcgtcctggggcagcttgaagttgtgcgtctccatgtactggtagaagggcgccatgatggcgctggggtcgctggagtgctccagtcccagcgcgtggcccagctcatgcacagccaccaggaagaggtcgttccc

SEQ ID NO: 8577 - DNA, 21024 bp, Homo sapiens
cggaagtggaaacggaaacctttttagggagtccaaggtacagtcgccgcgtgcggagcttgttactggttacttggtaagctggtgtgaggggaacctgggagggtcagctccggtcctgggtcgggaggggtgggggccagaggattcagggccggaggttctggtgggggcccagtgggcgggacccgaggacggaggggccgggaggccgagaggggcggggtcgcggcggggcctgagggacggaggccgggatacttgggaaaggatccgccggccttgaactcccgcctccgccgcccctaggcctcatggcggtccgagcttcgttcgagaacaactgtgagatcggctgctttgccaagctcaccaacacctactgtctggtagcgatcggaggctcagagaacttctacaggtgcggcgggagccccggggcttacggtggcggggaggcgtgcgcaggagtcaagagctccggcagtgggagggtgccggcccctctgccccgccaccaccgagtccatgtccctacagtgtgttcgagggcgagctctccgataccatccccgtggtgcacgcgtctatcgccggctgccgcatcatcgggcgcatgtgtgtgggtaaggcaggtggaggacgccgagggagggagtggtctccaagcaccattaattacacccccggagggaacccggagtgacctagggattcccagggtatcatctgttatctctgggcactatagaatctctcaggccaagcgtcaggagatcggggcaaccctctagcaaaggctgctggataatagtaataacaaataatgtaaagtgctttcactcctgttctcattccttcgtcacaaagacactagaaggtaggagttactggcctaacttgactgatgaggaagttgagacttgacctaagtgactcagtaagttccacacctagttcctagtgttggagaaggatttttctcttttttttttttttttgaggccagatttttgctctttcgcccaggctggagtgcagtggcaagatcacagctgtctgcatcctcaacttcttaggctcaagtgatcctcccacctcagcctaccaggtagctagggccacaggcacgtgccaccacacctggctaatttttacatttttggtagagacgcggcctccctgtgttgcccagcctggccttgatctcctgggctcaagtgatcttcttaccttggtctcttaaagtgttgggattataggcgagagccactatacccagccgaggatttgtatctcatctctccctgccactgactgggcaaggtgctttctctttctaagcatccatttctgtctctgtaaagattagctaagatatgcggtcttcctgctcagttacgttggaatcttaaattccctttaccacatctctaccctaccttcctacctgtcagcactgttaattctggtcgttggtcctttcctttttattattattattatttttttttgagatggagttttcgctcttgttgcccaggctggagtgcaatggcacgatcttggctcactgcaacactctcttcaagtgattctcctgcctcagcctcccaagtagctgggattacaggcgcatcccgccacacccggctaatttttttgtatttttagtagagatggagtttcaccatgttggccaggctggtcttgaactcctgacctcaggtgatcctcccacctcggcctcccaaagtgctgggattacaggcgtgagccactgcgcccggccggtcctttcattaagctggatctgtcttccattactgctgcccattgtttcttagttctgctcattgaggtcacttttagaagtctgtttattttatttttttacttttactttaatttttaaaaatcttaagcctgcttgggaggtcgaggcaggtggatcacctgaggtcagcagttcgagactaacctgaccaacatggagaaaccccgtctctactaaaaatacagaaattagccgggtgtggtggcgcatacctataatcccagctacttgggaggctgaggcgggagaattgcttgaaccctggaggtggagctcaccctgcggtgagctgagattgtgccattgcatttcagcctgggcaataagagtgaaactgtgtctcaaaaaaaaacaaaaaacaaaaaacaacaacaacaaaaacttaagcctagtgacctcaaagtattttcctattcagttaaaatactctgatctctaaccatgcccttaggacttgaagcaagttctgacaacaagggagattttagcttagtccttgtgtattttatgatgggagtgacctggaattcagaaattgattggcgtgtatttgtagattgttcattcttgttgctgtatggtgtgttttgtgtaagtatatcacaacgtattcatccattccatcgacagtgcatttgggcagttttcactttggtctgttaggaatagtgctgctggccgggcatggtggctcacgcctgtaatcccagcactctgggaggccgaggcgggcggatcacgaggtcgggagatcgagaccatcctggttaacacggtgaaaccccgtgtctactaaaaatacaaaaaaattagccaggtgtggtggcgggtgcctgtagtcccagctacttgggaggttgaggcaggagaatggtgtgaaccggggaggtagaacttgcagtgagccgagattgtgccactgcactccagcctgggcaacagaacaagactccgtctcaaaaaaaaaaaaaaaagtaatagtgctgctatgtttttttagtgaacacatgtacatatttctactgggtatatgatacctaagagtggcatggcagagtcacaggttatgtgactatttagtagtagttgcagatgatgccagataattatctaaagtgattgaccaacttacactcctgtctcagtatgagagttcagttgctccatatatctttgccaacacttggaattgatgacttgtaaaaattttagtcattctggctgggggcagtggctcacacctgtaatcgtagcactttgggaggtcgaggtgggcggatcacctgaggttaggagttcgagaccagcctggccaacatagtgagaccccatctctacaaaatcacaaaaagttagccaggtgtggtggcacgcacttgtaattccagctactcaggaggccgaagcaggagaatcacctgaacccaggatgcagaagttgcagtgagctgagatcgcaccactgcgctccagcctgggtgacagagtgagactctgccttaaaaaataataatctagccattctgctatgtgtgtagtgttagctcagttttttttgtttttttgttttttttttttggagacggagtttcgctctgtcacccaggttggagtgcagtggcgcgatctcggctcactgcaagctccgcctcccgggttcacgccattctcctgcctcagcctcccgagtagctgggactacaggcgcccgccaccacgcctggctaattttttgtatttttagtagagacggggtttcaccgtgttagccaggatgatctcgatctcgatctcctgaccttgtgatctgcccacctcagcctcccaaagtgctgggattacaggcgtgagccaacacgcccggcagctcagtttttaagtagcaaaatatacagctaatgccaagagctcagcttccctcccagttggtgatggtgaagtaggcaggatttattgggattcctgggtggtctctggcctgccctgggtgttttccagatcagtgggttggagggctgggctctgggcctaaagctttcctgggaaagctgattgggctgggctgagtggtatcctcagcccctagggctcagcaggcatcttgtgtattcaccctctaatttgggtttctccagggaacaggcacggtctcctggtacccaacaataccaccgaccaggagctgcaacacattcgcaacagcctcccagacacagtgcagattaggcgggtggaggagcggctctcagccttgggcaatgtcaccacctgcaatgactacgtggccttggtccacccagacttggacagggtgaggcagcccaacttgacccaagagtcacagggccatcctagtcagtggttagccactgttctttcccaacaggcagcaattaggggtctctcctgtggtttttctatatgggctcttgagtttcaggtactcattggaatagtgataacagaggccttatcaagtgtcagaaagaagctggggagggtatgaatccttcatgattggggagattgaaccatccagtcctgcatcctgggccaggataggtgattgactgttgaacttttgactgtgggtgagaggggaaagaagtgatattgagaccagcctccagctgttcagggcatgcatgaatattaggggcttcacagctgcccttgactctgctctaagctgtacttcctcctttctctgggtgaggctttcatatgaggtacagaggagaaatgaggggctcagggagccaaggcctggatgcttctgggcatggagaaccttggttctggggctgtaagttctgagccctgaacacaatatctttgattgacaggagacagaagaaattctggcagatgtgctcaaggtggaagtcttcagacagacagtggccgaccaggtgctagtaggaagctactgtgtcttcagcaatcagggagggctggtgcatcccaagacttcaattgaagaccaggatgagctgtcctctcttcttcaagtcccccttgtggtaagcattcctgtcctctgaaccccgtctcccgaggcagatcctttcgcctagtgtttgggagtctgggtcattacctgccacagtttgggactggggctgcaggtcagggaggagcagggtttggggagagtcttcattgaggagggagagaatttggtgccgtgactcacattgagcccatcccttggcaggcggggactgtgaaccgaggcagtgaggtgattgctgctgggatggtggtgaatgactggtgtgccttctgtggcctggacacaaccagcacagagctgtcagtggtggagagtgtcttcaagctgaatgaagcccagcctagcaccattgccaccagcatgcgggattccctcattgacaggtacctggggcctctcctttcttctgctcagggttgggggttaacttgcattttgagagtatggggaaaagatgtcatctagaatgggagcctaccagtttgttctggtagcttctcgagtgtgagagcatatctgtacactgctgagcagataagagccagcatattcaaaaaatatttcttgagcatctgctaatcctcatctttgtggtttttcagggctaggatactagagcagtagctgcttgagcagcttgtcagagctggtcccgggatgagggctgaggcaggcacctcacttgagagtgaggtgggctctgtgaaacagctactgaccgtgcgctttcctttctcttcagcctcacctgagtcaccttccaagttgttccatgggctcctggctctggactgtggccaaccttctccacattccgcccaatctgtaccggatgctggcagggaggtggcagagagctcactgggactgaggggctgggcacccaacccttttccacctgtgcttatcgcctggatctatcattactgcaaaaacctgctctgttgtgctggctggcaggccctgtggctgctggctgagggttctgctgtcctgtgccaccccattaaagtgcagttccctccgggccattctgaatgtgatgtttggggccctcagcctgtgtacaatccctgcactctccagttgttccagcattctgggaagatagggtgggatgaacacaacacacacccaacccagttcaccacctccacacacgccattcccttctcctctaccatcaggatgtgaggcttcatcctggggcaagaaacactctccactacagttctccttttttcttttttctttttgaggcagtgtctccctctgtcacccaggctggagtgttgtgacgcaaggatggctcactgtagccttgacctgttgggctcaagcgatcctctcgcctcgtttatttttttgtagaaacgaagtcactgtgttgcccaggctggtttatactcctgaactcaagcgacccaccgcctcggcctcccaaagtgttgggattacaggcgtgagccacggcgcccggtctagttctcacagttttcacccgacttctgcgccggtcttctctggccttgaaaggcagagagtccgttccgattttcccctgagctgggcaagtcccctgtgagagctctggggcatctggcttcggggcattctttgactaaggtggatggaggttgcaggtcttttcctgggtgggcgtggggcggggcagcgggttcccagcgtcctcctggcctgggcgtcttggaggctgttggggtgcattccgtccccttgcgcggggcggggccttgaggcgctggggcgggattggcgggggacggtcgcggagccccgccccgaagcacagggtcgagtcccttctttccgctccaacgcacggagggtgaggttggtacgcggtggtggcgtcacggcgccagctcctcccgacgccgaggtgggttccgggagacccgcgggtctggctgcgagaggtgagggcagagccggggcggggccctagcggggtgtcccggcgacccagaccttaaagggcttctcttcttgcagaccatgggggctcagctaagcggcggccgcggcgccccggagcctgcgcaaacccagccccagccccagccccagcctgcggcgccggagggcccggaacagccccggcatccgccccagccccagccccagccccagccccagccccagccccagcccagcccgagcccagcccgtgggggccgctggacgacgtgcgcttcctcatcgcctgcacttcctggtactgacggcgtcctccgcaggatgtcgcccgtctgtccgccgtcccctgtggttcttgcctgccttgtctcctctccccacgtccctgcgtctcttacaccccctcccacccgaggctccccagagatagcagagaattcgaagaggtcgccggggactggaaagaagtcccggcagggccgccttcgcagtctacaccccagcctgcttcccagcctacacccagacccagctcagaccttcgtgaccaccccatccctttctccggctggctgggtcgggggcatccctctctgtcgctggcttccagaggcaggacaggcctcctggtaagcccgcaaagttgctgacctcctgacttcgtctgccttttattaatatctgtattgctgataaccgtgctcttgactatgtgtcccaggtcatgtcccaggtcatggagaagcccgtgccacagtgaccctccccatactcctgggggggctgctctccatcctggatcgtaaggaggcatcatcaggctgtgttcctggaaccccaataaccctgggcccccagggccagcctgttgtagagggaggctatctgaccgccggtctggcagaggagatgggtgggcagctcccagacaccccaaaggacccggttctcttcccagagcgtcctaaggttactcttggaacctgatctttgttccctcatcccagggaaatgacacactctgtatttctgttttatttagaaatgatttaaaaaacattatacaaaggctgatcagtttaaaatgtgactgacactgaaatgctgtgatgtcccccaggctgaggggaagctaggctctggggcccccagtgctttgcccctctgtctgccctgtcctggggtgatggacaaacagatgaccacaggcaggagaatctgagattggaagcctctaggctgagccctctgggcctggccccacatccctcacctctgcagcctgggctgcctgcctccatctcctgttcattctcagctggcctgccaggagccaatggggagcctggcgggaggcgggggtgcctagagctttcaagaagtgagagcaccaacctgaggagtggacagggaccaggaagtgggggaagggaggccaggaagaggtggatacaggagacacttctcatctcatctcagaccctagaggggtccacagatggggacacaagacccagccagcccactggatggcccgggcaagtaacaacctctctgtgcttcatctgagggcacggtgagagttaccgtcggcctcccagggcctaacacgagtttcatgtgagtggacaggtgtgagctaataaagtgctttgcaaagtataaaacactgtacaaacctatgaatcactaatatctccgcagttgttccctgcctgtcccagggagcctgcccttggccaaaatgagaaaaaacaaggatgatgacaggggacacagcggacccacatgggcacctctgggacaagagattttgcttgagacagctcccagggcagcaggagtccctgtctgtgctacagggtaagccgaccccaatcccagagaccacagggtcgggggcaaggcccatgcaggctcagtgagcaggggtggcatccgagacccggccagcacgctggagactgcctgacacctttttggctttggcagagagccagtgggcattgatgaacccattggccttgtctagggctcctcagtgacaagcagggctgcctccgccgtactgtggagcaaggcaggccaagccctaggaactcctgctggagacagtgaagggcgggccagtgaaggtcaaaaagggagccccctcagcttggggctgctaccggtaggggtgtccttctaagagcagtgtgggaagatgggcccagtgagcgaggtcagcaagggccaagctctgggaaaacactgcttccagccgagagattgagtcggcctcagagtagctggagtcggcctcagagtagtgggggcactgagcacttcagacgccctggtccccttccgaaggactcccaggctctgccagtgttggccctgcagccatctctgcctcacctaactggtgaggctgagctccaggctgcaagtgacagactggagcaaagctggggacagtgacaatagaggggagtggaggacggtcacaaactcggatcttcctccagaaatggggtcagcttctgccccagctctgtagccataggagcagagctcagctactggggtgtctgggcgctagagtggccttagcagcaccttggtccttgtcgcctgggggagggccgctatgctggcctcatcaccaagacagtcacctctagttcacctaaagcctcaagcagcctttgcaaaatgggacagtagtgacaggacatttaaatattcacgatgtgacagctgggtccttgtcagacccagctgggccacagccctgcctgcagcatgtgaccctaaatcctgggtctccgaagagaccctgacaagtggagcaggtttcctgagggatctgccgtctgccagcagggaaacccaggcttgttgctcactgtgtcagaagcaggggtcctgtagccttggaggacagtggggtgggggtagggggacatctgaccagcaggtgttggcaaaaggggaccaggactggtggtatctcccggatgggggatgagagctagtgctggcttcccacagagggtgctgggttccagccaggagtggagctgtggtacctcatggacaccacaggatgccgtgaccacaggggctcctcctggcatggtccctgcctccggatggagcctggcctattcccttaagtagggagtagtttgcccaggacagaaggctggcagctgggtgccagacacccaccctggggcacagcccccataattccctgccccacgctcagcctaggccaatgcacccaccacttcagctgtacgaccccagcctagggccctgctggccctggtgagcactggccagagctgcccctcagaccctggtgaggaagggcctggctggccagaccaagtggatagagagggctctgggctgctcacacccattcctggactggccgcttatagtaggtgacaggctgagggcctgtcttgttcttgaactggaagatggtgtagaccagcaccaggatgcagagggacaggatgcaggggatgaccacggccacggcgttcacggagcccggcacatcgttgatggtcaccatgatgtccacgtcgtcctggggcagccgccgctccttccgccgctccacctccttctggttgcagcccatccagtcacgcaggatgttgcgcgggtagcctggctccacgctcagtttctggttgtcaaacttccagtagtcccggcccttgtagaaataggtgtaatctgcagaaatacagcccagcatcaccactcccagacacttccggcacctgctctggggcagtgtgaaaaggagggcacaggcactgtggcaagggaggcaaggtgggcacacctggaggtttggggtgcagtgcttggctgagtcatggagtaagaagctgcagagggggacacccgggacctggagtggtccgcctgtcatcctacgggtgctaggaaaccagaggggcttcagggagaactgggacatggttcactttgtgctgcccagacaggaccccttgcacgcaagcctgggtcacagctctgtcacactgtgcgcacaggtcccccttgccccgctcatgtgggctccattaagcctcagcctggctcctgcttgagccaagggaggcagggagcaagatttcaccttgtgttgacagcaagacctctctgcaattatggatttttttggcttggcacacatcacttcacaacacagatgcaggacctttgggagccttctgggagagaggctgggcagccctgccaatcactccctgggcaaccaccccagggctcgagcaacagcctgagcggcccagccagtgggcaaagcagcttgcttaggccgtcctcattggctggcttcccaccgtggctagggctttcattggtctcggtccttgatgtcacctgtctctgaggctccccaaaaagggagatcttgtgcgtaaagcatcaggtatacaagacagccaacaaatagcagctgtggccattggctttctcagcagtgaagcctcctcagagactccttcccagccatctctaacacggccccctctagctcgttgctctctcccagcatttatttcctttttttttttttttaagacaaggtctcactccattgcctaggctggagtacagtggtgcagttgtaactcactgcagcctcaaactcctggtcttaagcaatcctctggcctcagcctcccaagtagctgggactacaggcacatgtcaccacgcccagctaatttttgtattttttttttgtagagatggaatctcactatgttactcaggctggtctcgaactcctggcctcaagtgatcctcccacctcagcctcccaaagtgctgggagtctttcccttatagcgtctgttgccatcttgctttatgcccctagacttggacgtctgcaagtcctgttgactgctacgtccccagctcccaccacacaagctgtctattattatggagtgagtgaatgaatcctgtcaatccacataaactgaaacccatgatgatgacaatgatgatgacgatagcagctaaaatatacagcatggatggtgtgctaggcattatttctaagtatgctacataatttgtcttctttaatcctcacaaaaccattatataaaggtaggtactgttattatcattttataaatgagaaaacagaaaacttattaaagatttgctcagattcatagtgagtggtactatggtggttacgaacccagccagtccagctctagagtctgtgtttttgaccatatcaatggagatctatttaacaaacactcctggaggcccactctgcatctggccaggctagcagctcctcctgagaagctcctaggctggtggggagacaggctgagtgtctgatggcagtcgtgggggctggtggccagcatggcttctaggaggagttcaggaaacataaaaagtttctctcttgatgcagtggctcacacttgtaatcccagggctttgggaggctgaggtgggaggattgcttgaggccaggagtttgagaccagcctggccaacatagtgaaaccctgttgctacaaaaaaatgtaaattagccaggcacagtggcatgtgcctataatcccaactactcgggaggctgatgaggcaggaggatcatttgagactaggaggttgaggctgcagtgagctatgatcatgccacagcattccagcctaggcgacagagtgagaccttatctcttagaatttaaaaaaaaattttttttgaaggttttctttccatcttcttgccctcgagccctgtgaaaaagtggctttgaaacatgcatgcccatcattgcttttcagattgggtaactcaaggcgtccctggagtacactgaggataagtgtttgagaaatgctgtctgaaggaatgaagtcagtctatgacaacgtctctctgccgtgaatcattcctgcagatgaaaaagtgtgacttggcagctggtaagtgaattaatggaccacgtgaacatgggtagatatgaggcagttgtctgccaccaggtgttttttcaaacctggacgcccatgggcactgagtatgcccgtgggcactggtgaggaccacataaaaccggctccccatgcccaccctggcccggcccttacgtacatccttccttgctgatgaaggctccttggggagcctgtgggatgcccttccacacggtgatgggcttagggtagccagggtccgtggcccgccgctcctcgctgtagcgccagtaccgctcgcctttgaaaaagtaggtcttgcccacaggttcccagcgcagagctgtgtcaatgccttcacggggcaaacagctgcccagctcccccaggctgtgggggtacccaggctccaccgtcacctccttaaacacccaatacttgtcacctgtggccaagaggagcccaggatcagcttccccagtcactcagtgccgtttgcccatcttcagggtgtcaggtgaaaacagtctgatgccctcagccccttggcccagttagagttgggaagggcacgaagcctgaggccagtcacagatcctggacaacttgcctctgctgcctgggctccgagtcccaccctcttttgttcatgtgacttgctcctctctcctctctggtgatctcagccacttacatgactttgcatatgcactaccactccccaaacctgctaccagtgacacccgactctgaggctctcccactggacctgagcagcagagccagaaaccctgacctccctcggcctaccggcagctctgcattggctggctccccagagctcctcatctgcaccacagaggggctccctcctcatcaccttctgcctcccaggtccccaacagggagtcctagcctcactgttgaccctctctttccttctcctctcagtattcagccacttcttttttttaagatggagtttggctcttgttgcccaggctggagtgcaatggtgtgatctcagctcaccacaacctccacttcctgggttcaagcgattctcctgcctcagcctcctgagtagctaggattacaggcacgtgccaccatgcttggctagtttttgtaattttagtagagacgtggtttcaccatgttggtcaggctggtctcaaactcctgacctcaggtgatctgccagccttggcctcccaaagtgctgggatttcgggcgtgagccactgcgcctggccgagtattcagccacttctgaggccctctgactctcctggcagctgtcccctgcccttcagctgcacggctcctccctcatttgggcctcatgagtggcgcgctccagaaccacctcagaaatggctgccctgcccctgccatgtctgtcacctcctgccctctggctctctgctgctcggaaacattccatgaatttccagccttggcctaatggatcaagaccacattctggcctggcagccagggctcttcaggatttgcctccaaatgacctttctgggccatttctcacagctttccaaggcggggcctccgtggccatcaggtgggccttctaagccctgtggccgtccgtacacatcccagccctgctcctttattcagccgttgtccctctggaatgccttccttgcttctcactatctgtatctcacccatctgaggtctggcccgagtcaagataactgtcatgaaacaacctagcacagtgctgggtacagggtgggcaccttagctccctcccacaccctcccccgacctccccagcttgagtgacctcttccctctgggttcttacagaactgacccgatggcctcccatgaggtactgggtggtcttcaattgcttgtcccacactctacttcatgtggacgaagctggtcaccccaccaatctcggcacatacagattctcagtctcactttctgacttgatttgtcagaggtcagtgtctccgttagactagaggggccctctgaggacatctgcctcccaccccgcctcttccagtttagatgggaaaaaggaggtcccaagaccttgggcagggaactgtcccacagcacagtctacattacctttgaagaagacaaatctcccatcggccctttcataggctgcgtcgatgcgggcaggcaggcccttccagaactgctcgatctgcatggggtagccctcctgcactcggttattgcgcagacgccagaaccagcgatcctgggaggaagcgggagagggggagagaggtgtgtcaggccctgcctccgaacccagtgattgcagctgtggggcttaggtcccaacagcccagccctccaccgagactgtccattagctgcttctgacttttaaagccctgggaggaagacaggatgctcctgtaactgtcttcaattcagcctcctgctgactcttgctgctgggtggacaatgagacaaacagcagacaggcctggtgtggaaaaggaggtgtgagggagccggaaaggatgatgttggggcctggagtggccacatgggggcagtggagcgtcactaacatcagccagactggtcctcgggacagtgggaggctggggtggtcactgagcctgggccgagcgccctccatgaggctggctccatccagcagggccaggatcatggaagccaagtcatgggaattccctcgagacctgggcatgaattcacattcctccatttatagctgcatgacctaggcctcacctgcaagtgcaggtaataatggagaatcagatgagagattctaggcaaaatgcccagaccagtacggggcacacagtccatgttgagtaaatggcagctaaatagtccgagtccagtaaaaacgcctcttgtaactggtgcctcagtcttgggctggtacacaagcagtctaggcaaggcctgtagcctccaggcctcagttttctttctttttttttttttttagatggagtctcgctctgtcacccaggctggagtgcagtggcgcaatctcggctcactgcaagctccgcctcccaggttcatgctattctcctgcctcagcctcctgagtagctgggactacaggcgcccgccaccacacccggctaattttttatatttttagtagagatggggtttcaccatgttagccaggatggtcttgatctcctgaccttatgatccgccctccttggcctcccaaagtgttgggattgcaaggcgtgagccactgcgcccagcctccaggcctcagttttcttatgtgtaaatggggatgataaaacccggacctgcctatgaacggttcagttggatcaaagtagaatgagtgcagaagaagaagcatgatttgtaaaagatggtacaaaagctagtattttaaaaggtgttttacaaagcactttcacatccaggtttttgaccttattttgactttcatgtctctgttaagttgatctgagatatacggagtcttaagaaaggccaggtgacttgcctagagccactcagtgagaagccagactggggctgactcacgctgcccgattcctgcgcagtgctcagtgcgtgctgggagaactccacaaggggagcgaggcagcctctttcaccatcctgtgtgatggagccaccctgcccagatccccttcagagaagggcttgttgccccagtggccagcagtgtggccagcaggcagttttcaactgtcagcccctttggggatgttccctgcttcagagagctctcctcagtcactggatgcccttcctcatccagtgattgaatgaggtaggggttataatgttccagatattttggacccaacgtaggctgagtgacaggccaccgtagccccagagctccctgcgggggtggctgaggctgccatgggcctctgttgccacttaacctctccctcttccctgtcctgcttccttctccccctcacaaatgttgattctgaaagtactctctaatcgaaatcctgcattccagaccccacctcagagttcactccccgagagcccaacctgcaacacgtcaagcagactgccaccctgtcagtccatggctgatggaggacagatgacaagatataccctgggctgctgccagtagcagcccctcaagccttggtagggtctggagtcagactcagccgccactgacctagcccctactccaagttgaccatcttcagagccgggtactcactggatcttcacacactctttgttagaggaatgactcccccaggtttcggatggagaaactgaggtcccaagaagggtggtcacagaccagaagccagcttccagcactttctcccagcgttaaccccaggggaggtgagggatcacccatctttccccctccctcttgggaacagttgattcacccagcagcactaggaagagaccccatgccctggccactgggctagctcctgtccaggccccattgtaatcgaatcccaaatcaggagccttccccagctccatgatgtcggggaggaggaggaaaggtcaggggccagctgggtggtgccaatccattggccctaccttaaagacaaacatctcgccccggaagagggccactgtgttgaagttgccgtcacagatgttgggtttggtgcctggtgtggatggccggtccccgaggggcggccgagggggcctgggctggcgctcgtgtttcctctccgatggtgagtggatcctgcggacggggagtgtagggagtggccttgtgggctccagaggctcggctgggggtcctggagagaggagctgcatcttagagagggggcagccgtttcccgcctcccattgccagtctcagcatcacccaggcagctctgagacaagtctgtcccagttcagcctcctgttccctctccccagtttaactcccccagtctttgagaaaatggatgaaaatagccattagaatgggactctcatctttccatccccgaatctggtatcttctcttttctctctcctgttacagagcaatcatgtccttccttagggtcagcgctcttccttaggccataccctctttgcccccttcacacgcactggccccacttcctcacccccttcatttattctctttcccaccccagtgcagcttctacccgtcacccactccaactgctctgccaagatcatccaatggttacttgactcagactttaataagcacatgcatcatctggggatgttgctaaaatgcagatgagggctcagagggcctggggtggggcctgagagtttgcattccttcacactctcaggtgatgctgatgctgctggtctgaagactacattttgagcagcaagattcatagaaacactttcctggaaacactctcttggttgtcctcctgcctcatgggctgttctttctcagtctcctttgctggctgcgtgtcctcatctgccctactctagaggctggcgtgcccttgggtcctcttctcttccgtctctacattttcatccttaggtcagtgcttcttcacttgggctgcatattaggatcacctttgggagcttttcaaactggatgttcaggaagcaccaggccagctctccaacttttttttttttttttttttttttgagaaggagtctcgctccgtcccccatgctggagtgcagtggcgtgatctaagctcactgcaacctctgcctcccaggttcaagtgattctcctgcctcatcctcccaagtagctgggactacaggcacgtaccaccacacccaggtgatttttttttttttttttttttttttttttagcagagatggggtttcaccatgttgaccaggctggtcttgaactcctgacctcaagtgatccacccaccttggcctcccaaagtgctgggattacaggcgtgagccaccacgcccaatacccaactattaataaaaccaaatctctagagctgagggctgggtgtctgtgtttttttattagaatcccaaggtaattccaaagggcagccaagttgagaatcactgctctaggtggtctcatccaggctcatggctttacagacctgcatcagagctgtccagtagagtgttctgtgatgatggaaatggtccatatctgcatcgttcactacagtagcccctagccacagccacatatggctactgaggtcttaagatgaatgactagttcttagtgtgactgagacccactaaagaactataactgaaatgataattttaatatatttttgggggggtagagacaggggtctcactttgttgcccaggctggtcttgaactcctggcctcaagcaatcctcccacctcggcctcccaaagcgctaggattacaggtttgagccaccgcgcccggcctaataaatataaatttaaatttcattactatgaaatttaatactagtttatttaatagtagtttatttaatacatactagtgtatgactagtggttactgtattgaacaacaaagatcccaaataagtattccagcctagattttttttttttttgagacggagtctcactctgtcgcctaggctggagtgcagtggtgtgatctcagctcactgcaacctccgcctcccgggttcaagtgattctcctgcctcagcctcccaagtagctgggattataggcgtgcaccaccatgccaggctaattttttgtatttttagtagagacagggttttgccatgttggccaggctagacttgaactcctgacctcaggtaatcgcccgcctcggcctccagcctagaattttgagctgcagactggtggaccctattgcttcacaattacaaaagctggaaaccctgggggcatccttgaccctccctccttcctctcaccccatgtctgatctgtcagcagatcctgttgttctacctttggaatagcttctgggacccacagcccccacctggtctctgctgctttacttgtggaggtcctgcctgtcctccagggctctggctgggtcatctcctccagagggagccctccttctgtgctccgtagcctgtgggctgtgggtgcctgtgctgtcttgacaagcatttgctcaagtaaactggtctccctagctcacctgacttgaccagaacaagaacctcacataccagtgtgaacagaactgggagagaggtgtgtaggaggcctttcatatcttacctagatagcagtagcttctcatctttcaccttttctttctttttttttttttttttttttttttttttgagacggagtctcgccctgttgcccaggctggagtgcagtggtgcgatctcagctcactgcaacctctgcctcctgggttcaagtgattctcctgcctcagcctcccaagtagctgagatttcacttgcccaccaccacacctggctaatttttttgtttgtttgttttaatatttttggtagagatggggtttcaccatgttggccagactggtctcaaactcctgacctcaagtgacctgcctgcctcagcctcccaaagtgctgggatttcaggcaagagccaccacgcctggccctcgttttttctttttaaagaacaaagctctggttatagtccccatcacgctgtatcaccgttactcctgcagatgtgtgaacctgcctggctagaggtggaatctatgggagcactcagtcaccatctggtgtgggagggagggagagaagcatgaagggacggggaagagtgtggaaggggaggggtaaaggagagggaatgggtggccctcacctcacttttgtccctctcagttacagctcagaccctcccctaggtttcccaggtgtgccaggggaagccttgccctctggccaggcaaagccattggaagtctgtaaaggtcacacacagagaaacagcagcagtgctgatgatagcaacgtccccctccctcgtcccctgccccatgacaggtaggcagtcacagcccagccccgaggaaggagcagtcccccctctccctgccacacaccatagatcttctggatgccctggagatcgtcctggggcagcttgaagttgtgcgtctccatgtactggtagaagggcgccatgatggcgctggggtcgctggagtgctccagtcccagcgcgtggcccagctcatgcacagccaccaggaagaggtcgttccc

SEQ ID NO: 8578 - DNA, 437 bp, Homo sapiens
ggctctgggtgctttaagaatgtctgggagggtcgagcagggattctgaggagagaggggtcatttaaacctggaggaagatgttcagggaaagcttcacaaaggtgaagttgaagctcagtcttgaaggatcagaagttagtcaggagaacggattcagggggcaggagaggaagggtgggggtggcattcctggcggatggaatgcaataaacacagtccagagacaggcagtttcattccacctggctctggaacaaagcaggaggggagggccggagagagatgaggtcagccaggctggaaagcagggcgcttaatgccatacaaaggaatttggatcagcttcttggctagtggggggtttaagtaggagtgggggtggtgatacaattaaatcactctggctgcagttgagggaggattagagggaacaa

SEQ ID NO: 8579 - DNA, 854 bp, Homo sapiens
ccaggccctgaaggatggggaggttttggacagagggaggagagagttagaaaaatttttggtagagagaatcaggtgaaagagatgccctaaagaggactgagtgggtctgaggtgaatgagtgaggaagagcagagtatgtggatacccggaaacacacacacacacacatcatcattatcatcatcatcattgtcgtcgtcatcatcttgctgagtcatcatcatcatcatcatcattgtcgtcgtcatcatcttgctgagtgtctcttgaagtacaggctgtgacaggttgtgggccattttcctgaactcaccacttacccgggatagtaaacatgatacacatcaataaaggcagactttattgtgaatcacagcgcctggtgtatcctgaactttgaggagttatgggagggacacgttgggggaatgggaagggcaccattcaggccaattatggggaaacccctggaggagggtgaatgccgaaggaggaattgggggagtccaggggctccaagttaccactgtgacattttgagagaacccggggcttttgcagattctacaaaatgtgggccaagttcatcctgtccaagtgtgcagcagggcccttggcccccatcactatcctggggacagaagttggctgctgagtgagtgatagaggccgtgcgagaggcacatcgtggaagccaaccagcacccacatccttgcccaccctggacccctttccagccttttcctgagcccctgcttcctcagtcctcccctctctccagcacctgcagcctggctgcctttccgtctctggctgcgctctttctccagcctcggtctggccgcactt

SEQ ID NO: 8580 - DNA, 437 bp, Homo sapiens; identical to SEQ ID NO: 8578

SEQ ID NO: 8581 - DNA, 854 bp, Homo sapiens; identical to SEQ ID NO: 8579

SEQ ID NO: 8582 - DNA, 3399 bp, Homo sapiens
cagatatgatgactatgattatggggaggtgaaccagctcctggagcggaacctcaaggtctatatcaagacagtggcctgctacccagagaagaccacccgaagaatgtacaacctcttttggaggcacttccgccactcagagaaggtatgacctatacaggcagggcaggatggaagtagacaggccaagccagtggagagggcaaggggttaggacccagtgagagtccccagactgagtctgtcctgctaggtgggacaccctgggcctattcctctggattgaagtcctattccactgtgtgatttcagagtctgtttactcacctgtaaaatgggaatgagggtgcctgcttcacattagtggtagcttggtggacctgggttcaaatcataacactatctcttgatagcagtgtgactttcggcaagtcacattatctcgctgagtttttttgtttttttttttgagatgagtctccctttgttgcccaggctggagtgcagtggcacgatcttggctcactgcaacttccacctcccaagttcaagcgattctcctgcctcagcctcctgagtagctgggactacaggcgtgtgccaccatccccagctaattttttgtatttttagtagagacggggtttcactgtgttagccaggatggtcttgatctgaccttgtgatccacctgtctcggacttccaaagtgctgagattacaggtgtgagtcatcgtgcctggcctctctgagctttttatcctgttttttttttgagacagagtcttgctctgttgcccaggctggagcgcagcggtgtgatttcggctcgctgcagcctccacttcctaggctcaagtgtcctcccaactcagcccccagagggcctgaggtacacaccacctgattttttaaattcctagtagagataaggtctcactgtgttgtccatcctggtctcaacctcctgagttcaaatgatcctcctgcctcagcctctcaaagttttttgtttttgtgatggggtcacactatattgtccaggctgtatttgaacttctggactcaagtgatcctctcacctcagcctcccaagtagctgggatttcatttttataatgggaataaatactgctgtatttcaaggttgctgggaagataaaataaaaaaatgtacataaacctctgcaacctctgtctcccgggttcaagtaattctcctgcctcagctttccaagtagctgggattacaggcatccaccaccatgcccagctaactttttgtatttttagtagagatggggtttcactatgttggccaggctggtctcgaactcctgacctcctgatccactcgccttggcctcccaaagtgttgggattacaggcgtgagccaccgcacctggccattttacctttagggaatacagagcttagtcatgataggaatgaatgtgcttgtccttgtactaaactgctcagagccttagcagatgctggggcagctctgtaggaaaggaaatggtgaggtaagtgggtcagggatcaaggcagtctgggaggggtgtgggggtgaggagtgacatcagttgccaacatgccttcctctgtgccccaggtccacgtgaacttgctgctcctggaggcgcgcatgcaagccgctctgctgtacgccctccgtgccatcacccgctacatgacctgactcctgagcaggacctgggcccggttcagctccccacaaggacttctctgtctggagacagccccagacccttttgtgtcccatgcccaccctccccacgctgcagtgggcttgtgtgtgatgtgcagtcccgaagccacaccctcccttttcctcactggaatggacagttcattgcactgactctgggatctcagccctgctcctgggagctggaagagcacttggagatcctaagggaccacacccttcctccttcccctgcccacagaggcagagggcacaggaaagaagccgggccaagctcggaattaatgtgccacaagtgttgtggccttcctgaactgggaagtccctggctggcccccgggggagaggggcaaatgcctccgggactgacactccaggcagctttgccttctctcccctgtcatttccagatttcattacctcctacttgccattcacccatcaatgtgaaagtcagggtcacagctggtctgtgtgtccagttccctaaaagcctgttctgttgggcagcctgaggctgttgcccgaatcctagttcagttttttgacttcctttgccctttttcccttttctccatgcttaatggtgtgaggcgtcaggagagaggccaagtacataaaaaaaaaaaaagcagattatctctagagagtttgagcctttgctggtcacattgccttctgaagaggagggagtattagattataaatcctctttattttggtcctttatgcttgaggttccaacctggagccacagtgtgtgagaggaggaggagagggagaattctgttctcccagagctgcacctgcctcgcagaggccagcaccccactctcctgcctccagtggccctgccgcagatgtctcccaaaaagttgagcctttctagatggcttaggtggcaccatggctcagcaggaggggcgggaggcaccagggttcttgtttggaccctgcccctgggccatggccaggtgaccatggctacattgccaaacctctgactgccacagctgcagactgagagggtgggtctgagtccccacaatgtctgaagctgcccctgggattctcaggccaacctgccaacagcaagcggattttcttgcaagatcagggaccccatttctgcagccagtgtctcctgggtgccttctgaggactcccacccccatcccagtatctcatctgtcccctctcctggggcttaagtgggttgcttccaggcagaagcagccaaggaccgattccaggcactttctgtagcaaatgactgtgaattacgacttctcttgcccttcttctagcagtctgtgcctcctctctgaccagtttggagggcactgaagaaaggcaagggccgtgctgctgctgggcggggcaggagaggagcctggccagtgtgccacattaaatacccgtgcaggcgcggagaagcaaccggcacccccttccggcctgaaagccctccctgcaagaaggtgtgcaggagagaagaggccccggcatggggatctgggttctagagggcatgtgatgactgtaaatgttcactgggtgggtagggagtggtatccagtgttcaagtgcagaaatctttggctttgctaccagttccatatgatgagaaataaacgttcgctgaggttttgtttcata

SEQ ID NO: 8583 - DNA, 3398 bp, Homo sapiens
cagatatgatgactatgattatggggaggtgaaccagctcctggagcggaacctcaaggtctatatcaagacagtggcctgctacccagagaagaccacccgaagaatgtacaacctcttctggaggcacttccgccactcagagaaggtatgacctatacaggcagggcaggatggaagtagacaggccaagccagtggagagggcaaggggttaggacccagtgagagtccccagactgagtctgtcctgctaggtgggacacctgggcctattcctctggattgaagtcctattccactgtgtgatttcagagtctgtttactcacctgtaaaatgggaatgagggtgcctgcttcacattagtggtagcttggtggacctgggttcaaatcataacactatctcttgatagcagtgtgactttcggcaagtcacattatctcgctgagtttttttgtttttttttttgagatgagtctccctttgttgcccaggctggagtgcagtggcacgatcttggctcactgcaacttccacctcccaagttcaagcgattctcctgcctcagcctcctgagtagctgggactacaggcgtgtgccaccatccccagctaattttttgtatttttagtagagacggggtttcactgtgttagccaggatggtcttgatctgaccttgtgatccacctgtctcggacttccaaagtgctgagattacaggtgtgagtcatcgtgcctggcctctctgagctttttatcctgttttttttttgagacagagtcttgctctgttgcccaggctggagcgcagcggtgtgatttcggctcgctgcagcctccacttcctaggctcaagtgtcctcccaactcagcccccagagggcctgaggtacacaccacctgattttttaaattcctagtagagataaggtctcactgtgttgtccatcctggtctcaacctcctgagttcaaatgatcctcctgcctcagcctctcaaagttttttgtttttgtgatggggtcacactatattgtccaggctgtatttgaacttctggactcaagtgatcctctcacctcagcctcccaagtagctgggatttcatttttataatgggaataaatactgctgtatttcaaggttgctgggaagataaaataaaaaaatgtacataaacctctgcaacctctgtctcccgggttcaagtaattctcctgcctcagctttccaagtagctgggattacaggcatccaccaccatgcccagctaactttttgtatttttagtagagatggggtttcactatgttggccaggctggtctcgaactcctgacctcctgatccactcgccttggcctcccaaagtgttgggattacaggcgtgagccaccgcacctggccattttacctttagggaatacagagcttagtcatgataggaatgaatgtgcttgtccttgtactaaactgctcagagccttagcagatgctggggcagctctgtaggaaaggaaatggtgaggtaagtgggtcagggatcaaggcagtctgggaggggtgtgggggtgaggagtgacatcagttgccaacatgccttcctctgtgccccaggtccacgtgaacttgctgctcctggaggcgcgcatgcaagccgctctgctgtacgccctccgtgccatcacccgctacatgacctgactcctgagcaggacctgggcccggttcagctccccacaaggacttctctgtctggagacagccccagacccttttgtgtcccatgcccaccctccccacgctgcagtgggcttgtgtgtgatgtgcagtcccgaagccacaccctcccttttcctcactggaatggacagttcattgcactgactctgggatctcagccctgctcctgggagctggaagagcacttggagatcctaagggaccacacccttcctccttcccctgcccacagaggcagagggcacaggaaagaagccgggccaagctcggaattaatgtgccacaagtgttgtggccttcctgaactgggaagtccctggctggcccccgggggagaggggcaaatgcctccgggactgacactccaggcagctttgccttctctcccctgtcatttccagatttcattacctcctacttgccattcacccatcaatgtgaaagtcagggtcacagctggtctgtgtgtccagttccctaaaagcctgttctgttgggcagcctgaggctgttgcccgaatcctagttcagttttttgacttcctttgccctttttcccttttctccatgcttaatggtgtgaggcgtcaggagagaggccaagtacataaaaaaaaaaaaagcagattatctctagagagtttgagcctttgctggtcacattgccttctgaagaggagggagtattagattataaatcctctttattttggtcctttatgcttgaggttccaacctggagccacagtgtgtgagaggaggaggagagggagaattctgttctcccagagctgcacctgcctcgcagaggccagcaccccactctcctgcctccagtggccctgccgcagatgtctcccaaaaagttgagcctttctagatggcttaggtggcaccatggctcagcaggaggggcgggaggcaccagggttcttgtttggaccctgcccctgggccatggccaggtgaccatggctacattgccaaacctctgactgccacagctgcagactgagagggtgggtctgagtccccacaatgtctgaagctgcccctgggattctcaggccaacctgccaacagcaagcggattttcttgcaagatcagggaccccatttctgcagccagtgtctcctgggtgccttctgaggactcccacccccatcccagtatctcatctgtcccctctcctggggcttaagtgggttgcttccaggcagaagcagccaaggaccgattccaggcactttctgtagcaaatgactgtgaattacgacttctcttgcccttcttctagcagtctgtgcctcctctctgaccagtttggagggcactgaataaggcaagggccgtgctgctgctgggcggggcaggagaggagcctggccagtgtgccacattaaatacccgtgcaggcgcggagaagcaaccggcaccccccttccggcctgaaagccctccctgcaagaaggtgtgcaggagagaagaggccccggcatggggatctgggttctagagggcatgtgatgactgtaaatgttcactgggtgggtagggagtggtatccagtgttcaagtgcagaaatctttggctttgctaccagttccatatgatgagaaataaacgttcgctgaggttttgtttcata

SEQ ID NO: 8584 - DNA, 3398 bp, Homo sapiens
cagatatgatgactatgattatggggaggtgaaccagctcctggagcggaacctcaaggtctatatcaagacagtggcctgctacccagagaagaccacccgaagaatgtacaacctcttctggaggcacttccgccactcagagaaggtatgacctatacaggcagggcaggatggaagtagacaggccaagccagtggagagggcaaggggttaggacccagtgagagtccccagactgagtctgtcctgctaggtgggacacctgggcctattcctctggattgaagtcctattccactgtgtgatttcagagtctgtttactcacctgtaaaatgggaatgagggtgcctgcttcacattagtggtagcttggtggacctgggttcaaatcataacactatctcttgatagcagtgtgactttcggcaagtcacattatctcgctgagtttttttgtttttttttttgagatgagtctccctttgttgcccaggctggagtgcagtggcacgatcttggctcactgcaacttccacctcccaagttcaagcgattctcctgcctcagcctcctgagtagctgggactacaggcgtgtgccaccatccccagctaattttttgtatttttagtagagacggggtttcactgtgttagccaggatggtcttgatctgaccttgtgatccacctgtctcggacttccaaagtgctgagattacaggtgtgagtcatcgtgcctggcctctctgagctttttatcctgttttttttttgagacagagtcttgctctgttgcccaggctggagcgcagcggtgtgatttcggctcgctgcagcctccacttcctaggctcaagtgtcctcccaactcagcccccagagggcctgaggtacacaccacctgattttttaaattcctagtagagataaggtctcactgtgttgtccatcctggtctcaacctcctgagttcaaatgatcctcctgcctcagcctctcaaagttttttgtttttgtgatggggtcacactatattgtccaggctgtatttgaacttctggactcaagtgatcctctcacctcagcctcccaagtagctgggatttcatttttataatgggaataaatactgctgtatttcaaggttgctgggaagataaaataaaaaaatgtacataaacctctgcaacctctgtctcccgggttcaagtaattctcctgcctcagctttccaagtagctgggattacaggcatccaccaccatgcccagctaactttttgtatttttagtagagatggggtttcactatgttggccaggctggtctcgaactcctgacctcctgatccactcgccttggcctcccaaagtgttgggattacaggcgtgagccaccgcacctggccattttacctttagggaatacagagcttagtcatgataggaatgaatgtgcttgtccttgtactaaactgctcagagccttagcagatgctggggcagctctgtaggaaaggaaatggtgaggtaagtgggtcagggatcaaggcagtctgggaggggtgtgggggtgaggagtgacatcagttgccaacatgccttcctctgtgccccaggtccacgtgaacttgctgctcctggaggcgcgcatgcaagccgctctgctgtacgccctccgtgccatcacccgctacatgacctgactcctgagcaggacctgggcccggttcagctccccacaaggacttctctgtctggagacagccccagacccttttgtgtcccatgcccaccctccccacgctgcagtgggcttgtgtgtgatgtgcagtcccgaagccacaccctcccttttcctcactggaatggacagttcattgcactgactctgggatctcagccctgctcctgggagctggaagagcacttggagatcctaagggaccacacccttcctccttcccctgcccacagaggcagagggcacaggaaagaagccgggccaagctcggaattaatgtgccacaagtgttgtggccttcctgaactgggaagtccctggctggcccccgggggagaggggcaaatgcctccgggactgacactccaggcagctttgccttctctcccctgtcatttccagatttcattacctcctacttgccattcacccatcaatgtgaaagtcagggtcacagctggtctgtgtgtccagttccctaaaagcctgttctgttgggcagcctgaggctgttgcccgaatcctagttcagttttttgacttcctttgccctttttcccttttctccatgcttaatggtgtgaggcgtcaggagagaggccaagtacataaaaaaaaaaaaagcagattatctctagagagtttgagcctttgctggtcacattgccttctgaagaggagggagtattagattataaatcctctttattttggtcctttatgcttgaggttccaacctggagccacagtgtgtgagaggaggaggagagggagaattctgttctcccagagctgcacctgcctcgcagaggccagcaccccactctcctgcctccagtggccctgccgcagatgtctcccaaaaagttgagcctttctagatggcttaggtggcaccatggctcagcaggaggggcgggaggcaccagggttcttgtttggaccctgcccctgggccatggccaggtgaccatggctacattgccaaacctctgactgccacagctgcagactgagagggtgggtctgagtccccacaatgtctgaagctgcccctgggattctcaggccaacctgccaacagcaagcggattttcttgcaagatcagggaccccatttctgcagccagtgtctcctgggtgccttctgaggactcccacccccatcccagtatctcatctgtcccctctcctggggcttaagtgggttgcttccaggcagaagcagccaaggaccgattccaggcactttctgtagcaaatgactgtgaattacgacttctcttgcccttcttctagcagtctgtgcctcctctctgaccagtttggagggcactgaagaaaggcaagggccgtgctgctgctgggcggggcaggagaggagcctggccagtgtgccacattaaatacccgtgcaggcgcggagaagcaaccggcacccccttccggcctgaaagccctccctgcaagaaggtgtgcaggagagaagaggccccggcatggggatctgggttctagagggcatgtgatgactgtaaatgttcactgggtgggtagggagtggtatccagtgttcaagtgcagaaatctttggctttgctaccagttccatatgatgagaaataaacgttcgctgaggttttgtttcata

SEQ ID NO: 8585 - DNA, 585 bp, Homo sapiens
tggagacagataccatcggggctggcgaggggccacagcaggcagtgccctggtcagcctgggtcacgaggcatggctgggtgcgctggtgggtgagccacatgcccccgagctggatccagtggtggagcacctcgaactggcggcaaccgctgcagcgcctgctgtggggtctggaggggatactctacctgctgctggcactgatgttgtgccatgcactcttcaccactggctcccacctgctgagctccttgtggcctgtcgtggccgcggtgtggcgccacctgctaccggctctcctgctgctggtgctcagtgctctgcctgccctcctcttcacggcctccttcctgctgctcttctccacactgctgagccttgtgggcctcctcacctccatgactcacccaggcgacactcaggatttggatcaatagaagggcaaccccatcccactgcctgtgtctgttgagccctggcctagggcctgagaccccacggggagagggagggcaatgggatcagggctccctgccttggcagggcccagacccctagtccctaacaggtagactggcctga

SEQ ID NO: 8586 - DNA, 585 bp, Homo sapiens; identical to SEQ ID NO: 8585

SEQ ID NO: 8587 - DNA, 844 bp, Homo sapiens
actcccagaatgctgaccaaagtgggaggaggtgaggagggtttgctgggtgggtatgggggagggggagactctgcaggagcctaattccccactctgagctcacccttctgtctgcccgggccctaccccttcccctactctcacccttataatccttttcagcactaggtcttcccgtcacctccacctctctccatgacccggctctgcttacccagacccgaagcacgtgaggatccgatcccagttcctccaaggggcctgggtgctggggaggggtcaggtagtccagtgcgtccacctgtatccacctggggccctagctgggcccagctcctggacagtgtcctatggctgggggcactaggactgacaatccaggcagtcttttccaccactggcccagccctgctgctgcttctggtcagcttcctcacctttgacctgctccataggtaagtgggcagcagcctggcaggtgggcattgtaggcgggcgggccagtggacaacttccctaagcccagtcaccaccctctctctccacaggcccgcaggtcacactctgccacagcgcaaacttctcaccaggggccagagtcagggggccggtgaaggtcctggacagcaggaggctctactcctgcaaatgggtacagtctcaggacaacttagcctccaggacgcactgctgctgctgctcatggggctgggcccgctcctgagagcctgtggcatgcccttgaccctgcttggcctggctttctgcctccatccttgggcctgagagcccctccccacaactcagtgtccttcaaatatacaatgaccacccttcttca

SEQ ID NO: 8588 - DNA, 754 bp, Homo sapiens
atggatgtgatgatacccgtggggcccccttggcaactgacagcatctttttctcatagccactcagctgtctcagcttcagactcactgagaacttctacctgggtaccactggccttgccattcctcccaccaatcccctctttccacttccaggagaaccacagactctagagagggtcccagtgacaaaaatctatcagggagaaggctggccagaagccccaggagacctcaactcactcgctctccaaaccttgcagcccacgcatcctcctccctagacttcctacttcctgcctcagtctgcatccccaagtctgagaaatgggccaactggggtcagacagcacctactcactctctaagaatcccaaggtctgttatggaaaaatgatcaagaaatcccatttcacccacttacacaatgtgtggccttggccaattaattcatttgagcctcaatgttacgtgggccacttctgtcatggggttgttgtgagtcaaagacaatatctatttgtgaagcattttgtagaagccaaaaacctgtaagatgttgttttgagctctaagaactttctgtaggcgcataagatcttttgaccccaaagactgttgaaggaacaggaagcttctctgggctttcagatcaactctctgtcctggatagaattttggccctaaaatggtaaacaagaggtcggttaagtgtgtacaagatgtaaaaggtcatgtgccatgaaatctcaaa

SEQ ID NO: 8589 - DNA, 844 bp, Homo sapiens; identical to SEQ ID NO: 8587

SEQ ID NO: 8590 - DNA, 754 bp, Homo sapiens; identical to SEQ ID NO: 8588

SEQ ID NO: 8591 - DNA, 2553 bp, Homo sapiens
  SITE (2515): n equals a,t,g, or c
cctcccatccagctcggcagcctggtgacgcaggaggtgagctctcagtacccgatggccccacgagctccactgcagcgggtgcgggacatgggggtggacagcagcagttgggatggaccctttcccaaacggcaccagcttgaggccccgctgtctctgctgagtggggcatggggtccctgctgtgtttaagggtttcctcctcccaaccactccaccccacaggccccggctcaggacagcctgggcagctggatcaactcttcccctgacagcagtgagaacctgtcggagatccccttgtcccacaaaggtatgtgtgccctctgctgcccggccacctcacctggccttgtctaaactgttcagatcacccagctcaaagccctttcctgccctctgcactgccaagtgcaaccaagcattgggtgctacacattctgtagaggcaccattgcccctgaggattagtcagtcaaggacacttaagagtcttctctaagtcaaggacatttagagagatgggggcagaatcggaaattagaaaagagacatgtggcatggagacttatgtcccccctcccccgccgcctccgctcagtaatcactgtaatagcaaatatcgattcaatgtctgccccctggataatgtaggttgagcccatttcctcaattaatcctggaaataaccgatggcattagttttaccatcccccatttgcagatgaaagtgaggctcggaaatgggcccaagtttcttacatagcaaacccctggaagtgctaggattgaaacccaggaggtctggctcctacccacgtctgccatgtcagaggagggtgttgagaggtggccttgatctcgggttgtatgttccccgtgtcccgctgcagagaggaaggagatcctgactggcaccaagtgcatctgggtgaaggccgcccggcggcgctcgcgggccctgggaaccgaggggcgacacctgctggcacccgcgacagagcgcagcagcctgtccctgcactcactgagcgagggcgacgatgcgcggccaccaggcccactggcctgcaagcggccgcccagccccacactacagcatgctgccagtgaggacaacctgtccagcagcacgggcgaggccccgtcccgggcagtcggacatcatggggacggccccaggccctggctgcgtggccagaagaaaagcctgggcaagaaaagggaggagtcgctggaggcaaagagaaggaagcggaggtcccgatccttcgaggtcaccgggcaaggggtgaggcgaggcgcaggggtgggtgtctaggcactcccatagcagctggaggcctgagggctggatttctccaaaggctccagggcacctctagcctaccccatacctggaggcaccaccctccacagtctctgtccccagcctagcatagtagctgggacagatcctggtagcagatccctgtgccgctctcggccctcaccccactgttcaaccatcacagctctcccaccccaagacacacctcctggggccccatcaggcggagcgcatctcggaccacaggatgccagtgtgcaggcacccagcccctggtatccggcatctgggaaaggtcacgctacctttggccaaagtcaaactccctccaagccagaacacgggtcagtatgggcaaggaggggatggggaggggaggcctccaccaggcaggggagcagagaagacacattgcatttcctgcgcctctggctgccccttgctggaagcatggttctagcagaatactcatgggactggcatcctggggtggtgcccctagagagttcaaggccactgggtgatgggagaggagttggggaggcattccgaaaccactgatcctgcccctttccctgttgcaggcccgggggactcctcacccctggctgttccccccaacccaggtggtggttctcgacgggctacccgtgggccccgcctgccccacggcacaagcacccatggcaaagatggatgctcccggcataactgaggggccctgcctggaactggctctctcacctcccaagactgaatggggtctagcagggcatgggaggtggaggctgggcagatggagatgaccaggaagtaagctcaggatctcagcaggccagggctcctgagacccaggaactggggtctctgcccaaccctcccatgctttcagtgccactggggaaaagaggtgaggccaggggacatggccaggacggctgggctccctggcttcccagccctggacagaatgctgttgccaaaacctgcacagccctgaggccagcctcggccttggtaacggaggaaagcagctgacagtgagacggggctcctggcccacgtgtggggcacgggcatcctggatggttggggaggcgccgacaggcacttcacgtattacaattggggatgtgggtgagggagggaatctggttttgttacttggcagtggttttttcntcacccttcctttttaacaataaaatccctttgggttt

SEQ ID NO: 8592 - DNA, 1399 bp, Homo sapiens
gtttcacagggtcagactttattagatacacggagggctgaatggggccttggtgcccttggtcctcttcagcctggagacagcagactccacaaggggctcccagggttcagagcaggagaacacacctgacctccggccagccagcccttcagggtgtctcggggactccccgagatctggggcctggttgggagggttgggtttggagggggtgttccagggggcctccgtggctctggaactagactgatgacttttggagaatgagctccagagaaactggcctctttgggccagggcaaggcctgggcttcagggaggtagtgacctgttttggtgcccgaggtggaggcccggagaaacatcgtggggagtttggtgattgaaggcctgcagacctgaagctcctggtctgggagggtgtgcctgggactgggtcggcccgggcctgagctgctggaggctgagatgctggcaattgatgcccacaggcctgagtagccttgccctgaggccctgcttccttcggccttttctcgggcagcagatgcaaggccctggcctggccctgaggcaggcggaggccgaagccgatgcctatccggagtggcccagattcctggccctgcacacagggcagtagttgagggaaagcaagcagccggggtccagtcctgtacctggggagggggcaggaggggctgcggggccggaggcacaccaggcatataggatactccacgactggggcctggccggttctgcctagccacaggtgctgcaaaagcagtagccgcaggtcgtgtgcgatgcggcggtgccccagctggaccaccagggcctgggccagggcccctgggtccctgaactgtgcaggatccttctcgcttggcacgcatctctccaccactccaggggacccggacccagtgtccctgtactgatgccagcgccatgtctgcctgttagagtggagcctatgagaaggtgggctggggcctggggaagtgagtgtggagctatgcagttcctcggggtgggaaggggactggcaaggtgagtggggaagggaggagttctgaggctgggagggagaaaaggaaggggtcagagggggagaggggtacagccagtggttggagggagaggatgcacgtggacgggggagagagaggtagttctggtgaaagaaagtaggggaacttgggagagagggagaatagggatgtggagcaaagtcagaatttgagtcacaagagccgaattggaagccaggagagggggatgctggtggaggggaggagggacgacgggactgagtggaagagaacggtggttgagagggagggaggccctgatggggagagagaggctgtaggttgtgaggagaggagtc

SEQ ID NO: 8593 - DNA, 391 bp, Homo sapiens
tgtggcagcacctggtccttgttttgaggcaacatcgccttgaatccagaaggaactggggcaacaagactagggataagagacctggcagagtcaggaccagtatctctgaggtcagctgtgcctgagaaatcaaggccaccttctgtgcgcagagcgtggctccagcctggtgtgggtgcaggtgctggtggcaggccaaggggatacccagccctccagcaccaggctctcagggtgttcaggcatgagcatgaatctaagcttggcttctcacttctttgcagtcaaccattgatgagggatgtgtggggatggagaatcacagctgcatcttgggagtggaggggcagcagcgattatctgggtggggcagagaggaagacaaagc

SEQ ID NO: 8594 - DNA, 126 bp, Homo sapiens
tctcagctcactgcaccctccacctcccaggttgaagtgattctcctgcctcagcctcctgagtagctggaactacaggcacccgccaccacacccagctaatttttgtatttttagtagagatgg

SEQ ID NO: 8595 - DNA, 1357 bp, Homo sapiens
acttggctcccactctcagaaaaaaggggctgtgagcccagctgccttacctatggacaggtgagcgtggggcagaaggtgaagggaagagactgagatcctccccaccaagttatttatttatttatttatttatttctgagacggagtttcattcttgtcacccaggctggagtgcagtggcgcgatctcagctcgatgcaacctccgcctccggggttcaagtgattctcctgccgcaacctcccgaatagctgggatttcaggcgcatgccaccatgcccagctaatttttgtatttttagtagagtcagcgtttcaccatgttggccaggctggtttcgaactcctgacctcaggtgatccgcccacctcggcctcccaaagtgttgggattacaggtgtgagccaccgcccccggcccccaccaagttctttcttaccgtgtctagaccccagagaccggattggtactccccaggtccctgctcccacccttccctagcccaacctcctactgggttgtgccctttgaccccaaaagctctcgaagtccagatttgcccttcccaagaaaccattcctgctctgggtccatccacattttaccctggaggacccagaagcccagtcactctctacaaaaccccagccttgatacagacctctctgcgcgccccccaactgccccaaccctgattcatcccgctagggcccagtaagaacattcaccctccccaaggacctgcccccactcacgttccgcacatagactcccaggccgcacgctccggctctgaccccaatccctaaggaatttacacatttttcccttcccgaggccacgccccccacgtctctggactccgcccactagggccttaactccactttttcctagaccttcgcagacgggacggacctttgtcgctcggctctgggccacgccctaccggtggctgctcctggagcccgtcactgcttcaacatctccatctccgcggtacctcgtcccagaccaggacgacggggccgggaagctccctcccggcgttcccgcagccctcgcacctccatcctggacgctgcgggcagcgggagtggcagtggaagcggcagcggcccctagcggacgcgtggccctgagttgggggagcgacccttcccccagccccgcccctcaggacacccagaaccccacccctcgtcctctcggccttctgtaatagttttgagatgtctgtccctcctccctggagctccagagacccacccctctccaggttatcccagaaatgacccaactctctcacttttccctctcccctttgaataaagtcgccagctagagcacgtg

SEQ ID NO: 8596 - DNA, 2052 bp, Homo sapiens
ttaatatttaaaatgtttaatagttaaaattttttaacaatttaactttaaaaaggtcacacattttctgatccagcaatgccccaatcagattgtttcattttattattattatcaacactgtcccctttttggcacctgtaaaatagttcctttcgggagtttggagccaggccaggcaccgtcggtgcatgggatgagatgggcaggtttggagctcctctgtctagtgaggatcacggtctgcagagaagggttggcctccccgtctcctatcaaggcttaaagcaaggagaaccatcccaaatttggttccttttcccctaagtatccttagaggcaatccaccctgtgactaggtgactaggtgaaggactgaggtccagaaaggagctatcttaaacctggaatcccatttcctagtctgcagccttaagcagttaccctctcagacaactagccctctccttcctccgcatgaaaacccatggcttacagggatggttgttgctttccctaaagaaattcaggaagggagatgtgagggtcagttctcagcggtggcgttctttaaaggggacgcagcctgactgccaggaggggagaacgagtcggcccagccaatgcgcatgcgcgaagcacaagcagtttctcccgtcacagtggttcccacggttgtcttagaaaccagtcccccaggcttggcaaagggggagacttccgtggcagtgcttgggtgtcaaggctctgaggctccggcctgacggctccactgggtcgaggggaaagtctccggatgccaagagtcacaaagggccgaacagggtgaggaaacccgacgcagagtccggagaaggcagcatggaatccctccctcaggcctctctggacggtgttggtgggggtgagtctccccaaaagtcgtgacgcggtgatctcgaggacaggacggcctgcgtgcccctggggtgctctctcaccgaagggtctttctcgtcgaaagcagaaccccacagcctcaggggttgcctgggtgtgtgtctttcaatgcctttgctataagactctgtgtgtgtgtctgtgtgtgtatgtgtgtgtgtgtctcccattctctcttctctctctgtctctcagtctctgtgtgtttctttccctctctctgtcggtttgtgtgtgtgtgcccgtgtgcgtgtgtgtccttggccgaatgtgccctgtgcaccacaaagctgtttctcgcatggtggcctgtctttggtgagcctgtttctgcctctctgcctgggtcatgagaccggttgtcaatccttttcgccgacgcggttccgctttgggtgtgtgaaggcctggcccacgtgaggagattcttcggtcccggagcaattgaaatatccccatcctgagcggtctcttttctaggatcaagatgaacacactgcagacgaggacacgagccccacaggagctctttgtcccgccggagaccagcggacccacgtcagagaagatgcttgtatcttttcacggctcttctctgagaaatgaagccacaccacaatacggtctggaagaggaagccgggaatgggagatggcaacagtccctgtcactggaatgctggcctctctggacaagccacccttttggaaccccatcccttatgaccctggcagtggaacggtgatatatcccgcctggccgccggcgtctgccctgtcctccctcctgctctgcctcacctgtttctcaagtgcctcaatgcctctcgctgacgcccaatgtcttcaacaaagatgacttcccagtccgtcagggagacatttcttcgagatccgtgtcgtgattgtttctctctccaaacgtgtttctgcttgattgggcaggtcgcatgacctgggagctcctggcttccattcgtgtctcagacagggaagcttccttcttctccacgtttcccctcatggtgggtggattgcctagaatgagcgctaggcgaccaagactggccttgtcttccaggaaaggtagtgtcgcatttcctctgcacttcct

SEQ ID NO: 8597 - DNA, 497 bp, Homo sapiens
tgcagtgcagggactctgtctgctgcctggcacagaatggttgcccaaacatacttcttgaggtaaacggaatggcagtcaatacaaaaactcaccctcactctgcacaccaccatagccactgctggctagcaggcaccctagccaggctaggagataacatggtggctggcagcagcttgggctttgaccggaccagtggttagtagcgtgggagagcatcctgagtctaggatggggcagggactggagcaaggcacctggaatccagaaatttgggggtaagccaaggcagacccaccgccccagtgcacttctgctttctatctccagtctcatggctccctggacccccaaaagttatgaaaactaaaccagagctgagaactgggctaggatggaattgcctgtcaacccgagggatgcaaagaggaaccaccgttgggttcattaagaaatccacaaataaaataaaaataaatcagtgtgacacagac

SEQ ID NO: 8598 - DNA, 2763 bp, Homo sapiens
ctctgacgtggggtcaaatccggcagctcccctttctcttcccagcgccaagtccatcctcccccaccaagagggccctgcaggtgcctgtgcactgacaaagaaggacacactgtgtcctctcagcggcacagccggcagcctcttcacagcctcctgtcatatggatattcatgacctgtgttcttttggaaggagtttcggacgtggctgagggaggaatgggggcgcacgctggaggacatcttccacgagcacatgcaggagctcatcctgatgaagttcatctacaccagtcagtacgagtgagtgcggctcctgctcggtgctggggtagccctctcctggtgtgtgctggggaccagccctgtcccggtgggtgctggggcatagtcctttgtctcagtgggtgctggggttcagccctctctcctgctgggggctgggagtacagcccctctctctctgggtgcttggagcatagttcgctctttctgtgggtacttggaacacagcccctctctctgtgggtgctgggagtgcaggcctccctgtagctgctgtggcacagccccagaccccatccttcacccgggtgtctgtttttatctgatttcctgtcacccctgccaacactggcactctagagctcagccccgctcagcccagtgcggggatcccctccatggtgacttgggctcctttctcctgggtaatggagcaaactggcacttccttttccctcccacctaaagctctgccctggcgctgatgccccccttaaccccagaagtcctgttggaagcgtgcgtgctggtgggtggtgggggtgagggctcccctgggcgcattgctgcccacaggcctggtggacacctggccctggttgagctgagctgcccgccctaccccgccctgcaaagctcatccctggcaccttgggcgttctcagtcctgcctgccccacgaggtctcctgtactgacccgtccgctccccacagcaactgcctgacctaccgccgcatctacctgccgcccagccgccccgacgacctcatcaagcctggcctcttcaaaggtacctatggcagccacggcctggagattgtgatgctcagcttccacggccggcgtgccaggggcaccaagatcacggtgagtggcggctgacctggttggtggggctctgggggcacctggcccaagtgggctgtggagtcagggaacttgggcagacactgatccccggcacccttgctcctcagagtgggcttgcacctgcagccccgggagcttgggaaagcagattctcgggccccagccagccccactgaaccagaattgcatttccacgagaccctcagggagtctgtgtgcttccaaggtggccttcccacagcaccgctcagccccggccaccctggcagccctgtggggtttaggaagtctggacagcagaccccacacagaggctcagatttaactggggacagcctgggaaaggggcccctccagcagctgcatggagacccttgtgcttgcagacagctcccaccctgtctgagcttcagcagctcctctccttggagtggcctgagggtgggctgtgtggtgagcccagcagtgaacaggggctcattgtcccatgccagggctcctggcacatgctgcccgcctgccctgaatggttattggggatcctggcagacagcgcctgaaggggcgaagcctattccccgagcctccagggatcagggccacatctggcataatggggcattccctggaccccagagttttggctcctggactcctcacggagttttggggctgacgcatcttcccagggctcggctcccgagctctgcctttcaggcagacagatgtgggctgcccccttgggctgctgcccagctctgggatgttctttgaacttctctgggcgcagttgagcaggtatgagccaccgtcctcaggggcactcataggtgttgctggccctgccactttctaagggattctgagacttcttcttctgtaagggacgttgctaagtcagtaggagggctggtgccagctcgctcagccagaggtggatctgggctggagcccacacagtggtactgctgctgctgctggcctgagccctgctgactgccacctgctccacagggcgaccccaacatccccgctgggcagcagacagtggagatcgacctgaggcatcggatccagctgcccgacctcgagaaccagcgcaacttcaatgagctctcccgcatcgtcctggaggtgcgcgagagggtgcgccaggagcagcaggaaggcgggcacgaggcgggcgagggtcgtggccggcagggcccccgggagtcccagccaagccctgcccagcccagggcagaggcgcccagcaagggcccagatgggacacctggtgaggatggtggcgagcctggggatgccgtagctgcggccgagcagcctgcccagtgtgggcaggggcagccgttcgtgctgcccgtgggcgtgagctccaggaatgaggactacccccgaacctgcaggatgtggtaaggatgcggcgggtactggggcctgaaggtgggacagcatgggcttcagcgagggccccagccccacacctagcacaggcggagagggcctgtgacctcacagagggcggcagccggtgctttgggacaggagtgcggcctctgaccccttgggccatgttccccagcacctgagcaagcggccgc

SEQ ID NO: 8599 - DNA, 7755 bp, Homo sapiens
ctctgacgtggggtcaaatccggcagctcccctttctcttcccagcgccaagtccatcctcccccaccaagagggccctgcaggtgcctgtgcactgacaaagaaggacacactgtgtcctctcagcggcacagccggcagcctcttcacagcctcctgtcatatggatattcatgacctgtgttcttttggaaggagtttcggacgtggctgagggaggaatgggggcgcacgctggaggacatcttccacgagcacatgcaggagctcatcctgatgaagttcatctacaccagtcagtacgagtgagtgcggctcctgctcggtgctggggtagccctctcctggtgtgtgctggggaccagccctgtcccggtgggtgctggggcatagtcctttgtctcagtgggtgctggggttcagccctctctcctgctgggggctgggagtacagcccctctctctctgggtgcttggagcatagttcgctctttctgtgggtacttggaacacagcccctctctctgtgggtgctgggagtgcaggcctccctgtagctgctgtggcacagccccagaccccatccttcacccgggtgtctgtttttatctgatttcctgtcacccctgccaacactggcactctagagctcagccccgctcagcccagtgcggggatcccctccatggtgacttgggctcctttctcctgggtaatggagcaaactggcacttccttttccctcccacctaaagctctgccctggcgctgatgccccccttaaccccagaagtcctgttggaagcgtgcgtgctggtgggtggtgggggtgagggctcccctgggcgcattgctgcccacaggcctggtggacacctggccctggttgagctgagctgcccgccctaccccgccctgcaaagctcatccctggcaccttgggcgttctcagtcctgcctgccccacgaggtctcctgtactgacccgtccgctccccacagcaactgcctgacctaccgccgcatctacctgccgcccagccgccccgacgacctcatcaagcctggcctcttcaaaggtacctatggcagccacggcctggagattgtgatgctcagcttccacggccggcgtgccaggggcaccaagatcacggtgagtggcggctgacctggttggtggggctctgggggcacctggcccaagtgggctgtggagtcagggaacttgggcagacactgatccccggcacccttgctcctcagagtgggcttgcacctgcagccccgggagcttgggaaagcagattctcgggccccagccagccccactgaaccagaattgcatttccacgagaccctcagggagtctgtgtgcttccaaggtggccttcccacagcaccgctcagccccggccaccctggcagccctgtggggtttaggaagtctggacagcagaccccacacagaggctcagatttaactggggacagcctgggaaaggggcccctccagcagctgcatggagacccttgtgcttgcagacagctcccaccctgtctgagcttcagcagctcctctccttggagtggcctgagggtgggctgtgtggtgagcccagcagtgaacaggggctcattgtcccatgccagggctcctggcacatgctgcccgcctgccctgaatggttattggggatcctggcagacagcgcctgaaggggcgaagcctattccccgagcctccagggatcagggccacatctggcataatggggcattccctggaccccagagttttggctcctggactcctcacggagttttggggctgacgcatcttcccagggctcggctcccgagctctgcctttcaggcagacagatgtgggctgcccccttgggctgctgcccagctctgggatgttctttgaacttctctgggcgcagttgagcaggtatgagccaccgtcctcaggggcactcataggtgttgctggccctgccactttctaagggattctgagacttcttcttctgtaagggacgttgctaagtcagtaggagggctggtgccagctcgctcagccagaggtggatctgggctggagcccacacagtggtactgctgctgctgctggcctgagccctgctgactgccacctgctccacagggcgaccccaacatccccgctgggcagcagacagtggagatcgacctgaggcatcggatccagctgcccgacctcgagaaccagcgcaacttcaatgagctctcccgcatcgtcctggaggtgcgcgagagggtgcgccaggagcagcaggaaggcgggcacgaggcgggcgagggtcgtggccggcagggcccccgggagtcccagccaagccctgcccagcccagggcagaggcgcccagcaagggcccagatgggacacctggtgaggatggtggcgagcctggggatgccgtagctgcggccgagcagcctgcccagtgtgggcaggggcagccgttcgtgctgcccgtgggcgtgagctccaggaatgaggactacccccgaacctgcaggatgtggtaaggatgcggcgggtactggggcctgaaggtgggacagcatgggcttcagcgagggccccagccccacacctagcacaggcggagagggcctgtgacctcacagagggcggcagccggtgctttgggacaggagtgcggcctctgaccccttgggccatgttccccagcacctgagcaagcggccgcgcagctgggtcccgtcttggaggctcctgtccttccaccccttctggggtacctcagagctgcaggggcatgaggcttccagatgcctcacatccctgcaatagtgccgctcccccaggggcttctaaagctacttgtttgcagtcaatcaagtgaaatatcatgtaaactgtccagcagctttgaaagtagagaatgaacaaggccccttccccacccaccctgtggaaagcccgtctggtttggtgtcctcctggacagcgtcttgccggtcacctttggccatctcccggtgcgtggttcagatgtgggtcctgctttcctgccccctccctcctctgtgcctgcctgcctctgctgtgccgggccagtgccttggtggccagtggagtggacaccagctgcgactgcgtgggaggggctggcattgccgctgccactgcagggcttgggcggctgacatgggacgaggcttgcacagctgccagctcctgtctcgctgactttttttatacagttttgtctgggccaccgccttcagtgccacgggccccttgccgttcaggctgctcctcatagatgaacaaggccctgccccgtgtccttaccctttagagctgtttaaattcaaatgaactgaaactgaatatgaaaaatccaggccctcagccgcccaggccatgtttcaagtgctccatggccacatgtggctggtggacagtgcagctctagaacattccatcaccacagagggttctgctggacagtggccttgggggctgttttgagggtccgcctgtcagtctcctggcatcaaagtcattctgccattgtcaagttacagttattttccttttacctccaagccactatgtgcgtatgctgctatgtgtctgtatttcccgctaaacttcctgtcacggagggaagggtgccacaggcccagctcctggagggggtttggatgtctgggtggggggaagggtgccacaggcccagctcccggagggggtttggatgtctgggtggggggaagggtgccacagttccagctcccggagggggtttggatgtctgggcggggctttcttcatgttccatgtatgataacggtgactggggggtttacagagagaggcatacaaatagtgttggagtgttgttttcgctaatataaatgtttgaatagctaaaaaaggaaaaagctctgttacccttcaaacatctcagaactcctaatacctcacagtgggctcagagccagtttgcgagtcacagcacgtgctgcagccactgaccaggaagacctgtccagcctccgtccccagctaacctgcaggacagtccctgacgtgctgaatatgggggctcccgggcccttccctgtctagtttatggatctgcagggcctggccacggcacctgtacagggaatgcctgttgctttttttctgaccacagtgccgatggctgcacctgcctctgggccctggaacttctccccgagcttgagaagccctctgaggccaggccctggtccacggggctgttctttcccccggcctttggagcctcagtgggtgattccaggccagccccttacttctcgtcatctgttggaagaatttagctgcttgcaagacagacataagtgtcttcctgtctgatgttgacctcaaagccataaatgggtgtttgcgacttctgagttaatgtcagctgcaggctgcctgtattagagctaattgtatggggacataactcccagacattaagattttttttcacattgggcctcctttatgaaatgtgtgttttggaacagagctctctgggcctgcagagacctcgttttagttcagtgtttcagcattgtgcagtcagtgggtgaatccctcacgggtgctgcgagtcagcgcccatcccccgagcagccccgagctctggcctctgcgtccatcatcaggtgggctcggcctgcgcccttagctaccccttcagagacaggctcagcccacacccccagctgcccctgcagagacaggctggctctgggagtcagcttctggctgatgaacagtggatgtggctcttgcggcacagagcggggtcgcagaatgctgtacgtggcgtgcatttgactcagccctcccccagctcacagtttccctcttgtttctgctcagtttttatggcacaggcctcatcgcgggccacggcttcaccagccctgaacgcacccccggggtcttcatcctcttcgatgaggaccgcttcgggttcgtctggctggagctgaaatccttcagcctgtacagccgggtccaggccaccttccggaacgcagatgcgccgtccccacaggccttcgatgagatgctcaagaacattcagtccctcacctcctgaccggccacatccttgccgccacatcccgggtggctctggggctctgaactctgacctgtgaatagaagcagcatgcactttggaaatccggccttttgaccagaacgcacacctcgtcggggggcccagtccagccaccccccagcactttatgtagagagtgtgacatagacctgcatatttgtcagtgccatgatggaagaagctgagcatgtcttaccaaaaacagagagaacgagcctgaatacagcagatgtaggggacagccgtgggaccgcgtgagaattgaagcggtggggttcccgcaccctgggctggctggtggttttctcgggaagcaggaccctcctgactggtgctcttcctgtgagcggatagagtgatagactgggtcgtgtgtgagacgcatgtgctccaccccactccttttgggggaagccaggcaacagtggcctctgggagggggtcaggaagaggcgaacagctcaggcagcgcaggtgtgatgggcacagtacgcagagcaagctcgggaagttggtaggatctcaggcttggggccgggactctggagtgaatccccatttctctaccggcttgcttggagtttggacagaagcatttcacctctgatctcagcttccccacctgtggagtgggtttagtgacctgagtcactagggaatgtcacctgaatgcacagcccagcccatgcacctgccccagcccctccagctttggagccaaggccatcgttccagccacttgactgtcctcgacggcctgttccagacagggcgtttgttttgtccatgccttcctccctgcacgcacacggcgtcaaaaccaagctgccggccactgtctccagaacgcaaggctccaggcccgtgtgtctgaagcagtgagtggtccacacaggtgccaggagtgcccatatgagatgacgaggaaacccctttgcaggtgaggggacagctttctagaaaagccacacctgcatctggggacacactttggaaagtgggaccctccagcctggagaccccatggactgatgcctccactgctgtgtgccccatgttgtgttaacacctgcgtgtggggaccccatctgaggtcttggctgaggttggcatctcctgaagaacagagagcacggtgtccagagctggcccttcccccagcccacagccagctccgtgcccgagtgggcgtccccagcgagccttccctctctgccgcttgtccttgtgtctgggctgctccaagtccttgtgctgggcaccctggacacgtcctgctggtgagggacctcgggaaggtgacagtctgtgtgccttggtgtggagaccaacctgaggatgtcctgggaaatgttttcctgatgaatttctccttgactggcctttaaagaacataagaattcccattgcccagcctcagtgcatttggcaaatgcttactttgcttcccagagtcagagaattggcaaaggttcctaaatggtaatctggccggcctgggagaaagactcacgagaaaagccagtggagaaagcgcccttccagggcggcagcagcgggagccacgcagaccccgaggcgcacctgctggctcttgtgtgtggccccagtttctagcggcttttgcagcattagcctacaagctttgtcactccctgccctctgtggtggtcactgtttttctctcttgccaaatgaggcagtctctgagtgacggtgactgtggccttgaagcctggaggactgttgggcatgtagactggcaccttgaagattcaccattgtttaaataaaatcaagcaaatgcttttttaccaagagcccgagcctcgctctaagggacgcagtcctagaggcgtgccctttggggcttgaagagcacactgtgggacgcacgtgcttctgattaaaggaatctcagatctcaattacgcttccagtgtttgggtatagaaatagcttccacccatcatgtctcagccatgggctgttggtcagttcatgtggctcctggttctggtgtgtatgttgggggcgggggtctctccatggtggtgacctgcagtgatgccaggcagggccagagccacacagccaggaaagggaggcctttttggccgcacagccagtcccttcagtcgtgactacaggtcttgttttttccgctccgatgtgtccttagccagttcttggctccggttctgtagggacaggcactgaatctgcgcgcctcaaaacagcagcttcccttccgggggagggcatccaccctctcaggggatcctgcaggtggcccatttcctgcaggtgagaactcggaagggctgatgtcgtcatcagaggcctaagggcagctgagagttggataaaaccgtttccaaggaggaggctgagtaacccagttcaggacagccaagcgcattaggcttgattggggaaggtggcaggtggagttgggaggttgggactctccatcttttgcaccacggatgcctttctgtcgctgtctcactctggggcaggatcaagtctgctctctggagtggggctgcctgcagt

SEQ ID NO: 8600 - DNA, 722 bp, Homo sapiens
gtcaatcaagtgaaatatcatgtaaactgtccagcagctttgaaagtagagaatgaacaaggccccttccccacccaccctgtggaaagcccgtctggtttggtgtcctcctggacagcgtcttgccggtcacctttggccatctcccggtgcgtggttcagatgtgggtcctgctttcctgccccctccctcctctgtgcctgcctgcctctgctgtgccgggccagtgccttggtggccagtggagtggacaccagctgcgactgcgtgggaggggctggcattgccgctgccactgcagggcttgggcggctgacatgggacgaggcttgcacagctgccagctcctgtctcgctgactttttttatacagttttgtctgggccaccgccttcagtgccacgggccccttgccgttcaggctgctcctcatagatgaacaaggccctgccccgtgtccttaccctttagagctgtttaaattcaaatgaactgaaactgaatatgaaaaatccaggccctcagccgcccaggccatgtttcaagtgctccatggccacatgtggctggtggacagtgcagctctagaacattccatcaccacagagggttctgctggacagtggccttgggggctgttttgagggtccgcctgtcagtctcctggcatcaaagtcattctgccattgtcaagttacagttattttccttttacctccaa

SEQ ID NO: 8601 - DNA, 1592 bp, Homo sapiens
aaacgacttctgcaggctgagattcaaggcaggtggtattggggtccctcagcccacctgggccgtgacctcaagtgtccactgctgagtgtgagtggctttgcaggcctggtggtgggagagcctcaggctccctccttcttcgttcctgaccatgccctgggccccttcagtctgcctgcggctctgtggcatccctgccctgacactgggcacctgtgcccctagcaagcccacctggcacacgaggagggaggggtgggtggccatgtccttcctctagccacatgccctgctggccgctccattctgagctttgtgcagaaccgggtctgagctggagatttttctctgagaacctgcagttgtgctgcagccgcacgcaagggcccttcagccgctggctctggcttccctgactcctcagggcgtgttcacccccaggctttctcacctgcacacggttaggccattttcagtgctcgtgggcagtcacggacagcagcagaaactcctcagcccctttgttacttcagaacgcctgcccacatgcatcttctgagctcgtgttgtcctcatggccgtggggtcttgggtgcgaacaggagatgctgagctgtggtccaccgtccaaggtgctgcagaaagcagctaggctcttttaggatgtttctattctggttgctgccttcgtggtgtaacttttaagaacacttacgggaatgtgctcatagaaccatcacctgtcctgagaataaaactcctggaatcatgatcaagtccagtgttaacgtggcccaacctgtctgtacttctggggagagaccaggaacatcactggactcctcatccccgtaattatttagagaagatgcaagcagcagatagtctccatgcggctggtactttttttgttgttttttgagacagggtcttgctctgtcacctgggctggagtgcagagcggcgatcatggctccctgaggcctcaacctactaggctcaagctgtctgcccgccttagcctcccaagtagctgggaccacaggcacccaccaccaccatgcttggctaacttgtttttgtagagatggagttttgccatgttgctcaggttggtctcgaactcccgatctcaggtgatccacccgcctcggcctcccaaagtgctgggattacaggcgtgagcccctgcgccccagccttggggcctgtctttgaatgggaatgagactgtgcaaaccgtggactaccctgtgtcacccacagctcagtggcctgcctgccggccctcaggggctgctgaccgggagaccagccagagcacgagggggtcagggctgtgtgggttttggcctgattctgcatttggttgtttctgggggccatgtagcctgcctgcattaggaaagcgctgtgccatctgatcatgagcacctctgcaccccctggtaaggtgaccttgcagcaggagctgtgccctgcctgggtaggcacccactaggtaggaccggagcaatcctggcagccgccacctgcacccgtgcacttgtttctcctcacagtttcaagtaaatccgtttttgaaggct

SEQ ID NO: 8602 - DNA, 2544 bp, Homo sapiens
gaagaaggctcttacagcatggccgccggtactgcagctgccttagcgtttttgagtcaggagagccgaacgcgggccgggggtgtcgggggcctacgggtcccggccccggtcactatggacagttttttcttcggtattagtgaagggagaggctgagggtggtactggggcggtaagaggtagggatgtgaggcgggaatgcggagggtttcaaggcgtgggtgtgggcggagggctgcttcgctgttcccgcaggagagggggcctcgcacgcacagccaaagggggtggcgagatccctgccccagatgtgttgggcggggccacggcagagcgtcccaggtgttctgagagaagagacggaggtggacgtgtaaatgacccgtccgcccaaggttacacgtgacggcgggttggtgacatcccccgctgcccagccccgtacacacgctcaggcatactcactgttatttctaccaggctgtgagctctccggccacacccgctccttcacctttaaggtagaggaagaggatgatgcggagcacgtgctggcactaaccatggtgaggggcaggggagtggggttttaatgaataagcccaggcaggcaatataggtctctacccaacctccggatcccctttacttggagacacatcctcagcctaaccccccggcatgggcggctcccctggccaggtgaaccgggacctctgaggctgggcaggtgctagggtagatgcctttagttgtggtgtcaaccctcacttgaggagaccctgaggccctgtgtaccgttcccagctctgcctcaccgagggagccaaagacgagtgtaatgtggtagaagttgtggcccggaaccatgaccatcaggagatcgcagtccctgtggccaacctcaagctgtcctgccaacccatggtgagttccccagctctgccttggtggtggtggtggtggtggtgaggggattgaggacgttagcactcattacagtgtggggtgggctaggagtgggccaggccttcatccttgtcttcctcccagctcagtctggatgacttccagctccaaccacctgtaaccttccgcctgaagtcgggctctggccctgtgcggatcactgggcggcaccagattggtgagaagaggggagggccctctcctttgcttccagtggactctcccatcaggcttcccccactccgcactcctgccccatcccaccctcatctcccagtgcagccctgtacaggtctgtgtgccctccacgctgtgccctgtgcatgacatgccctctcctttccgtctactcaagcctacctcctccatggaacatggcccaacttctccagctccaataatgaagactcctttggctctttgtgacccagtttagggtctgaggttcttcccacctagcccataagcactgggaggtcatggtccctgtaagcctaacaccacggcgtgaagaaatggcatgcggtgtgaaacggtctggtcttaacaccccatccttctactgcttgtgtgtccaccagttacgatgagcaatgatgtttctgaggaggagagcgaggaagaggaagaggacagtgatgaggaagaagttgagctgtgccccatccttcctgccaaaaagcaggggggcaggccctagccctcctaggtgagttgcggggagaagtgcctagcaggctctgggaaggggcaggagaagcaggtgagggcctaaatgctgattccttgtttcctcttttcaggtcagctccatgtgccatgcaccgccatgcaccctgttccctgacaagtttcaacaattgtaaatatttcttccttgaagaggagagcttgggtgggggttgggtgggagggacttgggtctttggtgctaggagagggcctgtgctccacacagccgtggttttctgattttcaccatgcccggggcctcccttcccacctgcctgtgagaattggaggttagtgcctgaagctcagagctacacatttttaatagtttttacatttttggataaaggttgaaataaagtggtgtggagtttttgcagctcttgtgtggcttcttcctgtgctgggtgatgtttccctagggaccgccagtggcactgtggaagcacccagcgtggccctgggcctgggggagggtggagaactgtgggatcctctaccctcatggccctgggctaggacctggggcctgggccccagttgccttgctggaaggggacctcccaacactcagcccattcccagtctctgcaggtgggagagggtcatcgcaggaggttatcagcatccaaacaaggggtctgggcctctgtcagcactcggctgatgggcaggggggcagataagcgagcttaggcagcctgaggaatgcgcgtccctagccccacgagggtctctggcccagagagggcctgtgagggcagggcgggaccaggcttcgctcctcctttgagccttgcaggctgtctctgagcagggctgggcccttagagaaacctg

SEQ ID NO: 8603 - DNA, 2546 bp, Homo sapiens
gaagaaggctcttacagcatggccgccggtactgcagctgccttagcgtttttgagtcaggagagccgaacgcgggccgggggtgtcgggggcctacgggtcccggccccggtcactatggacagttttttcttcggtattagtgaagggagaggctgagggtggtactggggcggtaagaggtagggatgtgaggcgggaatgcggagggtttcaaggcgtgggtgtgggcggagggctgcttcgctgttcccgcaggagagggggcctcgcacgcacagccaaagggggtggcgagatccctgccccagatgtgttgggcggggcccacggcagagcgtcccaggtgttctgagagaagagacggaggtggacgtgtaaatgacccgtccgcccaaggttacacgtgacggcgggttggtgacatcccccgctgcccagccccgtacacacgctcaggcatactcactgttatttctaccaggctgtgagctctccggccacacccgctccttcacctttaaggtagaggaagaggatgatgcggagcacgtgctggcactaaccatggtgaggggcaggggagtggggttttaatgaataagcccaggcaggcaatataggtctctacccaacctccggatcccctttacttggagacacatcctcagcctaaccccccggcatgggcggctcccctggccaggtgaaccgggacctctgaggctgggcaggtgctagggtagatgcctttagttgtggtgtcaaccctcacttgaggagaccctgaggccctgtgtaccgttcccagctctgcctcaccgagggagccaaagacgagtgtaatgtggtagaagttgtggcccggaaccatgaccatcaggagatcgcagtccctgtggccaacctcaagctgtcctgccaacccatggtgagttccccagctctgccttggtggtggtggtggtggtggtgaggggattgaggacgttagcactcattacagtgtggggtgggctaggagtgggccaggccttcatccttgtcttcctcccagctcagtctggatgacttccagctccaaccacctgtaaccttccgcctgaagtcgggctctggccctgtgcggatcactgggcggcaccagattggtgagaagaggggagggccctctcctttgcttccagtggactctcccatcaggcttcccccactccgcactcctgccccatcccaccctcatctcccagtgcagccctgtacaggtctgtgtgccctccacgctgtgccctgtgcatgacatgccctctcctttccgtctactcaagcctacctcctccatggaacatggcccaacttctccagctccaataatgaagactcctttggctctttgtgacccagtttagggtctgaggttcttcccacctagcccataagcactgggaggtcatggtccctgtaagcctaacaccacggcgtgaagaaatggcatgcggtgtgaaacggtctggtcttaacaccccatccttctactgcttgtgtgtccaccagttacgatgagcaatgatgtttctgaggaggagagcgaggaagaggaagaggacagtgatgaggaagaagttgagctgtgccccatccttcctgccaaaaagcaggggggcaggccctagccctcctaggtgagttgcggggagaagtgcctagcaggctctgggaaggggcaggagaagcaggtgagggcctaaatgctgattccttgtttcctcttttcaggtcagctccatgtgccatgcaccgccatgcaccctgttccctgacaagtttcaacaattgtaaatatttcttccttgaagaggagagcttgggtgggggttgggtgggagggacttgggtctttggtgctaggagagggcctgtgctccacacagccgtggttttctgattttcaccatgcccggggcctcccttcccacctgcctgtgagaattggaggttagtgcctgaagctcagagctacacatttttaatagtttttacatttttggataaaggttgaaataaagtggtgtggagtttttgcagctcttgtgtggcttcttcctgtgctgggtgatgtttccctagggaccgccaggtggcactgtggaagcacccagcgtggccctgggcctgggggagggtggagaactgtgggatcctctaccctcatggccctgggctaggacctggggcctgggccccagttgccttgctggaaggggacctcccaacactcagcccattcccagtctctgcaggtgggagagggtcatcgcaggaggttatcagcatccaaacaaggggtctgggcctctgtcagcactcggctgatgggcaggggggcagataagcgagcttaggcagcctgaggaatgcgcgtccctagccccacgagggtctctggcccagagagggcctgtgagggcagggcgggaccaggcttcgctcctcctttgagccttgcaggctgtctctgagcagggctgggcccttagagaaacctg

SEQ ID NO: 8604 - DNA, 32189 bp, Homo sapiens
ggcagcagcagagggagagctcggggcttggaggggaaacagcggaagacctaagattatcgggagggcagcagaggcagagaacgaggacaggacccttggccgtcttcttccagggaacgagaggtcacagcctcgctctccgcttaggcttctggcgccccagcttaaagccgaggctgcggctgacaaagggctcgcgccggtgccgccgcccttctcatccgggcattcgggtccctgcggagagggagggggaagggcagagggggaggggaaggagccggaggggcgcacacttggagctgaagccctctccagggctccgggccggtgccccaacggacagaggtcgaggaggacccgcagaggtggcagcggccgggggcaggaggatggtgcagaaggagagtcaagcgacgttggaggagcgggagagcgagctcagctccaaccctgccgcctctgcgggggcatcgctggagccgccggcagctccggcacccggagaagacaaccccgccggggctgggggagcggcggtggcggggctgcaggaggggctcggcggttcctctgcggtgtggtggaaggtgagcgccctccttccctccccgttttggcactaacacgttctgtcctcgggaggagggtggtggcggggattttggagactctaaaaggccggaaagcctctgggtctgaaatgtggccctcctaaagcgaggggagagacgagatgttgggcgaatctccttgcacgtcttaagacggcgtcgaattcccccctggccactcacaagtctgaccccacccgtcttgggcttggagccaggccacctcctaaggaggcggtggttaagagcctggtgttctgttagcctctgagttctacttctttgtaccttgggatcttattccctagggttgtctggttccagtgaaaaaatatgtgtagtgcttctgtcaccaccctttgtggaaaatcggcccacactgacgtgcttgtacttctggagtgaagagaagcacgtttggcctatagtatttcaagttccacttggcttagaatatttttgttgcttccccccacccccgcaaagattcatttgcaacttagaaaattgccctctttcccagctactgtactttgctctcgagggatgaaactttggctttaatcacagattctcgaagtatctgagatgcgtaattggaatttagtgaccgcagaagcggctttaaaaatgcccttctcgccttttttcccatttacagtcgaaaagaacgatggactttttggtagtgagggaaaattaccagatgcttgtttcagtttctggatgagaatggacagatagtccaccttgcagctctgtagaggcacgaatcggttacattattagtctttccgcagttacagcatgtatttgaattttctgaagtattttggccgattcagagtttcctagatgtctgttttatatctctctcgtatgtaatggcgtggataagggtaaaaaatatatatatttaaaaaaccaaaaaggtatggaaaaaggattgctctcgacgttgagaacatcagcttttctgttttttttcaccatataaattagagtattctttcgaaaaatgggtggtggttatggtacagaccataacaggctactttgctgctacagtaaggcatgaaagagttcagcgaagttaactgtcttgcagaatttgggggattacagaatggaaaactgctatatagtattcatcaaaaatgattgcattgtgtgacttatatcgttgtatttattggcttgagtgcagggagattttagaaaaagaatctggtttttgttatcaaagatcttggagtggggatgagagagtgctgggaaatttcggagctagactggaatgagtctaaggaaacttgccagtccattataccttcagttataaaaggagaaaactcatttggtttaaattcgtttgtttagaatagcattaaaaggcgattcttcctatttaaagaacagagttgtctgccattctctcgtttattcctcctccctcccgtgcccttgtatattttcttagtgactgagcacctgagccagcactgattttttgtgtgttttgttgtttttgttttgggagacggactctcgactctgtcgcccaggctggagtgcagtggcgtgatcgcggctcactgcaacctccgcctcccgggttcgagcaattctcctccctcaccctcccaagtagctgggactgcagacacgggcccggctaattttttgtattttagtagaaacgggtttcaccgtgttgcccaggcaggtttccacctacggagctcaggcagtcccgcccgcctcggtcttccaaagtgctaagattacaggcgtgaactaccgcgcctggctttttttttttttttttttttttttttctctctttttgatacctcttggttggcaccagccgtaaaatgaatgagcatagaaatactatagttactgctaggatttcttttttgttttctttccatcacaaaactctcttggtttttaacttacattaacagcattgcttcctctttgtggtgccagtcaaccgaaaccatgaacctgactctcaaaagagccaaggtagggtttctaaagattaaaatgtttaattaagctagacatttgaaaagtctttttttatattggagcaactctgaaaggatgtttaatgcctactccttaaaaaaaaaatgataatgctaagtgccgtagggatgctaaagacttgtataggtctgcctgatcaagaatattttatattggccgggcgcggtggctcacgcctgtaatcccagcactttgggaggccgaggcgggcggatcacgaggtcaggagatcgatactagcctggccaacatggcgaaaccctgtctctactaaaaatagaaaaaattagccgggcgtggtggcgggctcctgtaatcccaactactcgggaggctgagacaggagaatcgcttgaacccgggagttggaggcgtagattgcattgagccgagatagtgccactgcactccagcctgggcgacagagtgagattccgcctgagaaaaaaaaaaaagaatattttgtatcacttgtgagaggctaacattagattgtccagatgaaagtgctacagttatacattggtatgtaatgaattttaatttggtctgtcattgtcctttttgtggtgcagaggagtcattctgcctagagattggagctaaaatacattgcagaaatttgttttagactagtctcttatgtagattgtgtgggtttatgtagaacattttgtgttcagaatgcttttattaaccttcttcatggtactcttgagaggctgtccttatctcttactgatgattagactgagacaagtggaaagtaaaggttagacaagatgtaaagtgtgtggtttgagctgtgatgagcacactagggagttccagataccagtttgatgcttattcaaccatttaggttatcggtctgcgagtttgttttctgcagtgtgtgcataactagtgttttgtcctcttagaggatactctggggacattcttgagttttctttgtttattcctttccgtttaaggaccagaagtaatattcttgaattttcatttgttcagatctttgctctgtaattaagattgcgtgagagtttgttgtttgggccagttaggctgttgaatttcttgggaatgtggtttcaggcattttttggtccctttgattatatcattgtatgtggaactttttttgagagagagagttttgctctgtcacctaggctggaatgcaatggcgcggatcttggctcaccgcagcctccgcctcctggattcaagcagttctcctgccctagcctcccaagtaactggaattccagtcctggccaggaactttttttaaaaaagaggagcacgatcataaaattaagtcagattctttcctaatcctatctctgatttgtttttaattgctttacctgtttatctcccctcacccttttgttgttgttgtttgagatggagtcttgctctgtagcccaggctgtagtgcagtgacgcagtctcggctcactgcaagtccgtctcccaggttcaagtgattgttgtttctcagcctcccaaatagctgggattacaggcatttgccaccatacctggctaatttttgtatttttagtagagacatggtttcaccatgttggccaggctgggtctggaactcctgacctcaagtgatctacctgcctcagcctcccaaagtgctgggattacaggcgtgggtcacctcacccggcctcccctcaccctttctaaagcagttttactatcattctaggaagtaattgttactgttggcagcttgtattacattgctgccgttccccattataagattgagatctcttaaaaaattggaattaaatatatttggactttatcaacagtggaaagatgatagatgtttgttttaaaataactatcacctaagtaactaatgtcatggtagaaaaaataaaaaaaattacctaagcaaaaatggaataaaagtcaccttgtaacgtcaccacccaaagattaaaggaaccttagtattttattaaatatccttccgatttggtgtattttatgctttttacaaaataggattgtattatatgttttgtaacttgcttttctcaataaagcttaccacattttaaaactgaatataatttcattcttactttgaatctaggattttatggaagaccttgggttatggaacagagaaaagaactctttagaaggtaaatcttcattatatgaaggagagaggagaaccttaaactcttaacattttcttttgtttgaagaaatactaacagtgaatagcccaggtgcattttgatggtttctcaattgcagaagttattttaccttggtcccttttttcttcacctaggcctttgattttcaaacttttcctggggagctgaataagttttgggcttcaccttacccagagctgttgtgttttttaagagtgttttgtatgttggcatacattgtaatacttaatttttttaaattccactgattacaaaaaggttaaaagctactgtcatagaatattagctttgtatgagatggagatgctccaagaagagggaaatggagattgacagcctatgaatgttgcctgtttatacatatgtaattttctttctccttaaggctccagaaatgggaattaaatacatacttgtatgccccaaaagatgactacaaacataggatgttttggcgagagatgtattcagtggaggaagctggtaatctttttctttttatccataaattcaaaatctgtgaagaaaacggttatattttaaatgtagttgtacaagaattttatgacattttatttttattttgtaggtagtttccttttcttctatctggtaactattcagttagctgagattgaaagagtgctctgcgctagcaaggtcatgaccatatgtgtgatatcatgggcgtgctaggctgactccatctgttctgtggtcatagattgtgctgcttacttctgccagtggattaaacagtgggccactgggcaaagaagtgctggagctgggctaggcccagggcaaggcaagtgaggcacgtaccttgggtgcaaattttaagggacccccaaaaagtaatcaacataaataatattttatgcaatttttttaaaaaaccaaaattaatgcagaaattcatgatgtacacaatgctaaaattttaggtaaagacaggatcagcactactgattgttccttttgcttcaggctctagtatggcttggccttgtcagcagttactggtccttaaaccctagtccaggaaagtgggaagccattaataggctgtctttgggttttgttttgttttgttttgttttttgagacagagtcttgctctgtcccccaggctggagtgcagtggtgcgatctcggctaactgcaaacctcgccctcccgagttcaagagattctgctgcctcagcctcccaaagtgctgggattacaggcttgagctcctgtgcccggccggcctgctatgggtatacttaacgttgagttggttacataaaattgataaaaagtagtatagcattgaaccgccaaattagagaggtgcttttctttgggaacttgtaaatggtgaaacatttttgtacttgaaattaaatggtatacgcatatagctaacaagatatttggttacagagcccagccaaggcacagaaggctgaaagttttcttgaattacaaagaagcaattacagcttaccccatctccatctagtgttgtggtttactactctatttaagtgtgccttcaacttaattactttctggtggtgctggtaatgaaacttaatgtgatcaataatcaaaatagagtaaaaatgactatcttgagatactactgaaaattattcaaaaatatgtcttatagtatatactagtagtagttaagttgatttaggaaaattgtcaattgataattttaaaaggttaaaatctataattaatgtttttcccatagatagaaacaggtcaagattgttaaggccatgacttaactctggttctttttctttttctttttttggagacagcgtttgtcactttgttacccaggctggagtgcagtgactcactgcaattttgatctccccggctcaagcaatcctcccgcctcagtcccccaagtagctgggactacaagcgcgggtcaccacacccagctaatttttgtatattttgtagagagaggggtttgccatgttgcctgtgctggtctcaaactcctgaactcaagcagtcaacttgccgtggcctctcaaagtgctgggattacaggtgtgattcattttttttttttttttttttttttttcattttttttcattttttgagatggagtcttgctgtgtcgtccagactggggtgcagtggtgcgatcttggctcactgcaacctctgcctccagggttcaagcaattctcctgcctcagcctccctagtagttgggattacaagtatgcgccaccacgcctggctaatttttgtatttttagtagagatggggtttcacaatgttgaccaggctggtctcaaactcctgacctcaggcagtcctcctgcctggcctcccaaagtcctggggttacaggcatgagccattgggcctggcctaccctgattcttaagaaagcattttctttctttcatattataaagtagttatgtgtaggtttatttagttaggaattccagctgttcagagatggcaaaacaaaaaaaaaaagcaagatccagtaccatggctcatgcctgcaatcccaacactgtaagaggctaaggcaggcggatcacttgaggccaggagttcgagaccagcctgggcaatatggcaaaaccctcatctctactaaacaaaaattagccgggtatgcctgtaatcccacctactcaggaggtggaggttgcagtgagtcaggatcgtgccactgcactccagccttgggcaacagagcaaggctctcaaaataaaaaagcagcggctgcattttatgcctttcaaatgctgcaggaaatagaaatggcttaagttcagtaagagaattgacaattcagtgtttttgagaagtggcaatgaaagggaggaaaatgtttattgattttagcctgtttccccaaaaggataagaaactatttggaagtgaaaaagaagggcctcttattttctgttggttcagatttcaaaggtgtgaaaactattctttttcccttactgtgacattaaatcacttcaggcttgtaccattttgtatggcctgttgttaagttggacatgacaatttgtaaaatgtgaggatcttttcctttcttgtaagttagaagaaataacctcttcagttaaaccttcagtgaaggttcttttagttttctgttctgctttctaaaaacatagactctgttctttagagcaacttatgactctcatctctgctgcacgagaatatgagatagagttcatctatgcgatctcacctggattggatatcactttttctaaccccaaggaagtatccacattgaaacgtaaattggaccaggtaactccttactttttattcatttttcctgactatgtacttgaaactagaagtttactcagttgcttttacgatgttaaaaggaaatcaaattcctatttctttgttttctttttttgtttgtttgttttgttttttgagacagagtcttgctctgtcgcccagactggagtgcagtggcacaatctcggctcactgcaacctcctccgcctcccgggttcaagtgattctcctgcctcagcttcccgagtagctgggactataggtgcgtgccatcatgcctggctaatttttgtatttttagtagagacagggccttcaccatgccagccaggctggtctcgaactgctcacctcatgatcttcccaaagtgctgggattacaggtgtgagtcaccatgcctggttttttatttctttgtttctataagaattttttttactttgaatgctttttttttctttttttttttttttgagacagagtcttgccctgttgcctggagtgcagtggcccaatctcggctcactgcaacctccacctcccaagttcaagcgattctcatgcctcagcctcctgagtagctgttacaggcacaccaccatgcctggctaatttttatatttttagtagagacagggttttgccacgttggccaggctggtctcgaactcctgactttaggtgattcacccacttcagcctcccagagtgccgggattacagtcgtgcgccagtgcacccagccttgaatccttctgatagaggaatattttccaaattaagtaaaaagagctttactggaggtactagttcttctcaaatttcagtttgcataagaactgccttaaaagaatgattagaagtgaagcttggaagaatgctgactgctggactttatttcccaaatggataaggtggggaccgggaatctaggtgattggtggtcaagaaccacattttgagaaattatatataccctaggctgcttggcttgaatttacacctgagattacagaaacagggttttacctattagacattagtttcttcaattatatggacgaagagatgtctggaaatggctagtttcccaagatgagaagaaaaacagactaggtgaacctaattgagtgtaaagtctgcttaatgtaaaagctgcagacttcctttggtccaatgtagggggcttccattttcctttttttttttgaaactgagtcttgctctgtcgcccaggctggagtgcagtggcgcgatctcagctcattgcaacctctacctcctgggttcaagcaattctctggcctcagcctcctgagtaacggggattacaggcatgtgctaccacacctggctaatttttttgtatttttagtagagatggggtttcaccatgtttgccaggctggtctcgaactcctaacctcatggtttgcccgcctcggcctcccaaagtgctgggattacaagtgtgagccactgcgcccggccccatttttctgttattttagtttgctggtttttctatatacatgtcttatttctttaggcaaagatttatatgggtggcattaaaatgtctggtaaaaaatttaaggcagttgaaattttcatgaatgaagttattttactatttgataaaattctattctttctgattcatacctggttaggtttatctgcaaagggatcagtgtgccttttgggactaggacacagcctggctttttcatgtcttaaggttacttactcatgtttctgtatttttctgactttgttgggtcttctacaatcagcagcagcccatgaggactaggaggctaggccactttgttggatcatattgtcatataagttgagtatccctaattcagaaatctgaaatgttccaaaatatgaaactctttgagctccataaaattcaaaggaaatgctcattggagcatttcagattttggattttcaggttagggatgctgaatataatacagatattccaaaatccaggaaaaaacaaaaatgaaaatccaaaacatttttggtcccaagcatttcagataaggaatactcagcctgtagtgcattcaaacccaaatgagaaatgggtcccaaaactgtttaacttacgattttttaattgaaaatgtaaaaacaataaatctgtctttgaacattctagtaaggaaaatactggattttaagtataactgttaacgctgtaatgtttggaattcttaatttttttactcttgattcttttttttttttttctcctaggtttctcagtttgggtgcagatcatttgctttgctttttgatgatatagaccataatatgtgtgcagcagacaaagaggtattcagttcttttgctcatgcccaagtctccatcacaaatgaaatctatcagtacctaggagagccagaaactttcctcttctgtcccacaggtattgtatataatggctttacatttaactagtcttcttggaatatataacttataaaggaccatgggccccattctctctccacttccctcctcctttggtgtgtaaaagtaggaatctttttttagaagacatttttcaagatcctaaattggagaaattttaggaactaataaatgacaactgactaggcaaaagatttttatgtatttttaagtactggaagtatatgaacattacattgtcaatattaaaagagggatagtattgaaatgaaaactggagaaaaaccaaattacattgcttttaccttagtcacttctcatttcctcctacttgtcccctttttctgcccatgcatatctgtccctttttgcactcctcccactcccatctgggctcttatttcaagtagtcagcatagaaagcttaacagtttttcccgttttcctttctttttgcccctctggtttctttcattgaaaatattttagtctcttagttgcttctcaaaattcaacttacaggaagttttccccacacttccttgttcaggaagaattttagattaaattatttaactttctttgtgtgtattgtgagccgagaaccttattttagttgagtactacattagtacccagaagttttaagattatactgggaattaattagctgcaagttacagtttaagttgcagttgagtactaatagccattggtatatgcctttaaaaaaattttttttaaattttacttttaagtttgtattatttatttagagaccgggctataaaactggctaatttttatatttttggtagagacggggtttcgccatattgcccaggctagtgtcgaactcttgggctcaagtgatccacccgcttcagcctcccaaaatgctgggattgcaggtgtgagccactgtgcccagctgccattggcatattcttgtattagttctattatgatattatcaattcattctgtttggcgtttaattgtaactgagaaaagtaggcaattcagaattctgtagaaaatgctgcagttcttgtttttttagtaaacttgtatttctagtaactgtagtatcgtaagaattgatctgtactactgttggaggaaaaataccagattttatgaatttcttaaatgaactgcccactttagttccttgtaggaggccttttatcatttagatgaaaataatttagaattggcagacattttttccacattcaaaaacccatgggccttttgggaggccaaggcgggcggattgcctgagctcaggagtttgcgaccaacctgggcagcatggtgaaaccccatctctactaaaatacaaaaaaaaattagccgggcgtggcgcgtgcgcctgtagtcccagctgcttgggaggctgaggcaggagaattgcttgagcccaggaggcagaggttgcagtgagccgagattcgtgccactgcactctagcctgggcatcaagagtgagactccgtctcaaagaaaacaaacaaacaaagagaaaacccatgagcattttaattctgacttttttacttttctccctacatttagaatactgtggcactttctgttatccaaatgtgtctcagtctccatatttaaggactgtgggtgaaaagcttctacctggaattgaagtgctttggacaggtaagtcttttaagatttatacagtcaaagttgaattaagtaggacttgcagaaattgcttgttcttgttaattgaatacttttttttttgagacggagtctcactctgtcgcccaggatggagtccagtggcatgatctcggctcactgcacgctccgcctcccaggttcacaccattctcctgcctcagcctcccgagtagctgcgactacaggcacccgccaccacgcctggctaattttttgtatttttagtagagacagggtttcaccatgttagccaggatggtctcgatctcctgacctcgtgatccacccgccttggcctcccaaagtgctgggattacaggcgtgagccaccacgcctggccttttttttttttttttttgagacagagcattgctcttgttgcccaggctggagtgcagtgcacaatctcagctccctgcaaactctgcctcccgggttcaagcaattctcctgactcagcctcccaagtagctgggattacagggcacacgccaccacacccagctaattcttgtatttctagtagagacgcggtttctccatgttagccaggctggtctcaaactcccgacctcaggtgatctgcccacttcggcctcccaaagtgctgggattacacatgtgacccactgcacctggcccagagaacttgttaaaatacgctttcttttacaaagtttacatattctcttaatatgaaaaaacatctatcatggttggggagcctgagtggggagcctgaggtggaagcccccaggagttcaagaccagcttagacaacatagagagactgtagaaaaaataaaaaacttagccaggtgggctggtgcacacctgtagtcccagctacttagggggctgaggtggaaggatcacttgagcccgggaggtagaggctgcagtgagctgtgatcatgccactgcactccagcctgagcaacagaatgagaccctgtctcaaaaaaaattcagttaataaataataaagatttatagggaattgggctaaaaggtattgatcccatccttaagcagcgttaggaaactcttctattttataaaacgaaaaaaataaagctcagtaaaagacatgttgtgttttcaaaagaaaaattgtggctgggtgcattggttcgtgcctgtaatcccagtgctgtgggaggcttgagttgaggtaggaggatcgcttgaggccaggagtttaagattagcctgggcaacatagcaagcccttatctgtacaaaaaaattttaaattactgtgacatggtggggcacacctgtagtcccagctacttgggaggctgaggtgagaggattgcttgagctcaggagctcaaggctgcagtgagccatgattactccattgcacttcagcctgggtaacagaggagaccctgtctcagaaaaagaaacgttgttataaaatgtacatgtaaggggccaggcgcagtggctcacgcctgtaatcccagcactttgggaggccgaggcaggcggatcacagggtgaggagatcgagaccatcctggctaacacagtgaaaccccatctctactaaaaaatacaaaaaattagccaggcgtggtggagggcgcctgtagtcccagctactcaggaggctgaagcaggagaatggtgtgaatccaggaggcggagcttacagtgagccgagatcacaccactgtactccagcctgggcgacacagcgagactctgtctcaaaaaaaaaaaaaaaaaagtacacgtaaggaaaacaataaaaagttatatatgcagtatattttaaagaaccatgattcttttttttaaatatattttttaatttaaaataaaaagatagggtctcgctgtgttgcccaggctggtccgaactcctgggctcaaatgatctgcccacctctgcctcccagagtgctgggattacagttatgagccaatgcgtctagccaagaaccatgattcttttaacgaacggttgtcgttatttctaggtcccaaagttgtttctaaagaaattccagtagagtccatcgaagaggtttctaagattattaagagagctccagtaatctgggataacattcatgctaatgattatgatcagaagagactgtttctgggcccgtacaaaggaagatccacagaactcatcccacggttaaaaggagtcctcactaatccaaattgtgaatttgaagccaactacgttgctatccacacccttgccacctggtacaaatcaaacatgaatggagtgagaaaagatgtagtgatgagtaagtagcctgtacttgatctttcaccttgggaggagagctggggttaactagagccagtggaaagtatgcattcctttgtcatcacaacttaaacagttttatttatttttttaaaaacgtattttgttttactaaggaggaaacaaaaccaagtggttttattatggtatgttgtttcattctgttgatgaagatgtatatgatagaagaaaggttgagtgtctttggacaagtcacttaacctctttgccttagtttttttttttttgttttttttttttttagtatgattcagaagcagcgtggtggctcgcttataatcccaggaaatgcactccagcctggacaacagatgaaaatcctatgaaataaataaaaataaaatatggttcagtctttgaagtctgagtactagaggagacagtcttttaagtgtttccattatctctagaatcattcggataaaatgtattttcaggcaattttattgaaaaggatattttagataactagatactcttgagtcacttagatcatttagattcagcttacatttatcttttatggaacatactctttttttttttttttgagatggagttttgctccatcgcccaggctggagtgcagtggcgcaatctcagctcgctgcaacctctgcttcccaggttcaagcgattctccagcctcagcctcccgagtagctgggattgcaggcacacccggcttttttttttttttttttttttttttaaagtagagacagggtttcaccatcttggccagactggtctcgaactcctgaccttaggtgatccacctgcctcggcctcccagagtgctgggattacaggcatgagccaccctgcctggccgaatggaatacagtcttattttagacattggcttactaatttttaatttatgaaaaatctctaattaatagagttctaagtaaggtgcttgataattatttacatttaaataatctgtcatggggcagatgcatgttcatgggcactgagggggcaaagaataaagtagttttttttttttctttttgagatggagtcttgctcttgttgcccaggctggagtgcagtggcgcaatctcagctccctgcaacctccgcctcccaggttcaagtgattctcctgtctcagcctcccgagtagctgggattacaggcatgcgccaccatgcctggctaattttgtatttttagtagagacggggtttctccatgtcaggctggtcttgaactcctgacctcaggtgatccgccctcctgggcttcccaaagtgctgggattacaggcgtgagccatcgcgcccagccattcctacttttgagaaacagtctagtgttgggtaaggcttataggcaattgtactatagtgtgataagtgttgtaatagtttaatttataaagtgctgtgtgaacacgggagagagtgattatttttgctaagagatttcacagacttttaagctggatcaaagtatgaggagagtttgctgggcgttaaaggtttgtgggctggaggttaaaaacactgaacactgaaaatttttttttttctttgagacagagcctcgctctgttgcccaggctggagtgcagtggcgcgatcttggctcattgcaacctctgcctccctggttcaagcgagtctctggcctcagcctcctgagtagctgggattactggcgcacaccaccccatctggctgatttttatagttttagtagagacagggtttcaccatgttggtcaggctggtctcgaactcctgacctggtgatctgcctgcctctgcctcccagagttctgggattacaggcgtgagccactgtgcccagcctgaacactgaacttttgaagttccctgaattttggcccattttggctactgaagtgtcatgatagtatgtagtaatattaatagttgtcatctgtttctcaattccatacctctgctttgaattgtttattgaattaatgtctcccttttgtttggctcagtcattgtcatcctcctcccctcaataaaaaacaaattgggaatataatttaaatgctgtcagcgtacatggcacttaactcctacatcttttaaggcacagcaaggaacatactaagggtggcagacactatccaaacctgggacatacgtaggaaatattaaggaaagctaagaatagagagtttttaagtacaaaatcaaaaaattcagacttaattttctctaccactatcctggctcagagctttgttgccttatgtgtgctaatttgtgggtctctgtcgattatctcttttttttttttttttctgagacggagtctcgctcttgtcgctcaggctgaggtgcaatggcccgatctcagctcactgcaacctcggacacctgggttcaagcagttctcctgcctcagcctcccgagtagctgggattacaggtgcctgccaccacgtctggctaatattttgtatttttagtagagatggggttttaccatgttggccaggctagtctcaaactgcagacctcaggtgatttgcccgcctcagcctcccaaagtgctgagattacaggcatgagccaccatgcctggcctcttctttttccctcagcgcctttattaatgaagttacagtcggttgtagtggctcacgcttgtaatctcagcactttgggaggcccaggtgggcagatcacaaggtcgagttcgagaccagtctggccaacatggtgaaaccccatcttcacgaataatagaaaaattagctgggcatggtggcatgcgcctgtagtcccagctactggggaggctcaggtgggagaattgcttgaacctgtgaggcggaggttgtagtgagccaagatcctgccactgcactccagcctgggtgatggggtgagactccatctcaaaaaaaaaaaaaaaaaaaaagaagttacaaggccctgaaggctatgcaatgttttcttcatacgaaaagcatggtacttttgaccttgacttcccaacaattagtactcagtagacggttaagattgactcttccactgatactaaaatttatatttcttatttcaattgagattttacatttaacattacgtttaggttactatcctatatgaagtggtttggtgaagggtcttgcttttatttgaatttttatgtttaaggtttgttctcattctgttctttgtttctgtggttatactgtgaaaactagttgcatttattcttctcacttgtcagaaggcttttgtaatcaaaactatttttgtgcttttttattttattttttgcagctgacagtgaagatagtactgtgtccatccagataaaattagaaaatgaaggcagtgatgaagatattgaaactgatgtactctatagtccacagatggctctaaagctagcattaacagaatggttgcaagagtttggtgtgcctcatcaatacagcagtgagtttggccattctttgttaagggggttagatcacatagttgagtcacaaagtaaagaacactgtctcccgggtgtggtggctcacacctgtaatctcagcactttgggaggccgaggcaggcggatcacctgaggtcaggagttcgagaccagcctggccaacatagtgaaaccttgtccctactaaaaatacaaagattagccgggcgtggtggcatgcgcctgtcgtcccacctacttgggaggctgaggcaggacagtcgcctcaacctgggaggcagaggttgcagtgagccaagattgagccactgtactccagcctgggtgacagagcgagactctgtctcaaaaaaaagaacactgtcatgtgccttaccttatgcccactaagcaaagtgaaattaaatgaaattgggggatctagagaataaggatttttaaatcttacttttggtcttaaatattagcttttattttgatggaatgctaatttctcttaaaaacatattttttgaagtaatttaagggtttttagacacaaattttcaaaagagaatgtaatagtagatgttggcatgtttacctcccaacgcccttccattcctgcatccctagtagtatagagaaatctcatttttcttagaggtcaaattaatttggatctaaaattgaggttccacttaacaaatatgataaagcatctttctgaatctaatgtgttctatctctaattctgattatctgtgtgaccattttatttatacatttatttatttttgtaggtaggcaagttgcacacagtggagctaaagcaagtgtagttgatgggactcctttagttgcagcaccctctttaaatgccacaaccgtagtaacaacagtttatcaggagcccattatgagccagggagcagccttgagtggtgagcctactactctgaccaaggaagaagaaaagaaacagcctgatgaagaacccatggacatggtggtggaaaaacaagaagaaacggaccacaagaatgacaatcaaatactgagtgaaattgttgaagcgaaaatggcagaggaattgaaaccaatggacactgataaagagagcatagctgaatcaaaatccccagagatgtccatgcaagaagattgtattagtgacattgcccccatgcaaactgatgaacagacaaacaaggagcagtttgtgccaggtccaaatgaaaagcctttgtacactgcggaaccagtgaccctggaggatttgcagttacttgctgatctattctaccttccttacgagcatggacccaaaggagcacagatgttacgggaatttcaatggcttcgagcaaatagtagtgttgtcagtgtcaattgcaaaggaaaagactctgaaaaagtgagtatgtttaatgtacctgctgctgaagcctgggtggttccccatactggtaatgtggaaaaggttcttaaatgagtacactgtaactgacagaaaattgaccatgttttagaatatgttctttaggccggttatgatggctcatgcctgtagtcccagaactttgggaggcagaggcgggcagatcacctgaggtcaggagtttgagatcagcctggccaacatggtgaaaccccatctgtactaaaaatacaaaaattagccgggcatggtgacgggcacctgtaatcccagctactcaggaggctgaggcaggagaatcgcttgaagaacccgggaggcggagtttgcagtgagctgagatcgtgccattgtactccagcctgggtgacgagagggaaactgtctcaaaaaaaaaaaaaaaaaaaaagtatgttctttacagtggatgtggactctactaaatctggtaccttcagtttcatagtttgcccttctagttaagaatgaggaaaggtcattattttaggaatatttgtcagtttggggagacacaaaatgatactttaatggttaagataaattgccagtacctgacaacataagcagcttaatgtgtaactgtgtctcagattattttgttaagcttacagttttttgagtctttttattgatcttcaatagattgaagaatggcggtcacgagcagccaagtttgaagagatgtgtggactagtgatgggaatgttcactcggctctccaattgtgccaacaggacaattctttatgacatgtactcctatgtttgggatatcaagagtataatgtctatggtgaagtcttttgtacagtggttaggtaggtgcaccaggaataatctcttctcctcaaatatattgtccctttaaaaaaaattatcccacagggagaaaaacatttagggaattggcacatttccaagtctcttcaattcgttgcctaggtttctttcaaaaataggcattattgaagacttgagatgcaagtcttagtaaatacatcaagcacattaatttttctcccttgggctaattcagcataagtatcttaaaagtatgttagaaagtactgactttaacttgctctgactgaatgctttctggatggaaccctgtataccacttttatctgatttggagatgagacactatgaaatgtgactccacaagctttctgctgcttgctgtgtcttgataacattaatgctatgtttaacagaacaattgctgaaatgacctaaagggcctggcaagaggaagccatcctcccagccctgtgcgcatgcgagctttagtgtaaggctattctggtgctattcagtattatttcacgtggctttttctttatccttctaccaagtattggttttaccaggggatagaaattgtaatcccctaaacatctctgctacattaaatggacttttgtatgtctcctttgaacactgattttttttttttaaattgtcaaacttggtaaaaagcaccagcatggccaagtttctctagggacttcatttcattttcaggttttcaatccagctataaggaatatgtaatggacttatatacagcacacagcaggcagcaaggctgactgacatgtcatagttttcatagtagtcacaaatactatgatgggtttcatggtcttggttgtgaaatagatatctgaaacaccgtgagcttagaataaaaagtagtagtgagattttccactttctgcctgtatacctttgagctcttaaatatttaaaaaaaaaaaaaaaaagtttccctgtgatacaactaattagctactaaaagtagagtctcagattgttaatttgaaaatagataactttttttggattgctgtaataacaggtagaagagagtattttgacctcatgttaaaaggctctgtatagcttcgggcgcggttgctcacccctgtaatcccagcgctcttggtggctgaggtgggtggatcacttgagatcaggagttcgagaccagcctggtgaaaaccagcatgagaccagcatggtgaaaccctatctctactaaaaaaatacaaaaattagccaggcgtggtggcgcatgcctgtaatcccagctacttgagaggctgaggcaggagaattgcttgaactcaggaggcagaggttgcagtgagctgagatcacaccattgcactccagcctgggcgatagagggagactccatctcaaaataaataaataaataaaggaaatactgaccgtgcgcagcggctcaaacctgtagtcccagcacttagggaggcctaggcgggcagaccacaaggtcaggagtttgagaccagcctggccaatatggtgaaaccccatttctactaaaaatacaaaaattagctgggcgtggtggcatgtgcttgtagtcccagctgcttgggaggctgaggcagaagaatcacttgaacccaggaggtggaggttgcagtgagccgagattgtgtcactgcactccagcctgggtgacagagcgagacttcatcttgtggggctggggggaggctctgtatagctcctgtacatgggagacatctacccttaggctcaagagacctcaatattggttgctggatgacaacatttgccttccaggtttctgctcaggttcttataattcattcttatagggatttaaacttaagtttctaaggcccttaggaattttgaacctgaaatctggattattgagcttgaaatgtattacagaaaacatttgatattcagtttttaatttaagaattattaaaagttaaattcttaatgatacacagtattgtttctttctcttctcagggtttatctctgcactgagcatttatggtggtagctttccaaaattatatagatacctcttacacaatctcaagctcttacagcaagcttgtccagcctgtggctcaacacaagtttgtaaactttcttaaaacattgtgagtttttttattttttattttttttaagctcatcaactatcattagtgtattttatgtgtggcccaagacagttcttccagtgtggcccagggaagccaaaagattggacaccccttgtaacatcttagaagttttaaataattatcttcatatccacatagctttacaaaagctcacgacagggagagtattttcttggttctgtagtaatttcagggggtttactgattggaacccttccttttcctcctctctccagtccagctggcattcagtcctttaaacaatgtggctatgcagtacttttgattactaatgacttctattatcttcttccccattgtgtacagatgggagaatcctcagcacaagtgtctactactattggatggacagcggcagatgttcacagcgcgtcatgattaattagtttaaattgcaaggttctatctgtgaggtagctcaggtagatttaagggcggtagacatgaactgaagtcacgtttgcgcagcgactgaggcattaaccatgttttcatttacacagctcttcgtacatgcagctttttattgtaatagttggaagtgctagttatgttgtagtctcaaagtagggggtaggggaaattggctgatcttaaagtttgagaggtatagtttttttcctgcagtgtaaattacactgagttacggaatgggacaggttctcgtatagtctaaattttgaccctgtttcatatttattttacaaatactacattttatgttttttaaaagtacccctacccttgaaaaatgacaaaccagatacaaactcttaatgggcctgaattgttaacaaaaaattggtttgctttgggactgtctgactagcacactatatttgtactgatgagactgttaacttgaacaggaggtagaatgctgtcttccaatggaaaagaactatattgcgctgctttatcttgtcagaagactaggcaagtgattttgatttggcctccaaacatttgcctttatgtcttactgttagctagcgttattgcctattaagttagttaactggtgaccttaaatagagacttctgtattccatgtgtatgttcagtgtattgcaaagattattataatggctggtcagaggaaccagatactgtcatacttttaagaaaagtatatttagctctgggcaaaataacatcaattggctctccttagttctcagaatctgtcagactggtattattagccaagtctgattttgaattgtttttgtccaaaaaaatttttctcattatgtttcattttgtcaacttaatttcttgtattttattctactgaccttagttttctgacaagattaatccttctcccccgcccttttcccttacctgtacccttcctcaaaatgtaaaatgtgacttcagacaggttgaattccttcatgggctgtgataataaagtgtctaattatcagtcattttagttaatagttactataattttatgacagagcaagcagctagcttgatttgtataatatctagggaatatataaagttgactcagacaaacttgggacttactttccttccagtaattaaagagtagaactgataatactgattattcattaattggaggaaggaacattagtattgaaatgccgttaacattttaaaaaataataattattatcatagccttgccctgaaaccctgattattgttagagagttatttccacgaagtgtttgtcagtttgttggacatttgagaccccaggaaatcccctttctcgtaacgttctccgcttggatctgatctcaacagggtgtcgtagtcattcttcagcacaattcttaattggagaccaagaaccctgggcctttagaggtggtctagcaggagagttccaggtatcaatatgaattcacaactgaattgacattttctttgttttatgagaaaccttatgttgcgcatcagatggctggaaggattggtctgccgaaggctttctagtcccaaattcaatttagttacatagctggatttttaaatcaaattttcctcctctttcacagtaatttctgaaggagatgctgccaatcccccccgcgcctgcgaagcgcagcggctctaggtatacacttcacattgtttctttgcaggtcgcacagcattttaatctgcgcccgcaatgcacaatgcgcgcatgcttgtctgccagtggaagctccatgaacaaaagatagtaattatgccaataaatggtgaaagagcttttggatatttatccaattattttataaatataatgtgcttgaaagaattgtccattgctgaaaatatgaacaaaataggaagtttttttgctgctggaatttgttcatggactttctaggtgctctacttttctccccccaacaggtgctctgctgcgcacagcaaactgaagcgcattgctttggggataaagcgtctcctggacagataaccctcttcagaccaaacctctcctcctgacattctgttctgccatcttatcgtagggagatggtctatctaagataggttttaaaaaaaaatagatttgtcataattggaataggtttgtttttgtttttgtttttgtttttactgtaaatttaaatccccattaatatgccactaaagctgtaactcagagtgggtaatttctattcagaagcactcccctcccccagcaaagaggtatttctattagtaaagcatagtacacccctcttctttaggtctgcctgcagtagccagttaatataagttggtaatctgcagtgcacacccatttaaaaaaatggataccttccccaaactaatccatctccttttttttcttcccacagcgtttgctgccaattgatggggcaaatgatctcttttttcagccacctccactgactcctacctccaaagtttatactatcagaccttattttcctaaggatgaggtaattgtctctctacctaccaacttggtgtatgggtatggtgcacacttaaaacttaaccttttaactcactggttaaaggaatccttctgtcttaaaactgcaaactttagatggagaaagttcattaaaacattcagtgtatcttgagaaatttaaggagtttagacttttaacatcttgtgccaagttctttaatttctcccttgagaaagtcagatgaaatgtattcagagttggagttacaaaatagttaatgtgtctaaatgatgtgttgtccttagactaattatctctaatatattggtgttctgtaattttctttcaattgtgaagtatctacaggctgttgacaatcagctaaagaaaaaagcaagactgtttaaagacagtaacagggccaggcgcggtggctcacgtctgtaatcccagtactttgggaggccgaggtgggcaaatcacctgaggtcaggagttcaagaccagcctaggcaacatggtgaaaccctttctctattaaaaatacaaataggccgggcttggtggctcatgcctgtaatcccagcactttgggaggccgagacaggcggatcacgaggtcaggagatcgagaccatggtgaaaccttgtctctactaaaaatacaaaaaaaattagctgggtgcggtggtgggtgcctatagtcccagctactcgggaggctgaggccggacaatggcttgaacccgggaggcagagcttgcagtaagccgagatcatgccactgcactccagcctggggcgacagagcgagactccgtctcaaaaaaaaaaaaaaataataaataataaaaaataatactaaattagctgggcgtggtggcgggtgcctgtaatcccagctactctggaggctgaggccggagaattacttgagcctgagaggcggaggttgcagtgagccaagatcgtgccattgcactccagtctaggtgacagagactccgtctcaaaaaaaaaaaaaaattagatgagtatggtggcgtatgcctgtaatcccagcgaattgggaggctgaggcaggagaatcacttgaacccaggaggtggaggctgcagtgagccgagattgcaccactgcactccagcctggtgacagcaagactttgtctcaaaaaacaaaaaaaccatcctctgcaaaagccaattctcagtattcctaaaaccttgctgttttttgctggttttacaaatctgactcaatgaataaatctttattttacaaagaagaggtgatatttctgatagatgtttctgacaggccattttgttactccctccccagactgacttgtgagttatattgttagattctgctgccatttttcttgatgtgttgcttaactagattatattttcaggcatccgtgtacaagatttgcagagaaatgtatgacgatggagtgggtttaccctttcaaagtcagcctgatcttattggagacaagtatgtgataagtatttggatttgagagtagacctttcatagtgaggcttatcaggttgaggggaggtgatgactggaaatatatttatttattttaaatcccactttggctttagtaaaatctgaatatgtgtgcatttctagtttcttacaccaaatgtaggttccgtaagttcatgcaagtacagtgggtcttggatcactgaagtctgaattttatattagcaactgaaaagtttactgtggcctctttccttctgagcaggttagtaggagggctgctttccctcagcctggattactgctttgtcctagaagatgaagatggcatatgtggttatgccttgggcactgtagatgtgaccccctttattaaaaaatgtaaaatttcctggatccccttcatgcaggagaagtataccaagccaaatggtgacaaggaactctctgaggctgaggtaatacaaaggttaagaattatactatggtaatggtcttttttatttatttatttttattttttattaaagtacttactaaaatggaaaagtacatagatacatcataaaatcttagtgctttctaaattaattttcttgcagaaagaattcttatggcttattcttagcatgacatttttcactgtttccccaatattgggacagttttttatttgggagtactattgtaatatttcctcaggtgaaaacacaataaagacaaagaacatttttttcctctgttttaaagtttcatacttaaagatgttatggtcttggtcaggcacagtggctcgtgcctttaatcccagcactttggggggccaaggcgggtttttcccctgaagtcaggggttcaagaccagcccggccaacgtggtgaaactccatctctacttaaaaaacaaaaaaaaattagctgggtgtggtggcgggtgcctttaatcccacctactcagggggctgaggcaggagaattgcttgaacccaggggcggggggttccattgaccttaaatggcccccctgcactccagccggggcagcagagtgaaactctggctcaaaaaaaaaaaaaaaaaaaaaaaacaagatattatggtcgttttgttgagtactcaggacaatttaagtaatttaaatctatttggtggtttctcagaaggttaataacttgccttctgactaatgcattctacattgtgatttaaaaataagagctcttgagagtctactttgtgataggagcacttcttaataagtctgtcctgtcccaacttaaatacatttttcatctccaaaaaagttttatgccccatgttggccaacacattacgtgattattttggtttatacatcagtatatgttgttgttgttttgagacagtgtctcaccttgtcacccaggaatgcaatagcacaaacatggctcactgcagccttgacctcccaggctcaagttatcctcttgcatcagccctgcaagtagctgggactacaggtgcaagccactacgcatcagctaacttttttgtattttttttgtagagatggggtttcgccgtgttgcccaggctggtctcaaagtcctgagctcaagcagtccgcctgcctcggcctcccatactgctaggattacaagcacgagccactgtgcctggccagtatatgcattttttagatagttccttcttgaggatagtttttatgcacagtaaataagatatttggacccctacttgtgatacttttttcttttcttctatgttgtttctcttttccttttctaaaattctctacccctctccaccacaccaaagtattcatagtctttttatttatttatttatttttttgagacagagtcttgctcttgttgcccaggctggagtgcagtgacgcaatcttggctcaccgcaacctccacctctcaggctcaagcagttctcctgcttcagcctctcgagtagttgagatgacaggcatgtgccaccacgcccggataattttatatttttaatagagacggggtttctccatgttggtcaggctggtctcaaactcccgacctcaggtgatccgccctcctcagcctcccaaagtgctaggattataggcgtgcacaccgcgcctggcctcattttcttcatagtttatttctatattttaccttctgcccttagtcacatggctgtgtaacaagaggctggtttggtgttgcctcgcttacttgggattacactgacactatgctggtgattgagctgctgatgtattgctgttccacatctgacacttttcagcataagaactttttaaaaattgtggtaaaatataaataacataaaatttgcacattttcatgtaaggaatacgttaatttaaaatattttatgtattttaaatgattttagatttacagaaaagttgcagagttaaaacagagtttctgtatactccttatccattttctgtattggtgaagtctaagtaaccaacatgggtatattattaatcagacaccaaactttattcaccagttttttctgctaatgtccttttcctgttccaggatccaataccacatagcatttagacaaaatttttttttttttttttgagacggagtttccctctgtcgcctggggtggagtgcaatggtgcgatctcggctcactgcaacctccgcctcccaggttcaagtgattctcctgcctcagcctcccgagtagtcgggattacaggcgcccaccactaggcccagccaatttttgtatttttactagatacggggtttcacgatgttggccaggctggtctcaaactcctgaccttgtgattcacctgtctcggcctcccaaagttctgggattacaagtgtgagtgagccaccacgcctggccagaaaacttttttttttttttttttttttccccgcccaggctggagtgcggtggcaggatctcagcctactgcaacctctgcctcccgggttcaagcaattctcctgcctcagcttcccgagttgctgggactacaggcgcacgcgccatgactggctaattttttatgtttttagtagagacagggttttactttgttgcccaggctggtcacaaactcctgagctcaggcagtctgcctgcctcagcctcctaaagtgctaggattacaggcgtgagctactagacccaacccaaacttttttttttttttttttttaagacagagtctcgctctgttgcccaggctggagtgcagtggcgccatctcagctcactgcaagctccgcctcctgggttcacgccattctcttgcctcagcctcccgagtagctgggactacaggtgcccgccaacacgacctaattttttgtatttttttttagtagagacagggtttcactgtgtcagccaggatggtcttgatctctggcccaagcttttaaaagtgaaaacggtggccaggcacggcagcacacacttgtaattctagcacttcaggaggccgagatagaaggatcactcgagcccaggaattcgagaccagccctgacgatataaatagggaaagagagagagagagagagagagcgcgtgcacgcgagggagaatgcctgcccctctccagcctggccaacagaaggagatcctgtctcaaagaaagtgaaaatgcttcagctagaattataggataatcctgtgtgagataatttacatagtgactggaagagttattaaatattgctttcttgttgctaagttctgtagttgggttagatatctaatgcgtaactattgtgaaagtcaagagattctaatttttccagaaaataatgttgagtttccatgaagaacaggaagtactgccagaaactttccttgctaatttcccttctctgataaagatggacattcacaaaaaagtaactgacccaagtgtggccaaaagcatgatggcttgcctcctgtcttcactgaaggctaatggtgagtacatatttgtggagttggtggtatttgggcaagatagggaaagaactatatatttttggatataaaaggaaagaagtgaattgtaaatttatactgcttttcccaccttttatgatttggtttctgaattaattagtggtgaagaatcgcatgtgtattaataattgagaaatgctggttgggcttagtggctcatgcttgtaatcctagcacttcgggaggccgaagtgggaggatcacttgagtccaggagtttgagaccagcctgagcaatatggctgagaccccatctctacctaatttaaaaaaaaaaaaaaaaaaggccgggcacggtggctcacgcagcactttgggaggccgaagtgggcggatcatgaggtcaagagatcgagaccagcctggccaacatggtgaaaccctgtctctactaagagtggtggcaggcgcctgtaatcccagctactcgggaggctgaggcaggagacttgcttgaagccgggaggcggaggttgcagtgagccgtgatcttgccactggactccaacagagcaagattctgtctcgggtgcgggggaagctgggtgcagtggctcacgccactcattattgaattttttgaatatgaatttttttaattgtgtgaaatgtaggagctggtgtagacagacaagccctgtttatattaaccatctcgaagattatagttttatatctataattatactaattaagtgacttatttatgttttgaatatttgttttatttctaggctcccggggagctttctgtgaagtgagaccagatgataaaagaattctggaattttacagcaagttaggatgttttgaaattgcaaaaatggaaggatttccaaaggatgtggttatacttggtcggagcctgtgacatttgttgacactgtgaactgtccaaaagtctcttaactgcaccttgtgaatggtagttgaggtcttcatacagttcagcctctagaatggtaacaaatcagccaattggattcgaaacaaagaagactatgtaaaactcacccatcacactttgagactactcactggttggaagaatatagtattgcagcaaatcctgtatgaaagagagatgtgggcttc

SEQ ID NO: 8605 - DNA, 32169 bp, Homo sapiens
tatttattggcttgagtgcagggagattttagaaaaagaatctggtttttgttatcaaagatcttggagtggggatgagagagtgctgggaaatttcggagctagactggaatgagtctaaggaaacttgccagtccattataccttcagttataaaaggagaaaactcatttggtttaaattcgtttgtttagaatagcattaaaaggcgattcttcctatttaaagaacagagttgtctgccattctctcgtttattcctcctccctcccgtgcccttgtatattttcttagtgactgagcacctgagccagcactgattttttgtgtgttttgttgtttttgttttgggagacggagtctcgctctgtcgcccaggctggagtgcagtggcgtgatcgcggctcactgcaacctccgcctcccgggttcgagcaattctcctccctcaccctcccaagtagctgggactgcagacacgggcccggctaattttttgtattttagtagaaacgggtttcaccgtgttgcccaggcaggtttccacctacggagctcaggcagtccgcccgcctcggtcttccaaagtgctaagattacaggcgtgaactaccgcgcctggctttttttttttttttttttttttttttctctctttttgatacctcttggttggcaccagccgtaaaatgaatgagcatagaaatactatagttactgctaggatttcttttttgttttctttccatcacaaaactctcttggtttttaacttacattaacagcattgcttcctctttgtggtgccagtcaaccgaaaccatgaacctgactctcaaaagagccaaggtagggtttctaaagattaaaatgtttaattaagctagacatttgaaaagtctttttttatattggagcaactctgaaaggatgtttaatgcctactccttaaaaaaaaaatgataatgctaagtgccgtagggatgctaaagacttgtataggtctgcctgatcaagaatattttatattggccgggcgcggtggctcacgcctgtaatcccagcactttgggaggccgaggcgggcggatcacgaggtcaggagatcgatactagcctggccaacatggcgaaaccctgtctctactaaaaatagaaaaaattagccgggcgtggtggcgggctcctgtaatcccaactactcgggaggctgagacaggagaatcgcttgaacccgggagttggaggcgtagattgcattgagccgagatagtgccactgcactccagcctgggcgacagagtgagattccgcctgagaaaaaaaaaaaagaatattttgtatcacttgtgagaggctaacattagattgtccagatgaaagtgctacagttatacattggtatgtaatgaattttaatttggtctgtcattgtcctttttgtggtgcagaggagtcattctgcctagagattggagctaaaatacattgcagaaatttgttttagactagtctcttatgtagattgtgtgggtttatgtagaacattttgtgttcagaatgcttttattaaccttcttcatggtactcttgagaggctgtccttatctcttactgatgattagactgagacaagtggaaagtaaaggttagacaagatgtaaagtgtgtggtttgagctgtgatgagcacactagggagttccagataccagtttgatgcttattcaaccatttaggttatcggtctgcgagtttgttttctgcagtgtgtgcataactagtgttttgtcctcttagaggatactctggggacattcttgagttttctttgtttattcctttccgtttaaggaccagaagtaatattcttgaattttcatttgttcagatctttgctctgtaattaagattgcgtgagagtttgttgtttgggccagttaggctgttgaatttcttgggaatgtggtttcaggcattttttggtccctttgattatatcattgtatgtggaactttttttgagagagagagttttgctctgtcacctaggctggaatgcaatggcgcggatcttggctcaccgcagcctccgcctcctggattcaagcagttctcctgccctagcctcccaagtaactggaattccagtcctggccaggaactttttttaaaaaagaggagcacgatcataaaattaagtcagattctttcctaatcctatctctgatttgtttttaattgctttacctgtttatctcccctcacccttttgttgttgttgtttgagatggagtcttgctctgtagcccaggctgtagtgcagtgacgcagtctcggctcactgcaagtccgtctcccaggttcaagtgattgttgtttctcagcctcccaaatagctgggattacaggcatttgccaccatacctggctaatttttgtatttttagtagagacatggtttcaccatgttggccaggctgggtctggaactcctgacctcaagtgatctacctgcctcagcctcccaaagtgctgggattacaggcgtgggtcacctcacccggcctcccctcaccctttctaaagcagttttactatcattctaggaagtaattgttactgttggcagcttgtattacattgctgccgttccccattataagattgagatctcttaaaaaattggaattaaatatatttggactttatcaacagtggaaagatgatagatgtttgttttaaaataactatcacctaagtaactaatgtcatggtagaaaaaataaaaaaaattacctaagcaaaaatggaataaaagtcaccttgtaacgtcaccacccaaagattaaaggaaccttagtattttattaaatatccttccgatttggtgtattttatgctttttacaaaataggattgtattatatgttttgtaacttgcttttctcaataaagcttaccacattttaaaactgaatataatttcattcttactttgaatctaggattttatggaagaccttgggttatggaacagagaaaagaactctttagaaggtaaatcttcattatatgaaggagagaggagaaccttaaactcttaacattttcttttgtttgaagaaatactaacagtgaatagcccaggtgcattttgatggtttctcaattgcagaagttattttaccttggtcccttttttcttcacctaggcctttgattttcaaacttttcctggggagctgaataagttttgggcttcaccttacccagagctgttgtgttttttaagagtgttttgtatgttggcatacattgtaatacttaatttttttaaattccactgattacaaaaaggttaaaagctactgtcatagaatattagctttgtatgagatggagatgctccaagaagagggaaatggagattgacagcctatgaatgttgcctgtttatacatatgtaattttctttctccttaaggctccagaaatgggaattaaatacatacttgtatgccccaaaagatgactacaaacataggatgttttggcgagagatgtattcagtggaggaagctggtaatctttttctttttatccataaattcaaaatctgtgaagaaaacggttatattttaaatgtagttgtacaagaattttatgacattttatttttattttgtaggtagtttccttttcttctatctggtaactattcagttagctgagattgaaagagtgctctgcgctagcaaggtcatgaccatatgtgtgatatcatgggcgtgctaggctgactccatctgttctgtggtcatagattgtgctgcttacttctgccagtggattaaacagtgggccactgggcaaagaagtgctggagctgggctaggcccagggcaaggcaagtgaggcacgtaccttgggtgcaaattttaagggacccccaaaaagtaatcaacataaataatattttatgcaatttttttaaaaaaccaaaattaatgcagaaattcatgatgtacacaatgctaaaattttaggtaaagacaggatcagcactactgattgttccttttgcttcaggctctagtatggcttggccttgtcagcagttactggtccttaaaccctagtccaggaaagtgggaagccattaataggctgtctttgggttttgttttgttttgttttgttttttgagacagagtcttgctctgtcccccaggctggagtgcagtggtgcgatctcggctaactgcaaacctcgccctcccgagttcaagagattctgctgcctcagcctcccaaagtgctgggattacaggcttgagctcctgtgcccggccggcctgctatgggtatacttaacgttgagttggttacataaaattgataaaaagtagtatagcattgaaccgccaaattagagaggtgcttttctttgggaacttgtaaatggtgaaacatttttgtacttgaaattaaatggtatacgcatatagctaacaagatatttggttacagagcccagccaaggcacagaaggctgaaagttttcttgaattacaaagaagcaattacagcttaccccatctccatctagtgttgtggtttactactctatttaagtgtgccttcaacttaattactttctggtggtgctggtaatgaaacttaatgtgatcaataatcaaaatagagtaaaaatgactatcttgagatactactgaaaattattcaaaaatatgtcttatagtatatactagtagtagttaagttgatttaggaaaattgtcaattgataattttaaaaggttaaaatctataattaatgtttttcccatagatagaaacaggtcaagattgttaaggccatgacttaactctggttctttttctttttctttttttggagacagcgtttgtcactttgttacccaggctggagtgcagtgactcactgcaattttgatctccccggctcaagcaatcctcccgcctcagtcccccaagtagctgggactacaagcgcgggtcaccacacccagctaatttttgtatattttgtagagagaggggtttgccatgttgcctgtgctggtctcaaactcctgaactcaagcagtcaacttgccgtggcctctcaaagtgctgggattacaggtgtgattcattttttttttttttttttttttttttcattttttttcattttttgagatggagtcttgctgtgtcgtccagactggggtgcagtggtgcgatcttggctcactgcaacctctgcctccagggttcaagcaattctcctgcctcagcctccctagtagttgggattacaagtatgcgccaccacgcctggctaatttttgtatttttagtagagatggggtttcacaatgttgaccaggctggtctcaaactcctgacctcaggcagtcctcctgcctggcctcccaaagtcctggggttacaggcatgagccattgggcctggcctaccctgattcttaagaaagcattttctttctttcatattataaagtagttatgtgtaggtttatttagttaggaattccagctgttcagagatggcaaaacaaaaaaaaaaagcaagatccagtaccatggctcatgcctgcaatcccaacactgtaagaggctaaggcaggcggatcacttgaggccaggagttcgagaccagcctgggcaatatggcaaaaccctcatctctactaaacaaaaattagccgggtatgcctgtaatcccacctactcaggaggtggaggttgcagtgagtcaggatcgtgccactgcactccagccttgggcaacagagcaaggctctcaaaataaaaaagcagcggctgcattttatgcctttcaaatgctgcaggaaatagaaatggcttaagttcagtaagagaattgacaattcagtgtttttgagaagtggcaatgaaagggaggaaaatgtttattgattttagcctgtttccccaaaaggataagaaactatttggaagtgaaaaagaagggcctcttattttctgttggttcagatttcaaaggtgtgaaaactattctttttcccttactgtgacattaaatcacttcaggcttgtaccattttgtatggcctgttgttaagttggacatgacaatttgtaaaatgtgaggatcttttcctttcttgtaagttagaagaaataacctcttcagttaaaccttcagtgaaggttcttttagttttctgttctgctttctaaaaacatagactctgttctttagagcaacttatgactctcatctctgctgcacgagaatatgagatagagttcatctatgcgatctcacctggattggatatcactttttctaaccccaaggaagtatccacattgaaacgtaaattggaccaggtaactccttactttttattcatttttcctgactatgtacttgaaactagaagtttactcagttgcttttacgatgttaaaaggaaatcaaattcctatttctttgttttctttttttgtttgtttgttttgttttttgagacagagtcttgctctgtcgcccagactggagtgcagtggcacaatctcggctcactgcaacctcctccgcctcccgggttcaagtgattctcctgcctcagcttcccgagtagctgggactataggtgcgtgccatcatgcctggctaatttttgtatttttagtagagacagggccttcaccatgccagccaggctggtctcgaactgctcacctcatgatcttcccaaagtgctgggattacaggtgtgagtcaccatgcctggttttttatttctttgtttctataagaattttttttactttgaatgctttttttttctttttttttttttttgagacagagtcttgccctgttgcctggagtgcagtggcccaatctcggctcactgcaacctccacctcccaagttcaagcgattctcatgcctcagcctcctgagtagctgttacaggcacaccaccatgcctggctaatttttatatttttagtagagacagggttttgccacgttggccaggctggtctcgaactcctgactttaggtgattcacccacttcagcctcccagagtgccgggattacagtcgtgcgccagtgcacccagccttgaatccttctgatagaggaatattttccaaattaagtaaaaagagctttactggaggtactagttcttctcaaatttcagtttgcataagaactgccttaaaagaatgattagaagtgaagcttggaagaatgctgactgctggactttatttcccaaatggataaggtggggaccgggaatctaggtgattggtggtcaagaaccacattttgagaaattatatataccctaggctgcttggcttgaatttacacctgagattacagaaacagggttttacctattagacattagtttcttcaattatatggacgaagagatgtctggaaatggctagtttcccaagatgagaagaaaaacagactaggtgaacctaattgagtgtaaagtctgcttaatgtaaaagctgcagacttcctttggtccaatgtagggggcttccattttcctttttttttttgaaactgagtcttgctctgtcgcccaggctggagtgcagtggcgcgatctcagctcattgcaacctctacctcctgggttcaagcaattctctggcctcagcctcctgagtaacggggattacaggcatgtgctaccacacctggctaatttttttgtatttttagtagagatggggtttcaccatgtttgccaggctggtctcgaactcctaacctcatggtttgcccgcctcggcctcccaaagtgctgggattacaagtgtgagccactgcgcccggccccatttttctgttattttagtttgctggtttttctatatacatgtcttatttctttaggcaaagatttatatgggtggcattaaaatgtctggtaaaaaatttaaggcagttgaaattttcatgaatgaagttattttactatttgataaaattctattctttctgattcatacctggttaggtttatctgcaaagggatcagtgtgccttttgggactaggacacagcctggctttttcatgtcttaaggttacttactcatgtttctgtatttttctgactttgttgggtcttctacaatcagcagcagcccatgaggactaggaggctaggccactttgttggatcatattgtcatataagttgagtatccctaattcagaaatctgaaatgttccaaaatatgaaactctttgagctccataaaattcaaaggaaatgctcattggagcatttcagattttggattttcaggttagggatgctgaatataatacagatattccaaaatccaggaaaaaacaaaaatgaaaatccaaaacatttttggtcccaagcatttcagataaggaatactcagcctgtagtgcattcaaacccaaatgagaaatgggtcccaaaactgtttaacttacgattttttaattgaaaatgtaaaaacaataaatctgtctttgaacattctagtaaggaaaatactggattttaagtataactgttaacgctgtaatgtttggaattcttaatttttttactcttgattcttttttttttttttctcctaggtttctcagtttgggtgcagatcatttgctttgctttttgatgatatagaccataatatgtgtgcagcagacaaagaggtattcagttcttttgctcatgcccaagtctccatcacaaatgaaatctatcagtacctaggagagccagaaactttcctcttctgtcccacaggtattgtatataatggctttacatttaactagtcttcttggaatatataacttataaaggaccatgggccccattctctctccacttccctcctcctttggtgtgtaaaagtaggaatctttttttagaagacatttttcaagatcctaaattggagaaattttaggaactaataaatgacaactgactaggcaaaagatttttatgtatttttaagtactggaagtatatgaacattacattgtcaatattaaaagagggatagtattgaaatgaaaactggagaaaaaccaaattacattgcttttaccttagtcacttctcatttcctcctacttgtcccctttttctgcccatgcatatctgtccctttttgcactcctcccactcccatctgggctcttatttcaagtagtcagcatagaaagcttaacagtttttcccgttttcctttctttttgcccctctggtttctttcattgaaaatattttagtctcttagttgcttctcaaaattcaacttacaggaagttttccccacacttccttgttcaggaagaattttagattaaattatttaactttctttgtgtgtattgtgagccgagaaccttattttagttgagtactacattagtacccagaagttttaagattatactgggaattaattagctgcaagttacagtttaagttgcagttgagtactaatagccattggtatatgcctttaaaaaaattttttttaaattttacttttaagtttgtattatttatttagagaccgggctataaaactggctaatttttatatttttggtagagacggggtttcgccatattgcccaggctagtgtcgaactcttgggctcaagtgatccacccgcttcagcctcccaaaatgctgggattgcaggtgtgagccactgtgcccagctgccattggcatattcttgtattagttctattatgatattatcaattcattctgtttggcgtttaattgtaactgagaaaagtaggcaattcagaattctgtagaaaatgctgcagttcttgtttttttagtaaacttgtatttctagtaactgtagtatcgtaagaattgatctgtactactgttggaggaaaaataccagattttatgaatttcttaaatgaactgcccactttagttccttgtaggaggccttttatcatttagatgaaaataatttagaattggcagacattttttccacattcaaaaacccatgggccttttgggaggccaaggcgggcggattgcctgagctcaggagtttgcgaccaacctgggcagcatggtgaaaccccatctctactaaaatacaaaaaaaaattagccgggcgtggcggcgtgcgcctgtagtcccagctgcttgggaggctgaggcaggagaattgcttgagcccaggaggcagaggttgcagtgagccgagatcgtgccactgcactctagcctgggcatcaagagtgagactccgtctcaaagaaaacaaacaaacaaagagaaaacccatgagcattttaattctgacttttttacttttctccctacatttagaatactgtggcactttctgttatccaaatgtgtctcagtctccatatttaaggactgtgggtgaaaagcttctacctggaattgaagtgctttggacaggtaagtcttttaagatttatacagtcaaagttgaattaagtaggacttgcagaaattgcttgttcttgttaattgaatacttttttttttgagacggagtctcactctgtcgcccaggatggagtccagtggcatgatctcggctcactgcacgctccgcctcccaggttcacaccattctcctgcctcagcctcccgagtagctgggactacaggcacccgccaccacgcctggctaattttttgtatttttagtagagacagggtttcaccatgttagccaggatggtctcgatctcctgacctcgtgatccacccgccttggcctcccaaagtgctgggattacaggcgtgagccaccacgcctggccttttttttttttttttttgagacagagcattgctcttgttgcccaggctggagtgcagtggcacaatctcagctccctgcaaactctgcctcccgggttcaagcaattctcctgactcagcctcccaagtagctgggattacaggcacacgccaccacacccagctaatttttgtatttctagtagagacggggtttctccatgttagccaggctggtctcaaactcccgacctcaggtgatctgcccacttcggcctcccaaagtgctgggattacacatgtgacccactgcacctggcccagagaacttgttaaaatacgctttcttttacaaagtttacatattctcttaatatgaaaaaacatctatcatggttggggagcctgagtggggagcctgaggtggaagcccccaggagttcaagaccagcttagacaacatagagagactgtagaaaaaataaaaaacttagccaggtgggctggtgcacacctgtagtcccagctacttagggggctgaggtggaaggatcacttgagcccgggaggtagaggctgcagtgagctgtgatcatgccactgcactccagcctgagcaacagaatgagaccctgtctcaaaaaaaattcagttaataaataataaagatttatagggaattgggctaaaaggtattgatcccatccttaagcagcgttaggaaactcttctattttataaaacgaaaaaaataaagctcagtaaaagacatgttgtgttttcaaaagaaaaattgtggctgggtgcattggttcgtgcctgtaatcccagtgctgtgggaggcttgagttgaggtaggaggatcgcttgaggccaggagtttaagattagcctgggcaacatagcaagcccttatctgtacaaaaaaattttaaattactgtgacatggtggggcacacctgtagtcccagctacttgggaggctgaggtgagaggattgcttgagctcaggagctcaaggctgcagtgagccatgattactccattgcacttcagcctgggtaacagaggagaccctgtctcagaaaaagaaacgttgttataaaatgtacatgtaaggggccaggcgcagtggctcacgcctgtaatcccagcactttgggaggccgaggcaggcggatcacagggtgaggagatcgagaccatcctggctaacacagtgaaaccccatctctactaaaaaatacaaaaaattagccaggcgtggtggagggcgcctgtagtcccagctactcaggaggctgaagcaggagaatggtgtgaatccaggaggcggagcttacagtgagccgagatcacaccactgtactccagcctgggcgacacagcgagactctgtctcaaaaaaaaaaaaaaaaaagtacacgtaaggaaaacaataaaaagttatatatgcagtatattttaaagaaccatgattcttttttttaaatatattttttaatttaaaataaaaagatagggtctcgctgtgttgcccaggctggtccgaactcctgggctcaaatgatctgcccacctctgcctcccagagtgctgggattacagttatgagccaatgcgtctagccaagaaccatgattcttttaacgaacggttgtcgttatttctaggtcccaaagttgtttctaaagaaattccagtagagtccatcgaagaggtttctaagattattaagagagctccagtaatctgggataacattcatgctaatgattatgatcagaagagactgtttctgggcccgtacaaaggaagatccacagaactcatcccacggttaaaaggagtcctcactaatccaaattgtgaatttgaagccaactacgttgctatccacacccttgccacctggtacaaatcaaacatgaatggagtgagaaaagatgtagtgatgagtaagtagcctgtacttgatctttcaccttgggaggagagctggggttaactagagccagtggaaagtatgcattcctttgtcatcacaacttaaacagttttatttatttttttaaaaacgtattttgttttactaaggaggaaacaaaaccaagtggttttattatggtatgttgtttcattctgttgatgaagatgtatatgatagaagaaaggttgagtgtctttggacaagtcacttaacctctttgccttagtttttttttttttgttttttttttttttagtatgattcagaagcagcgtggtggctcgcttataatcccaggaaatgcactccagcctggacaacagatgaaaatcctatgaaataaataaaaataaaatatggttcagtctttgaagtctgagtactagaggagacagtcttttaagtgtttccattatctctagaatcattcggataaaatgtattttcaggcaattttattgaaaaggatattttagataactagatactcttgagtcacttagatcatttagattcagcttacatttatcttttatggaacatactctttttttttttttttgagatggagttttgctccatcgcccaggctggagtgcagtggcgcaatctcagctcgctgcaacctctgcttcccaggttcaagcgattctccagcctcagcctcccgagtagctgggattgcaggcacacccggcttttttttttttttttttttttttttaaagtagagacagggtttcaccatcttggccagactggtctcgaactcctgaccttaggtgatccacctgcctcggcctcccagagtgctgggattacaggcatgagccaccctgcctggccgaatggaatacagtcttattttagacattggcttactaatttttaatttatgaaaaatctctaattaatagagttctaagtaaggtgcttgataattatttacatttaaataatctgtcatggggcagatgcatgttcatgggcactgagggggcaaagaataaagtagttttttttttttctttttgagatggagtcttgctcttgttgcccaggctggagtgcagtggcgcaatctcagctccctgcaacctccgcctcccaggttcaagtgattctcctgtctcagcctcccgagtagctgggattacaggcatgcgccaccatgcctggctaattttgtatttttagtagagacggggtttctccatgtcaggctggtcttgaactcctgacctcaggtgatccgccctcctgggcttcccaaagtgctgggattacaggcgtgagccatcgcgcccagccattcctacttttgagaaacagtctagtgttgggtaaggcttataggcaattgtactatagtgtgataagtgttgtaatagtttaatttataaagtgctgtgtgaacacgggagagagtgattatttttgctaagagatttcacagacttttaagctggatcaaagtatgaggagagtttgctgggcgttaaaggtttgtgggctggaggttaaaaacactgaacactgaaaatttttttttttctttgagacagagcctcgctctgttgcccaggctggagtgcagtggcgcgatcttggctcattgcaacctctgcctccctggttcaagcgagtctctggcctcagcctcctgagtagctgggattactggcgcacaccaccccatctggctgatttttatagttttagtagagacagggtttcaccatgttggtcaggctggtctcgaactcctgacctggtgatctgcctgcctctgcctcccagagttctgggattacaggcgtgagccactgtgcccagcctgaacactgaacttttgaagttccctgaattttggcccattttggctactgaagtgtcatgatagtatgtagtaatattaatagttgtcatctgtttctcaattccatacctctgctttgaattgtttattgaattaatgtctcccttttgtttggctcagtcattgtcatcctcctcccctcaataaaaaacaaattgggaatataatttaaatgctgtcagcgtacatggcacttaactcctacatcttttaaggcacagcaaggaacatactaagggtggcagacactatccaaacctgggacatacgtaggaaatattaaggaaagctaagaatagagagtttttaagtacaaaatcaaaaaattcagacttaattttctctaccactatcctggctcagagctttgttgccttatgtgtgctaatttgtgggtctctgtcgattatctcttttttttttttttttctgagacggagtcttgctcttgttgctcaggctggagtgcaatggcccgatctcagctcactgcaacctttgacacctgggttcaagcagttctcctgcctcagcctcccgagtagctgggattacaggtgcctgccaccacgtctggctaattttttgtatttttagtagagatggggttttaccatgttggccaggctagtctcaaactgcagacctcaggtgatttgcccgcctcagcctcccaaagtgctgagattacaggcatgagccaccatgcctggcctcttctttttccctcagcgcctttattaatgaagttacagtcggttgtagtggctcacgcttgtaatctcagcactttgggaggcccaggtgggcagatcacaaggtcgagttcgagaccagtctggccaacatggtgaaaccccatcttcacgaataatagaaaaattagctgggcatggtggcatgcgcctgtagtcccagctactggggaggctcaggtgggagaattgcttgaacctgtgaggcggaggttgtagtgagccaagatcctgccactgcactccagcctgggtgatggggtgagactccatctcaaaaaaaaaaaaaaaaaaaaagaagttacaaggccctgaaggctatgcaatgttttcttcatacgaaaagcatggtacttttgaccttgacttcccaacaattagtactcagtagacggttaagattgactcttccactgatactaaaatttatatttcttatttcaattgagattttacatttaacattacgtttaggttactatcctatatgaagtggtttggtgaagggtcttgcttttatttgaatttttatgtttaaggtttgttctcattctgttctttgtttctgtggttatactgtgaaaactagttgcatttattcttctcacttgtcagaaggcttttgtaatcaaaactatttttgtgcttttttattttattttttgcagctgacagtgaagatagtactgtgtccatccagataaaattagaaaatgaaggcagtgatgaagatattgaaactgatgtactctatagtccacagatggctctaaagctagcattaacagaatggttgcaagagtttggtgtgcctcatcaatacagcagtgagtttggccattctttgttaagggggttagatcacatagttgagtcacaaagtaaagaacactgtctcccgggtgtggtggctcacacctgtaatctcagcactttgggaggccgaggcaggcggatcacctgaggtcaggagttcgagaccagcctggccaacatagtgaaaccttgtccctactaaaaatacaaagattagccgggcgtggtggcatgcgcctgtcgtcccacctacttgggaggctgaggcaggacagtcgcctcaacctgggaggcagaggttgcagtgagccaagattgagccactgtactccagcctgggtgacagagcgagactctgtctcaaaaaaaagaacactgtcatgtgccttaccttatgcccactaagcaaagtgaaattaaatgaaattgggggatctagagaataaggatttttaaatcttacttttggtcttaaatattagcttttattttgatggaatgctaatttctcttaaaaacatattttttgaagtaatttaagggtttttagacacaaattttcaaaagagaatgtaatagtagatgttggcatgtttacctcccaacgcccttccattcctgcatccctagtagtatagagaaatctcatttttcttagaggtcaaattaatttggatctaaaattgaggttccacttaacaaatatgataaagcatctttctgaatctaatgtgttctatctctaattctgattatctgtgtgaccattttatttatacatttatttatttttgtaggtaggcaagttgcacacagtggagctaaagcaagtgtagttgatgggactcctttagttgcagcaccctctttaaatgccacaaccgtagtaacaacagtttatcaggagcccattatgagccagggagcagccttgagtggtgagcctactactctgaccaaggaagaagaaaagaaacagcctgatgaagaacccatggacatggtggtggaaaaacaagaagaaacggaccacaagaatgacaatcaaatactgagtgaaattgttgaagcgaaaatggcagaggaattgaaaccaatggacactgataaagagagcatagctgaatcaaaatccccagagatgtccatgcaagaagattgtattagtgacattgcccccatgcaaactgatgaacagacaaacaaggagcagtttgtgccaggtccaaatgaaaagcctttgtacactgcggaaccagtgaccctggaggatttgcagttacttgctgatctattctaccttccttacgagcatggacccaaaggagcacagatgttacgggaatttcaatggcttcgagcaaatagtagtgttgtcagtgtcaattgcaaaggaaaagactctgaaaaagtgagtatgtttaatgtacctgctgctgaagcctgggtggttccccatactggtaatgtggaaaaggttcttaaatgagtacactgtaactgacagaaaattgaccatgttttagaatatgttctttaggccggttatgatggctcatgcctgtagtcccagaactttgggaggcagaggcgggcagatcacctgaggtcaggagtttgagatcagcctggccaacatggtgaaaccccatctgtactaaaaatacaaaaattagccgggcatggtgacgggcacctgtaatcccagctactcaggaggctgaggcaggagaatcgcttgaagaacccgggaggcggagtttgcagtgagctgagatcgtgccattgtactccagcctgggtgacgagagggaaactgtctcaaaaaaaaaaaaaaaaaaaaagtatgttctttacagtggatgtggactctactaaatctggtaccttcagtttcatagtttgcccttctagttaagaatgaggaaaggtcattattttaggaatatttgtcagtttggggagacacaaaatgatactttaatggttaagataaattgccagtacctgacaacataagcagcttaatgtgtaactgtgtctcagattattttgttaagcttacagttttttgagtctttttattgatcttcaatagattgaagaatggcggtcacgagcagccaagtttgaagagatgtgtggactagtgatgggaatgttcactcggctctccaattgtgccaacaggacaattctttatgacatgtactcctatgtttgggatatcaagagtataatgtctatggtgaagtcttttgtacagtggttaggtaggtgcaccaggaataatctcttctcctcaaatatattgtccctttaaaaaaaattatcccacagggagaaaaacatttagggaattggcacatttccaagtctcttcaattcgttgcctaggtttctttcaaaaataggcattattgaagacttgagatgcaagtcttagtaaatacatcaagcacattaatttttctcccttgggctaattcagcataagtatcttaaaagtatgttagaaagtactgactttaacttgctctgactgaatgctttctggatggaaccctgtataccacttttatctgatttggagatgagacactatgaaatgtgactccacaagctttctgctgcttgctgtgtcttgataacattaatgctatgtttaacagaacaattgctgaaatgacctaaagggcctggcaagaggaagccatcctcccagccctgtgcgcatgcgagctttagtgtaaggctattctggtgctattcagtattatttcacgtggctttttctttatccttctaccaagtattggttttaccaggggatagaaattgtaatcccctaaacatctctgctacattaaatggacttttgtatgtctcctttgaacactgattttttttttttaaattgtcaaacttggtaaaaagcaccagcatggccaagtttctctagggacttcatttcattttcaggttttcaatccagctataaggaatatgtaatggacttatatacagcacacagcaggcagcaaggctgactgacatgtcatagttttcatagtagtcacaaatactatgatgggtttcatggtcttggttgtgaaatagatatctgaaacaccgtgagcttagaataaaaagtagtagtgagattttccactttctgcctgtatacctttgagctcttaaatatttaaaaaaaaaaaaaaaaagtttccctgtgatacaactaattagctactaaaagtagagtctcagattgttaatttgaaaatagataactttttttggattgctgtaataacaggtagaagagagtattttgacctcatgttaaaaggctctgtatagcttcgggcgcggttgctcacccctgtaatcccagcgctcttggtggctgaggtgggtggatcacttgagatcaggagttcgagaccagcctggtgaaaaccagcatgagaccagcatggtgaaaccctatctctactaaaaaaatacaaaaattagccaggcgtggtggcgcatgcctgtaatcccagctacttgagaggctgaggcaggagaattgcttgaactcaggaggcagaggttgcagtgagctgagatcacaccattgcactccagcctgggcgatagagggagactccatctcaaaataaataaataaataaaggaaatactgaccgtgcgcagcggctcaaacctgtagtcccagcacttagggaggcctaggcgggcagaccacaaggtcaggagtttgagaccagcctggccaatatggtgaaaccccatttctactaaaaatacaaaaattagctgggcgtggtggcatgtgcttgtagtcccagctgcttgggaggctgaggcagaagaatcacttgaacccaggaggtggaggttgcagtgagccgagattgtgtcactgcactccagcctgggtgacagagcgagacttcatcttgtggggctggggggaggctctgtatagctcctgtacatgggagacatctacccttaggctcaagagacctcaatattggttgctggatgacaacatttgccttccaggtttctgctcaggttcttataattcattcttatagggatttaaacttaagtttctaaggcccttaggaattttgaacctgaaatctggattattgagcttgaaatgtattacagaaaacatttgatattcagtttttaatttaagaattattaaaagttaaattcttaatgatacacagtattgtttctttctcttctcagggtttatctctgcactgagcatttatggtggtagctttccaaaattatatagatacctcttacacaatctcaagctcttacagcaagcttgtccagcctgtggctcaacacaagtttgtaaactttcttaaaacattgtgagtttttttattttttattttttttaagctcatcaactatcattagtgtattttatgtgtggcccaagacagttcttccagtgtggcccagggaagccaaaagattggacaccccttgtaacatcttagaagttttaaataattatcttcatatccacatagctttacaaaagctcacgacagggagagtattttcttggttctgtagtaatttcagggggtttactgattggaacccttccttttcctcctctctccagtccagctggcattcagtcctttaaacaatgtggctatgcagtacttttgattactaatgacttctattatcttcttccccattgtgtacagatgggagaatcctcagcacaagtgtctactactattggatggacagcggcagatgttcacagcgcgtcatgattaattagtttaaattgcaaggttctatctgtgaggtagctcaggtagatttaagggcggtagacatgaactgaagtcacgtttgcgcagcgactgaggcattaaccatgttttcatttacacagctcttcgtacatgcagctttttattgtaatagttggaagtgctagttatgttgtagtctcaaagtagggggtaggggaaattggctgatcttaaagtttgagaggtatagtttttttcctgcagtgtaaattacactgagttacggaatgggacaggttctcgtatagtctaaattttgaccctgtttcatatttattttacaaatactacattttatgttttttaaaagtacccctacccttgaaaaatgacaaaccagatacaaactcttaatgggcctgaattgttaacaaaaaattggtttgctttgggactgtctgactagcacactatatttgtactgatgagactgttaacttgaacaggaggtagaatgctgtcttccaatggaaaagaactatattgcgctgctttatcttgtcagaagactaggcaagtgattttgatttggcctccaaacatttgcctttatgtcttactgttagctagcgttattgcctattaagttagttaactggtgaccttaaatagagacttctgtattccatgtgtatgttcagtgtattgcaaagattattataatggctggtcagaggaaccagatactgtcatacttttaagaaaagtatatttagctctgggcaaaataacatcaattggctctccttagttctcagaatctgtcagactggtattattagccaagtctgattttgaattgtttttgtccaaaaaaatttttctcattatgtttcattttgtcaacttaatttcttgtattttattctactgaccttagttttctgacaagattaatccttctcccccgcccttttcccttacctgtacccttcctcaaaatgtaaaatgtgacttcagacaggttgaattccttcatgggctgtgataataaagtgtctaattatcagtcattttagttaatagttactataattttatgacagagcaagcagctagcttgatttgtataatatctagggaatatataaagttgactcagacaaacttgggacttactttccttccagtaattaaagagtagaactgataatactgattattcattaattggaggaaggaacattagtattgaaatgccgttaacattttaaaaaataataattattatcatagccttgccctgaaaccctgattattgttagagagttatttccacgaagtgtttgtcagtttgttggacatttgagaccccaggaaatcccctttctcgtaacgttctccgcttggatctgatctcaacagggtgtcgtagtcattcttcagcacaattcttaattggagaccaagaaccctgggcctttagaggtggtctagcaggagagttccaggtatcaatatgaattcacaactgaattgacattttctttgttttatgagaaaccttatgttgcgcatcagatggctggaaggattggtctgccgaaggctttctagtcccaaattcaatttagttacatagctggatttttaaatcaaattttcctcctctttcacagtaatttctgaaggagatgctgccaatcccccccgcgcctgcgaagcgcagcggctctaggtatacacttcacattgtttctttgcaggtcgcacagcattttaatctgcgcccgcaatgcacaatgcgcgcatgcttgtctgccagtggaagctccatgaacaaaagatagtaattatgccaataaatggtgaaagagcttttggatatttatccaattattttataaatataatgtgcttgaaagaattgtccattgctgaaaatatgaacaaaataggaagtttttttgctgctggaatttgttcatggactttctaggtgctctacttttctccccccaacaggtgctctgctgcgcacagcaaactgaagcgcattgctttggggataaagcgtctcctggacagataaccctcttcagaccaaacctctcctcctgacattctgttctgccatcttatcgtagggagatggtctatctaagataggttttaaaaaaaaatagatttgtcataattggaataggtttgtttttgtttttgtttttgtttttactgtaaatttaaatccccattaatatgccactaaagctgtaactcagagtgggtaatttctattcagaagcactcccctcccccagcaaagaggtatttctattagtaaagcatagtacacccctcttctttaggtctgcctgcagtagccagttaatataagttggtaatctgcagtgcacacccatttaaaaaaatggataccttccccaaactaatccatctccttttttttcttcccacagcgtttgctgccaattgatggggcaaatgatctcttttttcagccacctccactgactcctacctccaaagtttatactatcagaccttattttcctaaggatgaggtaattgtctctctacctaccaacttggtgtatgggtatggtgcacacttaaaacttaaccttttaactcactggttaaaggaatccttctgtcttaaaactgcaaactttagatggagaaagttcattaaaacattcagtgtatcttgagaaatttaaggagtttagacttttaacatcttgtgccaagttctttaatttctcccttgagaaagtcagatgaaatgtattcagagttggagttacaaaatagttaatgtgtctaaatgatgtgttgtccttagactaattatctctaatatattggtgttctgtaattttctttcaattgtgaagtatctacaggctgttgacaatcagctaaagaaaaaagcaagactgtttaaagacagtaacagggccaggcgcggtggctcacgtctgtaatcccagtactttgggaggccgaggtgggcaaatcacctgaggtcaggagttcaagaccagcctaggcaacatggtgaaaccctttctctattaaaaatacaaataggccgggcttggtggctcatgcctgtaatcccagcactttgggaggccgagacaggcggatcacgaggtcaggagatcgagaccatggtgaaaccttgtctctactaaaaatacaaaaaaaattagctgggtgcggtggtgggtgcctatagtcccagctactcgggaggctgaggccggacaatggcttgaacccgggaggcagagcttgcagtaagccgagatcatgccactgcactccagcctggggcgacagagcgagactccgtctcaaaaaaaaaaaaaaataataaataataaaaaataatactaaattagctgggcgtggtggcgggtgcctgtaatcccagctactctggaggctgaggccggagaattacttgagcctgagaggcggaggttgcagtgagccaagatcgtgccattgcactccagtctaggtgacagagactccgtctcaaaaaaaaaaaaaaattagatgagtatggtggcgtatgcctgtaatcccagcgaattgggaggctgaggcaggagaatcacttgaacccaggaggtggaggctgcagtgagccgagattgcaccactgcactccagcctggtgacagcaagactttgtctcaaaaaacaaaaaaaccatcctctgcaaaagccaattctcagtattcctaaaaccttgctgttttttgctggttttacaaatctgactcaatgaataaatctttattttacaaagaagaggtgatatttctgatagatgtttctgacaggccattttgttactccctccccagactgacttgtgagttatattgttagattctgctgccatttttcttgatgtgttgcttaactagattatattttcaggcatccgtgtacaagatttgcagagaaatgtatgacgatggagtgggtttaccctttcaaagtcagcctgatcttattggagacaagtatgtgataagtatttggatttgagagtagacctttcatagtgaggcttatcaggttgaggggaggtgatgactggaaatatatttatttattttaaatcccactttggctttagtaaaatctgaatatgtgtgcatttctagtttcttacaccaaatgtaggttccgtaagttcatgcaagtacagtgggtcttggatcactgaagtctgaattttatattagcaactgaaaagtttactgtggcctctttccttctgagcaggttagtaggagggctgctttccctcagcctggattactgctttgtcctagaagatgaagatggcatatgtggttatgccttgggcactgtagatgtgaccccctttattaaaaaatgtaaaatttcctggatccccttcatgcaggagaagtataccaagccaaatggtgacaaggaactctctgaggctgaggtaatacaaaggttaagaattatactatggtaatggtcttttttatttatttatttttattttttattaaagtacttactaaaatggaaaagtacatagatacatcataaaatcttagtgctttctaaattaattttcttgcagaaagaattcttatggcttattcttagcatgacatttttcactgtttccccaatattgggacagttttttatttgggagtactattgtaatatttcctcaggtgaaaacacaataaagacaaagaacatttttttcctctgttttaaagtttcatacttaaagatgttatggtcttggtcaggcacagtggctcgtgcctgtaatcccagcactttgggaggccaaggcgggtgtatcacctgaagtcaggagttcaagaccagcccggccaacgtggtgaaactccatctctactaaaaatacaaaaaaaaattagctgggtgtggtggcgggtgcctgtaatgccagctactcaggaggctgaggcaggagaattgcttgaacccaggagcgggaggttgcagtgagctgagatggcgccactgcactccagccggggcagcagagtgaaactctgtctcaaaaaaaaaaaaaaaaaaaaaaaaacaagatattatggtcgttttgttgagtactcaggacaatttaagtaatttaaatctatttggtggtttctcagaaggttaataacttgccttctgactaatgcattctacattgtgatttaaaaataagagctcttgagagtctactttgtgataggagcacttcttaataagtctgtcctgtcccaacttaaatacatttttcatctccaaaaaagttttatgccccatgttggccaacacattacgtgattattttggtttatacatcagtatatgttgttgttgttttgagacagtgtctcaccttgtcacccaggaatgcaatagcacaaacatggctcactgcagccttgacctcccaggctcaagttatcctcttgcatcagccctgcaagtagctgggactacaggtgcaagccactacgcatcagctaacttttttgtattttttttgtagagatggggtttcgccgtgttgcccaggctggtctcaaagtcctgagctcaagcagtccgcctgcctcggcctcccatactgctaggattacaagcacgagccactgtgcctggccagtatatgcattttttagatagttccttcttgaggatagtttttatgcacagtaaataagatatttggacccctacttgtgatacttttttcttttcttctatgttgtttctcttttccttttctaaaattctctacccctctccaccacaccaaagtattcatagtctttttatttatttatttatttttttgagacagagtcttgctcttgttgcccaggctggagtgcagtgacgcaatcttggctcaccgcaacctccacctctcaggctcaagcagttctcctgcttcagcctctcgagtagttgagatgacaggcatgtgccaccacgcccggataattttatatttttaatagagacggggtttctccatgttggtcaggctggtctcaaactcccgacctcaggtgatccgccctcctcagcctcccaaagtgctaggattataggcgtgagccaccgcgcctggcctcattttcttcatagtttatttctatattttaccttctgcccttagtcacatggctgtgtaacaagaggctggtttggtgttgcctcgcttacttgggattacactgacactatgctggtgattgagctgctgatgtattgctgttccacatctgacacttttcagcataagaactttttaaaaattgtggtaaaatataaataacataaaatttgcacattttcatgtaaggaatacgttaatttaaaatattttatgtattttaaatgattttagatttacagaaaagttgcagagttaaaacagagtttctgtatactccttatccattttctgtattggtgaagtctaagtaaccaacatgggtatattattaatcagacaccaaactttattcaccagttttttctgctaatgtccttttcctgttccaggatccaataccacatagcatttagacaaaatttttttttttttttttgagacggagtttccctctgtcgcctggggtggagtgcaatggtgcgatctcggctcactgcaacctccgcctcccaggttcaagtgattctcctgcctcagcctcccgagtagtcgggattacaggcgcccaccactaggcccagccaatttttgtatttttactagatacggggtttcacgatgttggccaggctggtctcaaactcctgaccttgtgattcacctgtctcggcctcccaaagttctgggattacaagtgtgagtgagccaccacgcctggccagaaaacttttttttttttttttttttttccccgcccaggctggagtgcggtggcaggatctcagcctactgcaacctctgcctcccgggttcaagcaattctcctgcctcagcttcccgagttgctgggactacaggcgcacgccgccatgactggctaattttttatgtttttagtagagacagggttttactttgttgcccaggctggtcacaaactcctgagctcaggcagtctgcctgcctcagcctcctaaagtgctaggattacaggcgtgagctactagacccaacccaaacttttttttttttttttttttaagacagagtctcgctctgttgcccaggctggagtgcagtggcgccatctcagctcactgcaagctccgcctcctgggttcacgccattctcttgcctcagcctcccgagtagctgggactacaggtgcccgccaacacgacctaattttttgtatttttttttagtagagacagggtttcactgtgtcagccaggatggtcttgatctctggcccaagcttttaaaagtgaaaacggtggccaggcacggcagcacacacttgtaattctagcacttcaggaggccgagatagaaggatcactcgagcccaggaattcgagaccagccctgacgatataaatagggaaagagagagagagagagagagagcgcgtgcacgcgagggagaatgcctgcccctctccagcctggccaacagaaggagatcctgtctcaaagaaagtgaaaatgcttcagctagaattataggataatcctgtgtgagataatttacatagtgactggaagagttattaaatattgctttcttgttgctaagttctgtagttgggttagatatctaatgcgtaactattgtgaaagtcaagagattctaatttttccagaaaataatgttgagtttccatgaagaacaggaagtactgccagaaactttccttgctaatttcccttctctgataaagatggacattcacaaaaaagtaactgacccaagtgtggccaaaagcatgatggcttgcctcctgtcttcactgaaggctaatggtgagtacatatttgtggagttggtggtatttgggcaagatagggaaagaactatatatttttggatataaaaggaaagaagtgaattgtaaatttatactgcttttcccaccttttatgatttggtttctgaattaattagtggtgaagaatcgcatgtgtattaataattgagaaatgctggttgggcttagtggctcatgcttgtaatcctagcacttcgggaggccgaagtgggaggatcacttgagtccaggagtttgagaccagcctgagcaatatggctgagaccccatctctacctaatttaaaaaaaaaaaaaaaaaaggccgggcacggtggctcacgcagcactttgggaggccgaagtgggcggatcatgaggtcaagagatcgagaccagcctggccaacatggtgaaaccctgtctctactaagagtggtggcaggcgcctgtaatcccagctactcgggaggctgaggcaggagacttgcttgaagccgggaggcggaggttgcagtgagccgtgatcttgccactggactccaacagagcaagattctgtctcgggtgcgggggaagctgggtgcagtggctcacgccactcattattgaattttttgaatatgaatttttttaattgtgtgaaatgtaggagctggtgtagacagacaagccctgtttatattaaccatctcgaagattatagttttatatctataattatactaattaagtgacttatttatgttttgaatatttgttttatttctaggctcccggggagctttctgtgaagtgagaccagatgataaaagaattctggaattttacagcaagttaggatgttttgaaattgcaaaaatggaaggatttccaaaggatgtggttatacttggtcggagcctgtgacatttgttgacactgtgaactgtccaaaagtctcttaactgcaccttgtgaatggtagttgaggtcttcatacagttcagcctctagaatggtaacaaatcagccaattggattcgaaacaaagaagactatgtaaaactcacccatcacactttgagactactcactggttggaagaatatagtattgcagcaaatcctgtatgaaagagagatgtgggcttcctttttgagtcttgtgttaggtgctgagaccttttacatgggcttatacagggagagagtcttcaataaatgtagtcagcactattttctgcatccagtgtggttgcgtttctcacctgagagtaatcaagataacatctgtcatcttccttggtttattgagtgaaatgcctctcagtcttaggggacatggcagagatgaaagaaagaaagagtgggtttcagaagtgtcagggtggagtgattccaagtgggatggttgtggcattagtttaagctgaataaataatttcaatttggggcagttattctgctttttgtaaagccgtggccaattgtctcctgtaatgactgttggttcaggcatgttgtactttgtagggacaaatgtgcatttgtttgtggcaaaagcctacaattgacaaacttgtaaatttctttgtatataaactagctgtaacctgactatcctttgtgtttactgtttttgtaaatttttttcctctataaatgaaagggtgttggttcagaatggcactttgaataatgtaaaccagtgaaaagtggattttctttacttttgtctttgggtttggggttgtttttgttctttttgaagttttattatttttaaagtgcctcccacctaggcgtaggccatgaccatttggggtacgagagcctaattttgtaggacttaatctgttgaaaagtgcagttacttctggaaattaacctcaatattaggtcagcatgtgaaatgttggatttgacatgtcaggtagggttcagggactgattggtcccatttgccctcaggtcagttgtttaatctcaagacctgttactactgattttattaaatcagagtctttaattcttgcatgtttgtatctaatttctgaatgaatgagcacactttaaccagttatttacagttacctttttcctttaaccggattgtgaaagcttcatgtattttaatttagattctgtgtttttaagggttctgagcatgaagctggcagatagtcggcaggactcattttttcatcatggctggctgatttctccatagattgataacagtattttgttatcttgcttctctgtagttttgcatcagctgtttaactttgagctgagtgaggggagaggggtaaagagaaagaaacttaagttttctttcacagaactccaccattgtgggctttgagagagccctaaagcattgtacctagtggtacctagtgacttccaaccaaagcctttgagtatgcactaaataggtgagaagaaaggagagaaggtttttaggttagaaacctttaaccgatagaaggatatggtatgttgtaaagctggaaccaagtttgcatttttgagggcttgagatgaagggaagactcttaccagatagtaagacagctgagttttcctcagttttctcgtcttaacactagtggacaattctagcattttgtttggaggatttcagagttaacctcatggaattcaggattttttagcaagtttgcttttggttttatcttggcttttagtaatcatgttggctggtctggtcacaggtgactgtgaaacagatgccctggtcttgctttcatcactctaggatcatgaagtgctatgctatttcctggttatgaatattaaggttggaattacatttttattgattgtttggatcagagctcagttcctgtagaaaacgaactgtaaaagaccatgcaagaggcaaaataaaacttgaagtgaatgctt

SEQ ID NO: 8606 - DNA, 1300 bp, Homo sapiens
ccaatgaccggcaaggaagtgagttgctgatgccagtgggggccgtgtcacagaacattggttgctacaggctgtccagcatctacttactcaagggacagcactggacttccatctggagagccccctcccctcactctcagcacctgcttgctaggtgggcggacccatccccctggctcctgggagaacagaggactcaagcttggccgatgacagccctatgtccccagaccccagtgatcagtcagggaaaagcagaggacccacatgaacccaatcagagatcagaattttgcaggaactactgagtaaaagaacagacgtcacgtaagggtcagggctgctggtcttgtccttccccatcccacatctgagaaagaaaaacaaacagggtcctggtgaaagccagagccaagggctaagagaaccgtaccctgatcaagacagaatgctaaagagcaccgtgggaggatgaactcagagaaggggaagtgccagaggttccggctgaggaatcccctgaccctgccctgcaactgctgcagctgcctcacaggagaggacagagccaatgacgagacctgggcccacctgagcccgaccatgggggatcgacacctgatgagtctgaacgctgagtaagtccttctgtgggtttttgtcctaagccacctccctagatctcaaatcacaaaacacagcatttgcattttgctttgttctttcatccatttaagaaatgtttattgagggcccgaaccaggccaggcactgtgctatgcactttttaaaatggctttgattttcatcaagaccaagaggcagagaagagcggagggagaagcagagagggaagatgggggctggtcaggtgtgggtcaggagaccccagcctcaggggtctggtcctgtacagaggcctaggaccaggctgctcactctgattataacacccattctacgggcaccttcaacactgcactgctgggaagagggctttccagtttggctgagagttggaaaaggctaaaaggggagaggaccccagagcaattccccaggatgacaggagctggaggcagcatcccgggaccttaggagaggcctcatgagcttcccaagctcctacctgtcttttgaatcctgaactaaagaaggtagaatggccaggcctttgtaagacctgcaaagtccttaagttctgaacacgttgctacgctgtgaactctgtcctccaaggctgacagtacggggcccactaggttggtcttccaggcagcaagaagcaggagtcaag

SEQ ID NO: 8607 - DNA, 2937 bp, Homo sapiens
ccaatgaccggcaaggaagtgagttgctgatgccagtgggggccgtgtcacagaacattggttgctacaggctgtccagcatctacttactcaagggacagcactggacttccatctggagagccccctcccctcactctcagcacctgcttgctaggtgggcggacccatccccctggctcctgggagaacagaggactcaagcttggccgatgacagccctatgtccccagaccccagtgatcagtcagggaaaagcagaggacccacatgaacccaatcagagatcagaattttgcaggaactactgagtaaaagaacagacgtcacgtaagggtcagggctgctggtcttgtccttccccatcccacatctgagaaagaaaaacaaacagggtcctggtgaaagccagagccaagggctaagagaaccgtaccctgatcaagacagaatgctaaagagcaccgtgggaggatgaactcagagaaggggaagtgccagaggttccggctgaggaatcccctgaccctgccctgcaactgctgcagctgcctcacaggagaggacagagccaatgacgagacctgggcccacctgagcccgaccatgggggatcgacacctgatgagtctgaacgctgagtaagtccttctgtgggtttttgtcctaagccacctccctagatctcaaatcacaaaacacagcatttgcattttgctttgttctttcatccatttaagaaatgtttattgagggcccgaaccaggccaggcactgtgctatgcactttttaaaatggctttgattttcatcaagaccaagaggcagagaagagcggagggagaagcagagagggaagatgggggctggtcaggtgtgggtcaggagaccccagcctcaggggtctggtcctgtacagaggcctaggaccaggctgctcactctgattataacacccattctacgggcaccttcaacactgcactgctgggaagagggctttccagtttggctgagagttggaaaaggctaaaaggggagaggaccccagagcaattccccaggatgacaggagctggaggcagcatcccgggaccttaggagaggcctcatgagcttcccaagctcctacctgtcttttgaatcctgaactaaagaaggtagaatggccaggcctttgtaagacctgcaaagtccttaagttctgaacacgttgctacgctgtgaactctgtcctccaaggctgacagtacggggcccactaggttggtcttccaggcagcaagaagcaggagtcaagaggtggcatccacataccacccccccagacccaaagaggagaggggagacctaggggcacagaaggcaaaagcagctttaaaaaggcagacaagggggcgggtgggggatgaccagctctgccgccagcatccatgcagcccacgggcccgaagggctcctctttggaaggagccttgggagtcgggtcctcaaggaaagacctatgggatcagcccagggctctggcagctgtgacagcctcagcagcaagccaggcccctgctcagatccttctgggcaggggcaggacagacggggaagtggtggggagaaggcaagagggcagatggagtgcagggagatggcgtgacttccatctatcttcttactgcactttagaaatgacacacgggaatccatgtttaagggattctaaggtggtgccaagagacaaatgtttctgggatgggaaatagggagttagtggcagatcccccaaaagaaaaggagtcagtgtgctccaagccgccagaggaagcaaggcaggaggcagctgtaaggcagagggtatcagccacactgggcagccacatggccacagagaggatgggaggagggaggcgtacctccaaagtaaaacacaaaacaacccttaatggtaaagacagcctgtgtcgggagggagagagagaactcacaggaatccctggggccaagagcctccaggagggccatggaggcgcctcatgcccaacctgagtctctgaggggagcccagctcccacttctggcaccaacagggacacagtgagcagcaaccctgacgtgtcagacgcccagaagaacctcctctctcgggcaggccaagcaagaccggattcagaggtggatggcgggggcgggttgggggttgccacagaaggaatggaacagaacaaggaggaacaggagagccagagaacagacaagaggaatgacagacggggccacggacaaggcacggatccctccccgcaccgccctgctcaccgagctgctgcgatgggcgacttcttggcagggtccagcaggctgcccaggccaccaactggttcctcccccagggaacgcgtgtccttgttcagctgctgcaggcgggagctgagctcactgatcacagttggtttgtcgtcttcaggcccagggagcccccggctctccacggggtccccccatagcttggaccttctctggaagaggtagcgagggcgggcaggcccggcggcagaggccagcccggcagaggcggcgtggtgctgctgggccatgagctcgctgtccgaggactgcttcagcagcgggtccctgaaggtcaccggccccttccccagcggggacttgagcttgggcttgggaggcactggtggcttctcgagtagaaaagtgtgtccgtcagcgaaggaggtgtgggtgtcagtgagttccccgctctccgagctcaaggtggacatgctggacaccgtggagatggtgcttgtggtctccaggtgggggtcgctggagctgcgtgtgtcagcctcctccaccccagagtcggctgcagactcaggggcagggggtggctcactgctgggcttccctgaggccgggctgggcaccgtggtgggcgaggggccc

SEQ ID NO: 8608 - DNA, 375 bp, Homo sapiens
tgctacttatgacaaacatgaccagtaaacagcgggggtgagtctgtgccatgcacacacctgccacttctgtggaggggcgttactgggcaaaagcccattgtgtgtcatcagaaggggcttaacaacagcggccctggttacggcagccagagagcagggctcatggtcaggcagaccaccgttttctgtctgcaaggaagctctctggtacctcagtttcattgtctggaacatgaggattctgttagtgtccgtctaacagaacggtgtgaagacaaactgatacggcaggaccgtctccagtgctgcatccaacaggcttgttttcccacaaaggactctaagacctcacctaggtgtcgtcagtgacag

SEQ ID NO: 8609 - DNA, 5322 bp, Homo sapiens
ggtccccaggaggcgctcgtcgatggagcgggagggctgtagggatggcagatccgcgccgggggcgctgccctcgatggcccccacggacaggaacacagtggagcggcgccgctcctccagccgccggtccttggccgggcccgggccgccgaacgcgagccccgggccatcgcccgcgccgtagtcgaggccacccgggcgcggaccgcggtgggtcggggagggctcgcgggcgaagctgccgccgccgggaccggggctgcccacggccagggccgcgcgctcctgcgcgtcctccacctgcagctgcttcaccagggggctcttgcggcgctgcggcttggacggagcgaagaggctggcgctgaaggcgcccaggttggcgtaggggctgtcggggccgggcggccgcggccggcgcttgggtcgctcgggcggggtggccgcgggcgggggtcgaggggcgtcgcccgactcgggcgccgagtcctgcaggatgatcatggagcgcgcgcgcttctgccgctcgggatacggcagcgggccgagggccgcgcccggctcgtacaggccggcagcgcccgcgcccaggcgcgcctccaggccgggcttgaagctggagcgcaccgtgtcgtaggcgcggcccggcgggggcggcggcgagaaggccgggggcggccccgagtcgaagtagtagggcgcgggcgggggaggcggcgcggtctgcggcgggggcgggatgccgcgaccctcgcgcaccgggtcttgcatcgaggtgctccgcgggaagcgcccttccagcagggacgccagcttctcgtcctcccctgcggacggaagggccggtgagaccagccagggcgctgggcggggggtggtgctgccttcggagaggttcctggggaccccggcaaccccctcccacagaggccagccttgacccgactccaccccggggaagccaccgtccggacacaatggacgcccgcggcagaacccggcgcgaggagctagaatgctcgggaagatggggttgggacccgtggtgggcggggaatggagggcaggggagaaacagggagcccagagcccgggctccgagcaagaccctggtctgggctggtccctggatgcccaagctctgtgccccaggcccagggctgcacggggagggctcttgtgaagaggacaggagagaggtgtgcgttcagttacaggatggaggagggccccaccggggacccctgagaaaggacacaaactctgacggcctgggttggggccaagacctgcccaaacccagggtcatcaagcaggccctgagaagatatcccagaaaggcagggacagccccgcaagacatggggacagaactgctgaggggcttggaggggccagtacagggctccccaccccagaatcaacaaggccgacgcagaagtaccagccctggaggcaaccagaggtgagaggaagatagtcggaaatgagcaggagtgacacactggcagggtgaggggcagcagggctgtggccactggagccaggcctccagcagagaaagacctaatgcccacccaggtaaggaggtgccctgtggaggaagccttgagaggctcctcccagagacccgcatgggtgagtgggtgaagggaagaacggacggatcaatcaaaatggaactgcaggctgagcacccagcatgtttcattttaacccctactggcagcgtgaccccaggccaggccctgagcccctttgagcttcagtaacccccctctgcatgccttgctcagacatcattgttagggtcctgtgcaggggctggagtgctcagggccctcatgctcctgctgtccagcagaacctgacacaacctcctgaacacccctgtggacatcatgatgcggacacacgtgctgcaggtgtgttcagtgaggctgcagggggcggacggccccacacccacacacccaggtctcgtggtgctcctgttcccagcctcactctgagattggtcaacatttttatgaactcgctaaaatacagactgcctgttcctgatcgcatcctcctccagccaccgcagtgctaatgaggcctccagtactacactgcttcttgctgggcataatatctctttgtagccaaggtaccaagggtgggcttttgtgtacagacctaggcttgaattttagatctgccaggaacttcagaagcctctaggaacttcagtttcctcatgtcaagaggacagcctgcaactattgtggggcgatttcacctttacagtgcagggctgaactgcagcagtatcctgggaatgggggaagggggccgaggtcatcatcatcgtgatttttaggtctgccttccccccatccccaaccgctggacagagaaattgtgcccagttcgtcctgggtctcctgctgcattccctgcactgtgtatgaacacgcagtgaacacccacagcctatgtgttagatggagcgacgcagaatgagcgcaccttgaggatgcagaaggcgggagtgacgtgcaaagatgaaataaggggaaacttaatgctaatagcatgccaagttctgacttagggtaaagaaaagtcacttgcctcagcatggaatggggaatctgttctgataccatctggggcgggggtgggaccccttgggggcagaggcagaccctctttgtctgcctaggtcatagcagagagcatttctcgagcacccactgtgtgccaacctcaagaggcagcatctacgtctactaacactggcagctgctgagcactcccagcatgccacgcggtctgtgagtgccatctaccgggggagactcagagtggtccttggaggtgggtaataggtggtctccatgtttatggatcaaaatcctgatgtttcaagggctgcatcgtgtgcccagagcaacagagccagggcatggggcaggggcctggggagtctgacaacccaaccaatgtgcatgctggcagctgaggcccagcaggccaagaggagccaaaaaggagcacctgtccacccatccatcaaccgagtacaagagggtgcctgagggaccagtgcagaactggcagtcctaggagagtggctcaaggcctgcagggcaggtgcatggacctagacctgcagggtcgggcccaggaacagcaagagtcagaagacccaggtcaagggaggcagagacaaatgtttccagatgaagcaggagagcactggggccgatctccagggccctgaggcaatgaggagtgcacagagggtcaagctggacggatatggggtgatagcagctctgcggaaagcctgatttggccagagggatggaccagagggcagagccagggcaggcagtcatgagaacaaagccatggtccagctgcaaggtgatgagacctgtgcagggcagggctgtgaggccacccaccccgacacatcaggtgaggcagaggataagaaagaaaccatggaagacactcagtgtttaggccagggagagcaggggagagcgcttctcagctccaaagtagctgcagcctcaccagccttcttccccacaatcccacctacagaaataactcttggcagtctctgagggaccaggtcacacacccatatgccttttccacactgctctgtcagttcaccccattatcgcccagaaactcccatttatcttgcacatcttagctcaaaagtacccccaccccgacacacacagccttctgtgacaccaggtgtgcttggagccccccagtgggctccattggtccgtgagccctggcacccacaatgtgcccgctgagctctctgcacacgtcacattccctaaccaagccccagacttggcccaggatcggccttgtgtgaacacaaattggcagggtcctgaggcaggtgaggaatccgagtttgggcagctgtgtgatcttgggcaggtcatttaccctccttgcttcagttttctcatctgtaaaatggaggtactagtggtctcaacctcaatatggttattctaagtattaaatgctcagtgtccagcccgtagtaagtgctgagaggtttactcctatgtgtaacagatgggaggtgtgctggggtttgtatggacaacggacggtcaagtgggcaggtgtgtgggtggacagatgcacaggtgggcaggggacgggagagtggatgtctggagggatgcacagtgggcagggcttgttacatgtccccatctgggtcaggaaaggagacggtgagtgtggagtgtgatggtggctggggagtggtgaggcacagaggggaaggaggctgaagacacagccttgaaaaggtcccatatttgggaggctggggcggcagggttgaaataggtgccatctgagaaaggaggggaaaaccagtaagtgttgtcctaaagctttggggaggagcgtttcacggaagaaggagcaaagaaaccaaatgccagctgaggtcagcaggagtgctggccatgcatccatggggaggaaggccctggaggccgccggtgaccctggtgggagcagtttcaatttgggtatggagagaggaagtctgccgcaggctgaggagccggtgggggacgggagacaagatggacagtagaggtgactttttggggaaaactggctgtgaaggggggagacagcaatacatggagaagtaggggagaggcaagttcagggggtttgagggtcagaaacttcacatgcacttgggctgcaagggagcaaccgcgatggaggcagctgagctggggacagggatgaggctgcccatgggaaggatgagaggtgatggggaggtgggggtgcccagtggacagggagtggcagctggggacagggatgaggctgcccatgggagggatgagaggtgatggggaggtgggggtgcccagtggacagggagtggcagctggggacagggatgagactgcccatgggagggatgaggcgatggggggcggtgcccactggacagggagtgtcggctgccgggggaaagctctgggttggggaaggcctaatccccacatgtccatcaacgtatgagatcctttagctggggccaggaagagacaggactgagagggaaactggaaaccccagttatgggcagagagaggcagtgtccttcaaacccaagtccaccctgccggccccagccccgttcctccccaccccatgcagccccacagcgcagccatacctacagacttggtccgtggaatccccttccgcaaggagcccggcagcttctctgggcctggg

SEQ ID NO: 8610 - DNA, 375 bp, Homo sapiens; identical to SEQ ID NO: 8608

SEQ ID NO: 8611 - DNA, 285 bp, Homo sapiens
gggagggtctgttggggagagagcagggagggattcttggaagtggggaaggtgccagattgagtcttctccaatggttatggcttggtcttgggagggctccccctgttccaggattctggagcctcccgccttccctgcaggcctctgtggagggagcagggcggggggcttttgcactcctccctcccccaaccctgcagccttggggatctgtggaaacagcccctctattgttctgcctccagttggagtgtgagccctcggagggcctgcagctgctgc

SEQ ID NO: 8612 - DNA, 285 bp, Homo sapiens; identical to SEQ ID NO: 8611

SEQ ID NO: 8613 - DNA, 285 bp, Homo sapiens; identical to SEQ ID NO: 8611

SEQ ID NO: 8614 - DNA, 97 bp, Homo sapiens
ccaccacgcctggctaatttttgtattttttgtagagatggggtttcaccatgttgaccaggctggtcttgaattcctgacctcaagtgatccaccc

SEQ ID NO: 8615 - DNA, 1561 bp, Homo sapiens
gtgtccagctgcctactttctgcccggatctctggctcctcatctctccggtctccgcagactaaagccctcgggatatgcagcagccatgcctgtgcacacgctgagccccggagccccgtccgcccccgccctaccttgccgcctgcggaccagggtccctggctacctgctacgggggccggcagatggtggagcccggaaaccgagcgctgtggagcgcctggaggccgacaaggccaagtacgtcaagagcctgcacgtggccaacacccgccaggagcctgtgcagcccctgctgtccaaacagccgctcttcagccctgagactcgccgcacagtgctcacgcccagccgccgagccctgcctggcccctgccgacggccccagctggacctggacatcctcagcagcctcatcgacttgtgtgacagccccgtgtcccctgccgaggccagccgcactcctggacgggccgagggagccggccgtcctcccccagccacccctccgcgaccgccgcccagtacctctgcggtccgccgggtggacgtccgccccctgcccgcctcgcctgcccggccctgcccatcacccggccctgccgccgcctccagcccagcccggccgccgggtttgcaacgctccaagtcggacttgagcgagcgcttttctagggcagccgctgatctcgagcgcttttttaacttctgcggcctggacccggaggaggcgagagggttgggtgtggcccacctggcacgggccagctcggatatcgtgtccctggcagggcccagtgctgggccgggcagctctgaagggggctgctcccgccgcagctcggtgactgttgaggagcgggcccgggagcgcgttccctatggcgtgtcggtggtggagcgcaatgcccgcgtgatcaagtggttgtatgggctaaggcaggctcgggagagcccagcagctgaaggctaggcgccactgggcctggaattcgccacaggacggatcttacagaggcaagtggtccctggacctctcttgcatccattctctagacggccgtgtcagaggctccaccctgttgtgaacttggtatggaggcaaaggcttagaggctggaccagcattgttgggcaaggactgactctccaagggttttgttcttggctttggacacctgagaaccccctcctcccctcccccaatacaaggtttttgacatgagtgtactcctgcttagttcctcttgtggggctgcatttgcggtgctttgccctccccactgtgagtgaggggccaaggtatctcctcaatcctgtctccccagcggctctgtttcctccttccttccttggcctctgtcctttgctgacttcctcttccttacccagcagaactcaccctggggtcggggcagtggggaggggcctatccactgctcttcctagtccttggcagctggcctaggtgggcagactataggagggactggttaggagtctgcattgctttgacttccctctccttggttaataaacacaaatgcttgtttctcaa

SEQ ID NO: 8616 - DNA, 1561 bp, Homo sapiens
gtgtccagctgcctactttctgcccggatctctggctcctcatctctccggtctccgcagactaaagccctcgggatatgcagcagccatgcctgtgcacacgctgagccccggagccccgtccgcccccgccctaccttgccgcctgcggaccagggtccctggctacctgctacgggggccggcagatggtggagcccggaaaccgagcgctgtggagcgcctggaggccgacaaggccaagtacgtcaagagcctgcacgtggccaacacccgccaggagcctgtgcagcccctgctgtccaaacagccgctcttcagccctgagactcgccgcacagtgctcacgcccagccgccgagccctgcctggcccctgccgacggccccagctggacctggacatcctcagcagcctcatcgacttgtgtgacagccccgtgtcccctgccgaggccagccgcactcctggacgggccgagggagccggccgtcctcccccagccacccctccgcgaccgccgcccagtacctctgcggtccgccgggtggacgtccgccccctgcccgcctcgcctgcccggccctgcccatcacccggccctgccgccgcctccagcccagcccggccgccgggtttgcaacgctccaagtcggacttgagcgagcgcttttctagggcagccgctgatctcgagcgcttttttaacttctgcggcctggacccggaggaggcgagagggttgggtgtggcccacctggcacgggccagctcggatatcgtgtccctggcagggcccagtgctgggccgggcagctctgaagggggctgctcccgccgcagctcggtgactgttgaggagcgggcccgggagcgcgttccctatggcgtgtcggtggtggagcgcaatgcccgcgtgatcaagtggttgtatgggctaaggcaggctcgggagagcccagcagctgaaggctaggcgccactgggcctggaattcgccacaggacggatcttacagaggcaagtggtccctggacctctcttgcatccattctctagacggccgtgtcagaggctccaccctgttgtgaacttggtatggaggcaaaggcttagaggctggaccagcattgttgggcaaggactgactctccaagggttttgttcttggctttggacacctgagaaccccctcctcccctcccccaatacaaggtttttgacatgagtgtactcctgcttagttcctcttgtggggctgcatttgcggtgctttgccctccccactgtgagtgaggggccaagggatctcctcaatcctgtctccccagcggctctgtttcctccttccttccttggcctctgtcctttgctgacttcctcttccttacccagcagaactcaccctggggtcggggcagtggggaggggcctatccactgctcttcctagtccttggcagctggcctaggtgggcagactataggagggactggttaggagtctgcattgctttgacttccctctccttggttaataaacacaaatgcttgtttctcaa

SEQ ID NO: 8617 - DNA, 1561 bp, Homo sapiens
gtgtccagctgcctactttctgcccggatctctggctcctcatctctccggtctccgcagactaaagccctcgggatatgcagcagccatgcctgtgcacacgctgagccccggagccccgtccgcccccgccctaccttgccgcctgcggaccagggtccctggctacctgctacgggggccggcagatggtggagcccggaaaccgagcgctgtggagcgcctggaggccgacaaggccaagtacgtcaagagcctgcacgtggccaacacccgccaggagcctgtgcagcccctgctgtccaaacagccgctctttagccctgagactcgccgcacagtgctcacgcccagccgccgagccctgcctggcccctgccgacggccccagctggacctggacatcctcagcagcctcatcgacttgtgtgacagccccgtgtcccctgccgaggccagccgcactcctggacgggccgagggagccggccgtcctcccccagccacccctccgcgaccgccgcccagtacctctgcggtccgccgggtggacgtccgccccctgcccgcctcgcctgcccggccctgcccatcacccggccctgccgccgcctccagcccagcccggccgccgggtttgcaacgctccaagtcggacttgagcgagcgcttttctagggcagccgctgatctcgagcgcttttttaacttctgcggcctggacccggaggaggcgagagggttgggtgtggcccacctggcacgggccagctcggatatcgtgtccctggcagggcccagtgctgggccgggcagctctgaagggggctgctcccgccgcagctcggtgactgttgaggagcgggcccgggagcgcgttccctatggcgtgtcggtggtggagcgcaatgcccgcgtgatcaagtggttgtatgggctaaggcaggctcgggagagcccagcagctgaaggctaggcgccactgggcctggaattcgccacaggacggatcttacagaggcaagtggtccctggacctctcttgcatccattctctagacggccgtgtcagaggctccaccctgttgtgaacttggtatggaggcaaaggcttagaggctggaccagcattgttgggcaaggactgactctccaagggttttgttcttggctttggacacctgagaaccccctcctcccctcccccaatacaaggtttttgacatgagtgtactcctgcttagttcctcttgtggggctgcatttgcggtgctttgccctccccactgtgagtgaggggccaagggatctcctcaatcctgtctccccagcggctctgtttcctccttccttccttggcctctgtcctttgctgacttcctcttccttacccagcagaactcaccctggggtcggggcagtggggaggggcctatccactgctcttcctagtccttggcagctggcctaggtgggcagactataggagggactggttaggagtctgcattgctttgacttccctctccttggttaataaacacaaatgcttgtttctcaa

SEQ ID NO: 8618 - DNA, 2258 bp, Homo sapiens
agtatttacaccatggacatcagcaaatgcaaccaagacctcccgctaccctggagagctgggtttaagacatttgccagcacaccactgcccagggaccagtctcagctccagagctgtgggttattggtaaaggatgtgatttcattgagcctcagtttctgtatctgtaaagcaggaatctatcacttatgaaatatcctgtgcaggcacaatcttaggtgtggaggatacaatacaacgtaagtaagataaaagtatccacctgtgtggagcttgtattttggtggggagacaaacaagggaactataatgatatgtcatgtcataatacatgcaatgatgacaaagccaggtgaaaaggcgatgatggtcattaagttcaagatggggaggggttggggtgagggctggcctgtctgaggaggggcatttgcagtgctggagcaagccatggaggacaggaattgctccagtcagaggaacagcaaggacaaggggcccaagacggcatgtactagaggctccacgcatagaaaaagccagccatccccagtgctgtaactgagtggccagtggtgggaggtgaggtcacagacgcggagggggcatacatggggtgagcgtttcagtctcaaagtatggacagccccagggcttttgcagaacaaagtgataagatctgatttgccatttaaaataatccttctgagttcctgtggggtaaaagactggagaggagggtgtgtgaggtggggccaggagcccaggcagctaggtcggggcccctctgctaagtgaacaggggagaacagtgccttgtggtttcctggcatttaaagtggaggctttaaggtacatgggtgcctcacatcttcaggcattccagacgccgcttcctcccgctcctgattgtacaataacctttaccctctgtggggtatcattctgtgtgcattcatcctcatctgggtcatgtctcccacttacttggtgacgacctggggcttagagatactgtggagcctgctcaggggacacagccagtgagcagacactcagtctctcaggttccaggccagtggggcgtggtcttggagggtctggctggtcagagtccctaatcggcacccagctctgggcttcctttccacacctcccatgcctctctccatgcagctctttccccagctactgagaccttctgggccctttccctcatcaccgctccctgcctaggacccttccaacttcctcaatttccaacaggagtgaataatcaggaggcttcctcctgggggatgcctttacctggatgggcctgcctcaggctgttctacctgaatccattaactcctgaaccataaaccacaaattccccagggcaggagtcgtgttcatctctgtggacttgagggtctggccctgagtagcggcttgcacgtgttgttagcaataatgacagctgggcttatgatgcaggtactgtgtcacgcaaggtgctgagtgctttacctgtggtgtcttatttgaccttcacaagcaccctgagaggaagttaaggatattatccttttcagcactgggtacgttatttgttggggacaatgcaagataaaaatgtggagccccttgttaaagattgttaagaattattaacaaattatttaaaatttattaagaatttcaacagcagagcattcaagcaagcatgggtccatctaagtatgactgtgcaggttgaatgcctatgaagtaaactctgtccccattttaagatgaagaaactgaggctcaaggaggttaagtaatgtccctgggggtcatgcaactaggaaacagcaaagttgagatctgtgttctttattacagtctttgtaatagttaattttatgcatcaacttgactggatcacagtgtgcccagatatttgatcaaacattattctgagtgtttccgtgacaatgtttttggatacaatcaacatttatttaattggttgaagacctgaatagaacaaagagttcaattctctcaagtaagagaagtcctcctgtctgactacttcagaattgggacattggctttttcctgcctctacactacaactacaccatcaagccttcagacatggaaaggaaccacactattggctctcctcggtcttcagcttgccaactcaatgcagatctttgcatttgtcagccttataaccatgtgagctaattccctaaaataaatgtcctcatttaaatgta

SEQ ID NO: 8619 - DNA, 167 bp, Homo sapiens
cttgggtgcagacaagtggatgattaatgaagtagcatctgaaaaacccaaggaaccaaatgtaggtggagcaacttccctgcaacacacgtcgaagctgctgcagtggctgttcttcccctccccttggaaaggcaccaaaagccagcctttggaagggctggtgg

SEQ ID NO: 8620 - DNA, 6516 bp, Homo sapiens
cttgggtgcagacaagtggatgattaatgaagtagcatctgaaaaacccaaggaaccaaatgtaggtggagcaacttccctgcaacacacgtcgaagctgctgcagtggctgttcttcccctccccttggaaaggcaccaaaagccagcctttggaagggctggtggactggtaggcgggtatatggtgggcaggagggtaacgggcatgacaatacccagctgcaggagaagctcatcagcaaattcacttattgcttatttgatgacagttcagttgggaagaggaggtttttgttcattcattcattcaacaaagtttcattgagcacctactctgtattaggttctgttctgagttctggggataatgaagagaaaaaaccagaccaggtttctgcattcctggtgcttacactcaggtatgggagagagaaaataagcaagtgaacagataaatgagcaatggaattcctgatattgattaatggtatgaagaaaataaagaccgtcttctttgatggggcagtgatcaaggaatcttctttgaggtagtgagctcgtatgtggtggtcagggcagtcatgttccaggtagaaggaatggctggtgcaaaggacctgtggtgggaatgaaattggcatattcaaggaaaagaaatgtgcaagatgactatggcagagtgaaggtgaacaaaggagagagtgatgtaaattcagactggagaggtgctcagtggctgcatcagaaagtcttgtcagccaggttgaggagttgggaccttattcaaagtgcaaggggaatccactggagattagtgatgtgactggacacatgctttataaaatgcctttccaactgctgtgtgggcagtgggtttaggggaacagagaggagtatgtagtagaggagtgtagttagaaagtctccaccttagaggtgatggtggtctggattaggatgatggcagaaaagatgagaggcgaataggttctggaagaactgtagatggcacaccctgatgaacctgatgaactggcttctgggggagaggggaggagaggactcagtatgccttctacgagttgagatgatgcctgccctgtggaagacagacattaccagaaaatgttgtttgctctgttgggaaatgaaacatgcattgagattcacttttttaaattattataatttaagttccagggtacatgtgcacaatgtacaggtttgatacatcagtataaaagggcaggggtgcaaccagagctaagaaaaatgtccatacaagtaaaatctagtgctgtgcatatttaattcacttactcttcaaatcaacacaattaattaagtactgttttaatctgtgttacagatgaggaaactgaggaatcaagaggttgagcaatttgtctaagattactgctgggatcactgatatctcagccactgaggggtaaagctggaacttggacccaggcaatctgattcccaagtctgagctcttaaatgcaaggccctcctagatactgtatttggtgtactggtcatgtctgcaactaatcatacagcttgagagtttgaacaaacgtttgaaagtatgattcttctaattcatgaatacacttatttctaacttttgcccaagttagacatttctcaacagggggcaattttgtcccataggaacatttttgtctgacataatttggaggcagagctactagcatctagaggccaggtgtactcctaaacaatccaatgcacaggatgttcccagaactaagcatattccagcccaagtgccaaggttgagaacccccggtgtaggtgtatacagccaggaagacatgcacctgtgaacggtgacaaacaggagggtgcaatgaattgtccaattgatatataacgatggagtgctaggggctatggggtattccaggaggaagatgagttccaatttccaattgcacattctagtctgaggaatgggacagagcacaaaacaggacaatcatctgcagtgtgtcatggaagagactctgagagcaataggggctcagagggaaaatggaacttttatggaggatccatcaggattcaagaagttggcacccggggtgaggcctcaagatgcagcaacatttgaatggggaaaggcatggtagggccctgtgcattgggaagaaccatgcatgagggcacagctcccgggagaatggagtggggaggtgcagaggcatccagagagggagtgccatgagaattccgagtttacttaatagattcgtcctgataaagggtggatggggtaaagccagatcatggagggcttggaaagccaagtgtgggtttgctgtggtaagaagaggggattagcagtgttctccaagtgatattttgtacctgctttggggacattcctcagtcatggtagaaaacaccacctgcatgagttggcccggggggttggagatgagaaggctgggctatgactcagcttgctgtgaggaggtggtgggtttagatggtggcagccacttaaaatggaaaagaaatggagaaggttaaactcaagagtccattctctgagtgcgctcccctcccaagtgaccccacttttaaagataaggaagcagaagcactgtaaagctaaatgacttgtctgttgtctggctagtatgtggcaggtctgggcttgtctcattgcgtggacggcagggaaaaactcaggggagtttggtttgtagaaaatctggggacaagactgtgtaaaggacaaagacacaactgggaataagacgcataagaggcagtaatggacataattcaacaggtcggtagtggttctgctgcagtggtggggccatgatgctttttttttttttaatttctcttttctgttttccaagatgtatttaatcaccaaagtctacttttacaataaagggaagaaaggtcttgagcatctgtatctaatgtcagagtgaaatgagtgagatacaaacccagaaggagccaatgggttttgctggatggaaagaattggggttgggagggggcctcaagagtgcaatttccttagaaaataggaggtcaagaggaggagaaggggcagagtttcaggtgtcccagatttgcagtgacacgaagcagagaattaggatgggaagaagtgtcatggcttaccaggtgagactcccatttttctgatgacactgaactgtgctccacccccacccccacagtgcccttctttcccttcagagaaccagtgtccctgtgactccacccactcatctggccaccgttgccctgacctgccaggagcctggagaagatgaaggcatccgtggttctctccctccttggctacctggtggttccaagtggtgcttacatcttggggcgttgcacagtggctaagaaactccacgatggaggcctggattattttgagggctatagccttgagaactgtgagtaggccccacttagtgctccctcctctcacctccttgccctcccttctctggccaagcatccccaactccagctgtcctcagagtcacacaccttctgttccatcttaggggtgtgcctggcctacttcgagagcaagttcaaccccatggccatctacgagaacacacgtgagggctacactggctttggcctctttcagatgcgtggcagtgactggtgtggcgaccatggcaggaaccgctgccatatgtcatgttccggtaagtccctctttccattccgtgcgggggcactggaggctgtggtgctgtgttagaggcctgccttccaaatggccagagtttacaaagttttacaaagaagagggtgtggcaggagccatatccagggtgggtccctgggaggctgagcattgcactgctgggggtacagtgagatcaggctgtggggagtcaggcaggctaacctaggatggagtgatggagacccctgtccaaatgggcagagaaggtgttggggagttgagaggaggctgcaggcatcagagcctgaagggcgggagcagagggcaccagctggcctgatttcacccacgctcggccacctctccctttttctttctttcttttttttttttttttttttttttttttgagacggagtctcactgagtcgcccaggctggagtgcagtggcgcgatctcggctcacggcaagctccacctcctggcttcgtgccattctcctgcctcagcctcccgagtagctgggactacaggcgcccgccactatgcctggctaaattttttgtatttttagtagagacggagtttcactgtgttagccaggatggtctcaatctcctgacctcgtgatctgcccgtctcggcctcccaaagtgctagggttacaggcgtgagccaccgctcctgacccctctccctttttcaagggggcagttgctgccactttgaaaggcagaactggttactgggaggagacaggagctgggcatcccaaggggagcttgcccactgctcttaggcggtcccaagtacctgtgattaaggggaggtggttgccaggattcactaactgcgtgagcatttattgagcacccactaagtgccaggccttatatagttgccattcttgtgcttgttaactgccagctactcttttaagccctttataagtattcatctaattaattcatctaatcaatctaattaaatacccatgaggtgggtaccgttatccccattctatgaatggggaaactgaggcccagagagggtaagtatatgcccaagaccacacagctgtggggtggtagagctgggagggaaacctaagcagtgcggctcctgagttggggctaaaccaagaggctacatagctgggccaggtctccctcacatctgaggtggtcttcctgcctaagcaccccagcatcctccctaatgagcaaacctctttccacgctgatgggtgagaaccattccagagcctgtggcttctgagctgggtctttaggagacagagtggagaggttggagtgaaggcctgcagccttctcatgtggcctggggagtacctgtctgtgttgggccccatgattggcctttagctccagagaggagtaagaaagttgtctgattcaaggagaggcaggactgcaacataggaggaaaaggcacaggaactctgtgggaacctggtgggaatcctagctgctgccattaagaatgacatgagcggccaggcgcggcggctcacgcctgtaatcccagcactttgggaggccgagatgggcggatcacgaggtcaggagatcgggaccatcctggctaacacggtgaaaccccgtctctactaaaaatacaaaaaattagacgggcgtggtggcaggcgcctatagtcccagctactcgggaggctgaggcaggagaatggcgtgaacctgggaggcggagcttgcagtgagcccagatcgcgccacagtactccagcctgggagacagagcgagaatccctctcaaaaaaaaaagaacgacatgagcttgtgtaagtcacttctagaggtcctccaaatggggacattaacaaccacttacggtttctgtgaacataaaatggaataatgtatataaaatgccaggcagggcccttagtgaattacaacaatcacagtctagttggggagacatacacattaaaagtgtaagttaataacatttttaaattaattaaattgatttaatttaaattgaaatgatggtacattcaatgtcatccagagcttcctggtagccaaggcaaaaagagaaatacagtaggcctgtaatttatatttcataggcagaaatatagattgatagatatctataaacatagataaatatagatatctatctataaatctatctacctatcatctatctatctatatctctatctctccagaatccaatgggagacacatacaattttctgtctgtaatagaggtggtactgtgtattgtgatgaaaatatggtggactatatatcctgaaaaactctcccattaggtagaatgcaaacaaagaaaacaaaaattcttttaaagtcccagactgagttggcaagaaagtaagaaaaatccctagaggctaaaaggggaacaaggatccagataggttaagtgaagggttagaacagatcatgatcctgggcatcagctgattctctgtagcctaatcaatatattttaatggaaaaaattttataagaattacaagttaaaaaatcaatagatctggtaaaaagatgactccatcctgctacctccttagggttgtctaataaaaatctaaggatagatttattcttggaattcactggaagactctctgatgtgagtaccctgtaccttcccttacatcactctaacttaactgtcatatggcagcatggtatcttccattttcttttccccacagctttactgaatcctaatttagagaagacaattaaatgtgccaagaccattgt

SEQ ID NO: 8621 - DNA, 15514 bp, Homo sapiens
tctcgtctcaccagtaatcagagccaggggtcagcgctggacaagtaagcagggctggagggcaagtgggggagggcactgaggtggcaatggggagcctgtggatggtccttgctggaggagggctcaggtggccaagccaaccccagcctgaagttccagcccctccaagagctgaggccctgatgccctctcctggcatttctctccttcctgtactaaccatgggcccttctcctcccctgagaatgccaggacctcaggagagggcaagaaggaggccacagggattggggccgggcagtcaggtgggctggtcgcatggggccggtgcctgagggctctccagagctgccctttaatccacctctgctgctgctttgagtctgctctgaagccccttccttcagcttcaaccactccactctctgtgcattctcccagcagaaagagaccagacccccaaactgccttcctcaggcaggttcaggtccacctatattcacagctcctgatgcaagactctactgcctaatggtgtggtttatgttaacagcctcccctgcattcaggctttctccctgtgctttacaacctgctttcatatatgtgatttcattaggctatgaaacaaccacgagaattgtcttccctatttcacataagaggaaatgaggctcaaagagggagccagggatgttcacctagaaagtggcagaattgcacccagagcctgggacttccagcccctgcctgctgtgcctcaggaaaggggaggaccctatcctccatgtgctgctctgggctccccagcattgctgggcccaccctggtcctgttttgctctctgcagccctcaagagggctcctctcttagctccctgaaggcttccctgccccaggggtgacagtgctgtggccttcaggggagtctcacactagaaaatacttgtccttgtacctagtgcctgatgtccaccctccccacctctccacagaaatgccccttcctgggtcaaaatactacttgatgaatgctgagcccaggagtcagagccctgcagacctggcaccccagacacctccttccccaaacctatcttggctcaggctgctgtggggggagccatggatcactcctagcccatctccatgttgttacaatcaacaggtcccctttttggaaggattggggcagggctgtgcccatcccagtctgatggtcttctggaggccttggtcttgtccaatggtccaggtcttggagcctgtgcatggtgcacagccaacttctaggcactgtcccagtgggccccctagggatagtgggctttgtaaataagtgagcccctgaggaattgctggaagaagccagctcccagggaggggtaggatcaggcatggcttccttcagccttgggcaggtatgagcattgctggggtggggcaggtgcccccagcttgtgcgatggggcagccagagagcttggaaccagcaaacagccctggaaacgtctccccatgtgtggggctggtgctcccacgtctccccgtggccccctcctcgctcctcccttgccagccgagagaccctggcagcccactcctgggggagagtcccagctcccagaccagcccacccacctcctcccctgctctcccgaggccctcattcctctgcctgtctctgctccgctggaagagaataacctgccctctgaccaccccacacactgctgccgcctctgcgtccctctgtgtgtgtctcctctcaccccctaatccagctaattttctgccctccccaggtctgatgacagcgactcctctttgtcggaggtcctgaggtacacacagaatgtctctcgtgtttggttccccactctcactctcggcaccctctcttctctgtctcttgctgcatccctcccgcctgacacccgtgtcctcagcatgcggcccctccactccccttcctgctgcccccctctccagacctgttcctgcccccatggttcctctctctcagggtggccacaaggccttggactgcgccagctagagctgggggcttggggagggtgcacagttgcttgtcgcaggccctgttctcttctccctcctcacctgggcagggaggggcgcagcatggaggcctaggggatgctgggctggggctgagttctccacgactggaaggcaggggaaatgctgaaggctgctccttttgggggtgccggtggtgtgctctgggtcctttgattccctcagcttgtgctgggggtgagcttttcagacgttggctctgggaggggcaccatggggggaggggcaccatgggggcagcgccccttgcccacacctgttagcacacagatgtgtgggtacctccccttcccgcagcctgtgggatggctggaggctggttctcccagccagccgagcatgacaccgcacaacgaggagcaagactcaggacctggggtcccgagcccctgacaagccaagggcccctcgtgggctgagagcttcctcggctctcctggtgggctgtctcagctcctcgagcctccagccctgagtgtcgacaactggtttactgtgaatcatgaggctttgccaccacaagatgttagccagctggccaggctgtcatcggggggagcatgatccctttgacatagttctgtggccatgcagtgaagccaaaccattgtcagaagcagggtgctggagcagcttggggagctatttgtgcatgtgtggcacctggctggcagctggacgtatccgaccaccatcctcaagggtgggcctggcagagtctggggggagctgtgccagaagcgccacaggcaaaaccttgatcatttcagtagacccttggccagagtcactgtcaggagcagctttctcttgggaaaagaaacaaagctaggatatattttcagacatgactcagccagggtctcatcccaaaagaccctcactgagaaaaaaatcatcttcagaacctcaggaagctggatgtggcaaaaccctcacgctcacttgggccagcctccttctcgctcccctagcatcatgggagcgaggaggtgttgttccaggtccatacagccccattccagagagccccaaacctcctacccaaagccaagccagccccaaagggatttagcccttcgtaaatgccagtcacaagtttgaccccgctggtccaaaaggagtgtgtatgtgtacacatggctctctgcttggaagatgctagcctcagaggcagttaccagcagaagggtttactgggatcagggtgcatgggggtgatggcctgagcaaccctccctctcagcacccctccctcacactcggttaactgaagcagcatgcagcttctggtggaagctacagggcccagttccagcccctgggcctctgccctgcccagctggacccgggcgcattcacatctcaggatctgggtcagacattgtcagataggaactctctgtggacagagcccacacctcctgcaccttctagctgtgcctaacaccgggtttgcttccccagaagtgctcaggatggcaactgatgattgctgattaagacaggctatctccactctgtgtagcccgttcccggctctcagaccttggtggaatttggctggagtccttaaagtctctgttatttggtcctcatcccctccctgccctgtccccatcccacacacgtgccttgatcagcctggccacagtctccctggctgacgagcatgccttctctccctctctcccgggaaggggcatcatctccccggttggaggagccaagggtgcacggacggccccactgcagtgtgtctccatggccgaaggccacaccaagcccatcctctgcctggatgccacagatgagttgctattcacagggtccaaaggtatgtggaacgccaactagccaggtagggttggggtctcctactcacccctgcttcctttgtcagagtggtctgtgaaggagaaaagaacatagagcccccaggagttgaggatatggggtctatttgcttactacccttgtttcttaccttggctcaaggcccccatcccatgcatccttggccaagccttccctcatacctgacctggtggctccatccagcacttccttccagaccttccagggaaacttcaggaagcttcttgggtgccccacctgtacttgcactgcccaacatcaccccagctcatacatctaggcactccctatgatctcagcagcagcactttacaaagtcacgctcacctgattacagcaacaaagtcaaacattttaccagcagataggctgggcacagtggctcatacctgtaattgcagcactttggaagcatgaggcaagagaattgcttaagcccaggagtttgagactacctgcgtgggcaaatagtgagatcctgtctctacaaaaaataaaaaattagtcacaatgacatgtgcctgtagccccagctactcaggaggctgaggtgggaggatcgtttgagtccgggaggtcaaggctgcagtgagctgtgtttgtgcaattacactccagcctgggcaacagagcaagaccctatctcaataagcaaatacaaaattctttatttactcattcattcattcattttaccgacagaaagaactagtctgtaatagacacgcatactataacacaagcataaatatagctctccacggcagtagggggatagctgtcaatctaggtgtgattgattgattccaagttttcccataacatttgcttgcactggttcatttgctttgtcagcaattagtgtttggaggaacaggcaccataaaagcttaagaattttattttagccctggacaccttagcagtatggctcacaaaactctggtgttagtggaaagtttgcttgaggaaccctggtctgaagttctgagggaattctctcttccctgagttttttactagcacacacatgccagtgagcacatgtgtatgtgtttttttcctcttcagacctggagctccgtcctctggagccctgtggatccctttcccctatcctgggcagcccctgcagaggtggagctgcgccccctagtggctgacatccctcccctccctgtggcttcctcccatctctcacagaccgaagctgcaagatgtggaacttggttacgggacaggagatcgcagctctaaagggccaccccaacaacgtggtctccatcaagtactgcagccactcggggcttgtgttctccgtgtccacctcctacatcaaggtgtgggacatccgggactcagccaagtgcattcggactctcacgtgagtaacccccgcctgcctcacagtggtcggctgcagcaggctgtgttgggtacagatgctcccagcccaagtgacccactcagcacagcacagcccggctacatgggcacagagaccattaccagcctatgaacttggcttgaccctggggtacaaggtgagatctcttggtttgggagacagtgtctggggcagcaccactagaggaatttttggcctgcctggcctccacccacagcccagtcccccaagccctgccccttgaggtgtgttagatatcatcctatgagtctgaaagaggagctaggaaacagggtgagcctccaaagccatgctggccactgcctgtgtaggcgaccacccagtcatggccctgagccctgccccgacagtctcagacacacaggcatagggcaggggaggcagaactgagaccaagagccttgcaaaataaagtggttttttttagcagaagtcatgctacatccttacattaacactgtaagctacagtctattaatttgatccttaagaagtaaacaggctgggcacagtggctcatgcctataatcctaggtattttggaggctgaagcaggaggatcacttgagaccaggagttcaagaccagcctgggcaacacagggagaccctgtctctacaaaaaaaaaatttttagttagctgagcatggtggtgcatgcctgtagtcccagctactcaggaggctgaggtgggagggttgcttgagcccaggaggtcgagactgtagtgagccatgtttgtgccactgcactccaatctgggtgacagagcaagaccctgtttcaaaaaataataataatgaataaagtaaacagagggtttttagggcagtaaaattattctgtatgatgctgtaatggtagatgcatgccattatacatttgttcaaacccttagaatgtgcaacaccaagagtgaactctaacataaactatggacttgggcaataacaatatgtcaacatgggttcataatcgaaacacaggcagctttctggtggggggtgttgataatgggggagactgtgcctgtgtgggagcaggggcatgtgagaaatctctatcttgtgcttagttttcttgtgagcctaaaactggccttaaaaaaaaaaataaagtcttaaaaaaaaaaagtaaacaaggctgggcgcagtggctcacacctgtaatcgcagcactttgtgaggccgaggcgggcagatcacctgaggtcggtagttcaagaccagcctaaccaacatgatgaaaccccgtctctactaaaaatacaaaattagccaggcatggtggcgcatgcctgtaatcccagctactcaggaggctgaggcaggagaattgcttgaacctgggaggcagagattgcagtgagccgagatcacaccattgcactccagcctgggcaacaagagtgaaactccatctcaaacaaacaaacaaacataaataaatgtaaacaggctgggtgcagtggctcacgcctgtaatcccagcactttgggaggctgaggcaggcaaatcacctgaggtcgggagttcgagaccagcccgaccaatatgaagaaaccccgtctctactaaaaatacaaaatcagcttgggatggtggcgcatgcctataatcccagctactcgggagggtgaggcaggagaatcgcttgaacccgggaggcagaggttgcagtgagccgagatcatgccattgcgctccagcctgggcaacaagagcgaaactccattcagaaaaaaaaaaaaaaaaatagtaaacagaatggatataatcacctcttttaacagatgaggaaaccgagactcagagaggttgatttccggaagatccatgttcacacccactctcatgactgagccttaccatctttccaagccagtgaccaggcacatgggcaggccacatggggagttgactcataggggactagagtggagctctcccctgggtctcacttatgggagaagctattgctcttctctgtcagtcaaggaagacttcctggaagaagtaggttatttgggctggtcttagtgacgttttattggtttcctgcactgtgcacatggattgttttgacctctggccttgcctttctccgatgggcaggtcctcgggccaggtgatctcaggggatgcctgtgccgccacatccacccgtgccatcaccagtgctcagggcgagcatcagatcaaccagatcgccctcagcccttcgggcaccatgctgtacgccgcctcgggcaatgccgtccgcatctgggagcttagcaggtcagcgtgatacctggggagggaggagggtttggcattcccaggcaaggtccccaggtcttggttcagggggacccaccccagggtgggtaggacctcagcaacacctttattccccccatgctgctgggcctgtgccctctccagtgagactgctgggatgcagggtagctcatgtctagattcttgatcttgccttgagcgagaggggagggtgagtaccctgaccaggcctatttgttttggggcagacaccccaccccaacccagggtcccctctaattcacctacccctggctgggcctcttcccactgcaggttccagcctgtcggcaagctgactggccacatcggccctgtgatgtgcctgacggtcacccagacggccagccagcatgacctcgtggtgactggctccaaggaccactacgttaaggtacctcagctatgaggcctgggtcggggctggtcttccactctccccaatctttgccctctgttgccctgggagtacccatgaaaaattataagacttctggggatgtctgctgaagaaatcacgccaaagaaggcaagaatttatgtgcagaaagttatagattgcagcattattttgtaactggtgaaaaattcataataacttaaatgttgaagggtagaataacaatcaaattatggaaaatccactaaatgggatgcattgcagctattaaaatgataaatagcaaaccaaacatgaagtatacaaacactaatttgtttgctctctgattatgccattgaaaactgtccatacacagtcagaaactgaaaggaagcaggccaggcgtggtggctgacatctgtaatcctagcactttgggaggctgaggtgggaggatcacttgaggtcaggagtttgagaccagcctggccaacatggtgaaactctgtctctactaaaaatacaaaacattaaccaggcatggtgtcgggcgcctgtagtcccagctacttgggaggttgagggaggagaatcgcttgaacccgggaggcagaggttgcagtgagccgagtttgcaccactgcactccagcctgggcaacagagtgagactcagtctccaacaaaaaagaaactggaaagaagtagggttttcaggggtggtgggattatggtgaatatttagtaaaaatcaaaagaattctagagggaggctcacaccctaaacccacccttctccttagcagctgcctgttgagctgtggggtctcggcgtgatgagctgattcacccctgcattacttgagttggtctcctcccacccctgccccagtatccacaggaagggtcaagatctgaaccttccgtgttcccagtcccttagaaggagcagccccacctccaggaaccctcgcctgctgggaagctcctctccccagagggcagtggctgtcaccctagccagactcctgggtcttcaggcctctgggtccacagtgctgtaggccctgccttccctcctcccacttggcctctccctactggcccctcctcccacagatgttcgagctgggcgagtgtgtgacgggcaccatcggccccactcacaacttcgagcccccgcactacgatggcatcgagtgtctcgccatccagggagacatcctgttcagtggctcccgagataacggcatcaagaagtgggacctagaccagcaggagctcatccaggtggggtcaggaggaaagggagagggtagactcgggtagggtggtttccatagcccacgcagggccttggagaccctgggacctggactcgcgggccccaggccagatggttttcacagctccccaagccctcctgttctccctcttcctcctctgtctccatcctcccttcttccctacccgcggcctctcctgatgccacatctccctcttaggcaacctgctctcagcaaagcctttgctctcagctcttgggtttgcatgtgaagctcagttacccaattcctttcctgggagcatttgtgttttagcctgacccgtgtgagggctgaagggttctctgccagggcaggatcttaggcttgaacctgggaagtagagcagagggacccatctctggtcccctaaagcccacagcacaggccaccccagcatggctcctggaaccagtgtcacccgcccatgtggcagctctagaggccaggggagcctggaagtagctccactactagcaagaggggccctggggcaggttctctccctcatcacctcccccagccctcaccagctctgatcctctcacagcaaatccccaatgcgcacaaggactgggtgtgcgccctggccttcatcccgggccgccccatgctgctcagcgcctgccgtgcgggtgtcatcaaggtctggaacgtggacaacttcacacccatcggtgagatcaagggccacgacagtcccatcaatgccatctgcaccaatgccaagcatatcttcacagcctccaggtgggtgctggtcagagaggtctgcctctgctccctcatctcctggtgtgggcaggggaggctgggaggctcagggccctgcagttgtccccgcaggctcggttcacagagcagattccatggtggcctcctttgcatacctagcctgtgccagccttcagtgagtgcccaccatgtgctgggcactgcgctaggcaggggaggaggaaggtactgggccctgggccaagcctcgcccgcttgtctccaagcccttcctaccctcccctgccctggctgtcttccccggtgcaggtatctctcagagcacagagcagccctgccagccccagaccacgcctcttacaccccacccacccgctctggccccctgtgtggggagcagccaggccctctgtcccatggggtgcgactcagatggctttctttcttgttccgactttgtcccttctctcccctccccttcccatctcctcccacctctcctctctgtcctcgcctctctccccacacagtgactgccgggtaaagttgtggaattacgtccctggactcaccccctgccttcctcgccgagtcctggccataaagggccgcgccaccaccctgccctgaccctccccaactctccctgtctcctctttcattcttcccctctttccttttccctctctttccccacttcgatctgagctgcttcttaacggtatgagattattttactccttcttcttcctttcccttcctgtcctgcctggcctagagaggtgccctgcctgtccctcctgcacccaccgtccttttccaagcatgaacagtgggacaggccccaggagatgggtgccagggagcagaagggggagccttcaggcctggacaaaacgaaacacccccccaaaaaaagaaaacccatgacaaagctcccctgggggcctctgagtgcacaggcctctccatctgcccagcaccccaccacctgcagtccacctccccgtaagccatgcttgcctcccagccccaaccacatttggggagtttggggaatccagttcatcctctacttttgggggcagccagccaagcccactgcaagagctgaccggcacccctccactttgtcctccaccccagtgacctgacggtgaagttctggagtgtccggcggttaccccacagcggcccaccctaggagtgaggtcagagggatgcccccggaccctcgaccccagcagcctggacaccatggaagggaagctgtgacccggccgatggggccagctgctctggggacagagggcgtggccccctctcctgccctcctccctctcccttggccttcccacaggacactgttccctcatccctcccctgcctctcaggagcctctgggtgagagagaggctggggaggaaattaagctgtgaagccaaagggcattatcccttcttgttcccctcctggcagtcgtggccacattgtctcctgctgaaccggctctgcccctttctcaggcctttggcccagtggtggagccctgtggggaggtgcagcagcctggccccatcccacccttccgaggagctggcctccccgcttctcccagcccagcctctagagccactgcacctgcctctgagcccaaaaagataagtcctcaggtagctaaggaaaccaggtgtgggcggctgggccttgcagctaacccttaaccctctggcaacccgcagatagccccaactggccccaacagttccctggggtcccttttggatggggccaaggtggagctgctagaaagattcctttggggagatggtcagaaatacttcagttatttattattttgttatttttattttttgctgttgcctcctggaaacggacttgaagtttcttcccctatgttctttccctcagctcttgggggccagaaatcccaaagggagtccgctgccccggccctccagggccgcctcctctgtttgctttgcagaggagggaactgctccttctactctgcagctcaggcctgtccccgacacagcccccagggagtcttctagctacccctggcctctaggctgcctgacgctcagtgccttcctccgttccggggcctggcacccgtgccgggcagccttacaccagccatgcccgcggcaccacatgtgtcttctcactcgcgaggtcttgtgcccagcgcccccgggaaggcgggggcgctcaccccacagcccaggccccggggttctgccccacagtcctgcgtgggccacgtaggaagcagcgtgggggctgtgtctgctgggaggtggcttggatggggaggacagcccggcaccctgacccccgcccctccccagccctgcagtcccccactgggccggggagtctctccagcttctctctctctggttattcaggagacacattttcggccttaaaactggcatggagcgcaggccctcccttgcagaaaattatcaaggaagagggagttggcagagtttctctgccccggggctggggacgcggagctccggggaaattgttaaatcagtgttctggcgccccctgttgggggaactctggaattacaggagtgggccttgggggggactgagctcatccctctcccccgccccacccccacccaaagttgcccaccctgtttttccgttgcatcgctggtcttgtgcttcccgcttcagtctgggagccaagagccagccccacctcccttcagaggacgcagtgacttttggactttccagaggtggttctgtgtttctgcccttggctcctctccgtcttgggctggggcacttggagccctctccatgtggcgcccagtgttggggggaggcaggctccagtggaggctgagtgaggcctggtcccttccccgtgccctcctcggagctgccacagaggctaagacggctgtcctgctggtgctggccctgctggatgtggtattgaagtctggggcagctgatagcaggaaggagacccccttggatgctggtctcctgggacctgaacagtctgtcagcaatggctggaaatccttcttcctctggccaccccgggggtgccgggcaacccccttagctctaagatgtggccacaaatctcttcccactcctccccgccaacctgaacagaaagttttgaccttgcaacctgtaagaaagaatccgtccgcatgactgtttacaagcgatagaaacacgtaagactctgtccccttgagctcccacccccgggccggggatgccccacctggggtgactgcactgtagctgcaaggcgtgttcttgcacgaagtgtgatcttatggccctgcgagaggtgctcatcatcatgcccattttctgctgtttctgatgggtcagctacctcacggcggggccagctctgctgtcctggcaagtgtcattgactctctaaacttgaagtccttcaggagccctgagcccaacatccatgagacaccccgagttgtgcttcatgagagttggattctctgcccactctttcagggatgtccaaggtccatgttagggggcaggcccccagctccactcactgcacaagcaccctaaatgttggaagcacaaaatggttgtgatttgagcacaatggcagggtcccgcaggcagacttgacaggcccaggcccgggaggatccccccacgttggctctgtccaaagtgagattgggggtgcctgtgtctgggacagggggctgcccttgctcagaccaggccttggctcatggcttgtcctaattctgggactcgtcatcttacttcttgcccttctgtgcccatcttaagactggaggctgagccttgtcaggcccagccacatctttacgccatgggaccaggagtaaagcgctctctaaaccccgcaccccaaatctctaaacgcctgagttcaggctgagtcctagccctagtgagcctgaagagcttggactgattcccagtctcctgggtcaagccccactttgtgctttcgaagcttatgagcgggttccctggatagaaggagtcttccatccccactgcccttgggcctcttcagcatagtcctgtgccagggccctgtcctcactatcagtcagttcagtatttgctttcacgtgagtggcggactcttctgaagcagccagaactctcaaaggcagcgcatggagttgccttgcgagatttccaaggaaggaggaaagattaacaggcggagcctggcacacccaagcctttgaggtggtcagagtgccaccttcagccccttgggaagggacagcggtgggtctgggagtggcctcaccctggattcagcctaggaatctcttcaccctcagctgtccagccctgctgcctgtctggggatgtgtggcctgggcagagggcagtttaaagcacaaaaccacatggggaaaacacaaggttgcggggactttctcatgtgcctgatgtggtggagggagacaccagcaggtggctgcagtgacgttagggaacataacacttctttgccctgctagctctcagctctggggggcatcccccgatgtggtctgggctgggagcaggcatatcccctggttgttgcctgtgcctggtctgttcaccatcgtgtttgtgtgggcagagcctgccctgcaggagcagtgactttcttcccactgtgtgtcccggacctgtggtatgtgtccctttgccatcccaaacaggcaactgcttgctgctctccttgcttggcatagcctcctggtcagtggccaatgccccacaggccttcctgggcctggccctcctctcctgactcccagatccttccctgccctcttgtgtgcaaggacagattttgcagggaaagttctgtttcttctttgatacctttgttctgtcccctgccccatccccagcactcatgatcttgaagcccctatcacactctagttcagtcctgtgaaccatgtcctgagggccttgcagggaagtaggaaatagaaactcctccacaaagagccgaggatcagagaagacccctgagatgaatcagggccctgccctgcccaccaactcttttctagcaatcatgtcctgcccaggctgcaggcttcattaggctcctgctgtcctccatgatgtgactagcacaaggtgtatatatgttttgtacctctgccgatggctgtacatagtgtatgaaagttatttaagccccatgttgtacatttctgttcctagattggatgtgtgtgttctaagaagttgtcataaataaaacctgaatgaccaatgtc

SEQ ID NO: 8622 - DNA, 15517 bp, Homo sapiens
  SITE (10787): n equals a,t,g, or c
  SITE (10798): n equals a,t,g, or c
  SITE (10815): n equals a,t,g, or c
  SITE (10823): n equals a,t,g, or c
tctcgtctcaccagtaatcagagccaggggtcagcgctggacaagtaagcagggctggagggcaagtgggggagggcactgaggtggcaatggggagcctgtggatggtccttgctggaggagggctcaggtggccaagccaaccccagcctgaagttccagcccctccaagagctgaggccctgatgccctctcctggcatttctctccttcctgtactaaccatgggcccttctcctcccctgagaatgccaggacctcaggagagggcaagaaggaggccacagggattggggccgggcagtcaggtgggctggtcgcatggggccggtgcctgagggctctccagagctgccctttaatccacctctgctgctgctttgagtctgctctgaagccccttccttcagcttcaaccactccactctctgtgcattctcccagcagaaagagaccagacccccaaattgccttcctcaggcaggttcaggtccacctatattcacagctcctgatgcaagactctactgcctaatggtgtggtttatgttaacagcctcccctgcattcaggctttctccctgtgctttacaacctgctttcatatatgtgatttcattaggctatgaaacaaccacgagaattgtcttccctatttcacataagaggaaatgaggctcaaagagggagccagggatgttcacctagaaagtggcagaattgcacccagagcctgggacttccagcccctgcctgctgtgcctcaggaaaggggaggaccctatcctccatgtgctgctctgggctccccagcattgctgggcccaccctggtcctgttttgctctctgcagccctcaagagggctcctctcttagctccctgaaggcttccctgccccaggggtgacagtgctgtggccttcaggggagtctcacactagaaaatacttgtccttgtacctagtgcctgatgtccaccctccccacctctccacagaaatgccccttcctgggtcaaaatactacttgatgaatgctgagcccaggagtcagagccctgcagacctggcaccccagacacctccttccccaaacctatcttggctcaggctgctgtggggggagccatggatcactcctagcccatctccatgttgttacaatcaacaggtcccctttttggaaggattggggcagggctgtgcccatcccagcctgatggtcttctggaggccttggtcttgtccaatggtccaggtcttggagcctgtgcatggtgcacagccaacttctaggcactgtcccagtgggccccctagggatagtgggctttgtaaataagtgagcccctgaggaattgctggaagaagccagctcccagggaggggtaggatcaggcatggcttccttcagccttgggcaggtatgagcattgctggggtggggcaggtgcccccagcttgtgcgatggggcagccagagagcttggaaccagcaaacagccctggaaacgtctccccatgtgtggggctggtgctcccacatctccccgtggccccctcctcgctcctcccttgccagccgagagaccctggcagcccactcctgggggagagtcccagctcccagaccagcccacccacctcctcccctgctctcccgaggccctcattcctctgcctgtctctgctccgctggaagagaataacctgccctctgaccaccccacacactgctgccgcctctgcgtccctctgtgtgtgtctcctctcaccccctaatccagctaattttctgccctccccaggtctgatgacagcgactcctctttgtcggaggtcctgaggtacacacagaatgtctctcgtgtttggttccccactctcactctcggcaccctctcttctctgtctcttgctgcatccctcccgcctgacacccgtgtcctcagcatgcggcccctccactccccttcctgctgcccccctctccagacctgttcctgcccccatggttcctctctctcagggtggccacaaggccttggactgcgccagctagagctgggggcttggggagggtgcacagttgcttgtcgcaggccctgttctcttctccctcctcacctgggcagggaggggcgcagcatggaggcctaggggatgctgggctggggctgagttctccacgactggaaggcaggggaaatgctgaaggctgctccttttgggggtgccggtggtgtgctctgggtcctttgattccctcagcttgtgctgggggtgagcttttcagacgttggctctgggaggggcaccatggggggaggggcaccatgggggcagcgccccttgcccacacctgttagcacacagatgtgtgggtacctccccttcccgcagcctgtgggatggctggaggctggttctcccagccagccgagcatgacaccgcacaacgaggagcaagactcaggacctggggtcccgagcccctgacaagccaagggcccctcgtgggctgagagcttcctcggctctcctggtgggctgtctcagctcctcgagcctccagccctgagtgtcgacaactggtttactgtgaatcatgaggctttgccaccacaagatgttagccagctggccaggctgtcatcggggggagcatgatccctttgacatagttctgtggccatgcagtgaagccaaaccattgtcagaagcagggtgctggagcagcttggggagctatttgtgcatgtgtggcacctggctggcagctggacgtatccgaccaccatcctcaagggtgggcctggcagagtctggggggagctgtgccagaagcgccacaggcaaaaccttgatcatttcagtagacccttggccagagtcactgtcaggagcagctttctcttgggaaaagaaacaaagctaggatatattttcagacatgactcagccagggtctcatcccaaaagaccctcactgagaaaaaaatcatcttcagaacctcaggaagctggatgtggcaaaaccctcacgctcacttgggccagcctccttctcgctcccctagcatcatgggagcgaggaggtgttgttccaggtccatacagccccattccagagagccccaaacctcctacccaaagccaagccagccccaaagggatttagcccttcgtaaatgccagtcacaagtttgaccccgctggtccaaaaggagtgtgtatgtgtacacatggctctctgcttggaagatgctagcctcagaggcagttaccagcagaagggtttactgggatcagggtgcatgggggtgatggcctgagcaaccctccctctcagcacccctccctcacactcggttaactgaagcagcatgcagcttctggtggaagctacagggcccagttccagcccctgggcctctgccctgcccagctggacccgggcgcattcacatctcaggatctgggtcagacattgtcagataggaactctctgtggacagagcccacacctcctgcaccttctagctgtgcctaacaccgggtttgcttccccagaagtgctcaggatggcaactgatgattgctgattaagacaggctatctccactctgtgtagcccgttcccggctctcagaccttggtggaatttggctggagtccttaaagtctctgttatttggtcctcatcccctccctgccctgtccccatcccacacacgtgccttgatcagcctggccacagtctccctggctgacgagcatgccttctctccctctctcccgggaaggggcatcatctccccggttggaggagccaagggtgcacggacggccccactgcagtgtgtctccatggccgaaggccacaccaagcccatcctctgcctggatgccacagatgagttgctattcacagggtccaaaggtatgtggaacgccaactagccaggtagggttggggtctcctactcacccctgcttcctttgtcagagtggtctgtgaaggagaaaagaacatagagcccccaggagttgaggatatggggtctatttgcttactacccttgtttcttaccttggctcaaggcccccatcccatgcatccttggccaagccttccctcatacctgacctggtggctccatccagcacttccttccagaccttccagggaaacttcaggaagcttcttgggtgccccacctgtacttgcactgcccaacatcaccccagctcatacatctaggcactccctatgatctcagcagcagcactttacaaagtcacgctcacctgattacagcaacaaagtcaaacattttaccagcagataggctgggcacagtggctcatacctgtaattgcagcactttggaagcatgaggcaagagaattgcttaagcccaggagtttgagactacctgcgtgggcaaatagtgagatcctgtctctacaaaaaataaaaaattagtcacaatgacatgtgcctgtagccccagctactcaggaggctgaggtgggaggatcgtttgagtccgggaggtcaaggctgcagtgagctgtgtttgtgcaattacactccagcctgggcaacagagcaagaccctatctcaataagcaaatacaaaattctttatttactctttcattcattcattttaccgacagaaagaactagtctgtaatagacacgcatactataacacaagcataaatatagctctccacggcagtagggggatagctgtcaatctaggtgtgattgattgattccaagttttcccataacatttgcttgcactggttcatttgctttgtcagcaattagtgtttggaggaacaggcaccataaaagcttaagaattttattttagccctggacaccttagcagtatggctcacaaaactctggtgttagtggaaagtttgcttgaggaaccctggtctgaagttctgagggaattctctcttccctgagttttttactagcacacacatgccagtgagcacatgtgtatgtgtttttttcctcttcagacctggagctccgtcctctggagccctgtggatccctttcccctatcctgggcagcccctgcagaggtggagctgcgccccctagtggctgacatccctcccctccctgtggcttcctcccatctctcacagaccgaagctgcaagatgtggaacttggttacgggacaggagatcgcagctctaaagggccaccccaacaacgtggtctccatcaagtactgcagccactcggggcttgtgttctccgtgtccacctcctacatcaaggtgtgggacatccgggactcagccaagtgcattcggactctcacgtgagtaacccccgcctgcctcacagtggtcggctgcagcaggctgtgttgggtacagatgctcccagcccaagtgacccactcagcacagcacagcccggctacatgggcacagagaccattaccagcctatgaacttggcttgaccctggggtacaaggtgagatctcttggtttgggagacagtgtctggggcagcaccactagaggaatttttggcctgcctggcctccacccacagcccagtcccccaagccctgccccttgaggtgtgttagatatcatcctatgagtctgaaagaggagctaggaaacagggtgagcctccaaagccatgctggccactgcctgtgtaggcgaccacccagtcatggccctgagccctgccccgacagtctcagacacacaggcatagggcaggggaggcagaactgagaccaagagccttgcaaaataaagtggttttttttagcagaagtcatgctacatccttacattaacactgtaagctacagtctattaatttgatccttaagaagtaaacaggctgggcacagtggctcatgcctataatcctaggtattttggaggctgaagcaggaggatcacttgagaccaggagttcaagaccagcctgggcaacacagggagaccctgtctctacaaaaaaaaaatttttagttagctgagcatggtggtgcatgcctgtagtcccagctactcaggaggctgaggtgggagggttgcttgagcccaggaggtcgagactgtagtgagccatgtttgtgccactgcactccaatctgggtgacagagcaagaccctgtttcaaaaaataataataatgaataaagtaaacagagggtttttagggcagtaaaattattctgtatgatgctgtaatggtagatgcatgccattatacatttgttcaaacccttagaatgtgcaacaccatatagtgaactctaacataaactatggacttgggcaataacaatatgtcaacatgggttcataatcgaaacacaggcagctttctggtggggggtgttgataatgggggagactgtgcctgtgtgggagcaggggcatgtgagaaatctctatcttgtgcttagttttcttgtgagcctaaaactggccttaaaaaaaaaaataaagtcttaaaaaaaaaaagtaaacaaggctgggcgcagtggctcacacctgtaatcgcagcactttgtgaggccgaggcgggcagatcacctgaggtcggtagttcaagaccagcctaaccaacatgatgaaaccccgtctctactaaaaatacaaaattagccaggcatggtggcgcatgcctgtaatcccagctactcaggaggctgaggcaggagaattgcttgaacctgggaggcagagattgcagtgagccgagatcacaccattgcactccagcctgggcaacaagagtgaaactccatctcaaacaaacaaacaaacataaataaatgtaaacaggctgggtgcagtggctcacgcctgtaatcccagcactttgggaggctgaggcaggcaaatcacctgaggtcgggagttcgagaccagcccgaccaatatgaagaaaccccgtctctactaaaaatacaaaatcagcttgggatggtggcgcatgcctataatcccagctactcgggagggtgaggcaggagaatcgcttgaacccgggaggcagaggttgcagtgagccgagatcatgccattgcgctccagcctgggcaacaagagcgaaactccattcagaaaaaaaaaaaaaaatagtaaacagaatggatataatcacctcttttaacagatgaggaaaccgagactcagagaggttgatttccggaagatccatgttcacacccactctcatgactgagccttaccatctttccaagccagtgaccaggcacatgggcaggccacatggggagttgactcataggggactagagtggagctctcccctgggtctcacttatgggagaagctattgctcttctctgtcagtcaaggaagacttcctggaagaagtaggttatttgggctggtcttagtgacgttttattggtttcctgcactgtgcacatggattgttttgacctctggccttgcctttctccgatgggcaggtcctcgggccaggtgatctcaggggatgcctgtgccgccacatccacccgtgccatcaccagtgctcagggcgagcatcagatcaaccagatcgccctcagcccttcgggcaccatgctgtacgccgcctcgggcaatgccgtccgcatctgggagcttagcaggtcagcgtgatacctggggagggaggagggtttggcattcccaggcaaggtccccaggtcttggttcagggggacccaccccagggtgggtaggacctcagcaacacctttattccccccatgctgctgggcctgtgccctctccagtgagactgctgggatgcagggtagctcatgtctagattcttgatcttgccttgagcgagaggggagggtgagtaccctgaccaggcctatttgttttggggcagacaccccaccccaacccagggtcccctctaattcacctacccctggctgggcctcttcccactgcaggttccagcctgtcggcaagctgactggccacatcggccctgtgatgtgcctgacggtcacccagacggccagccagcatgacctcgtggtgactggctccaaggaccactacgttaaggtacctcagctatgaggcctgggtcggggctggtcttccactctccccaatctttgccctctgttgccctgggagtacccatgaaaaattataagacttctggggatgtctgctgaagaaatcaccccaaagaaggcaagaatttatgtgcagaaagttatagattgcagcattattttgtaactggtgaaaaattcataataacttaaatgttgaagggtagaataacaatcaaattatggaaaatccactaaatgggatgcattgcagctattaaaatgataaatagcaaaccaaacatgaagtatacaaacactaatttgtttgctctctgattatgccattgaaaactgtccatacacagtcagaaactgaaaggaagcaggccaggcgtggtggctgacatctgtaatcctagcactttgggaggctgaggtgggaggatcacttgaggtcaggagtttgagaccagcctggccaacatggtgaaactctgtctctactaaaaatacaaaacattaaccaggcatggtgtcgggcgcctgtagtcccagctacttgggaggttgagggaggagaatcgcttgaacccgggaggcagaggttgcagtgagccgagtttgcaccacggcactccagcctgggcaacagagtgagactcagtctccaacaaaaaagaaactggaaagaagtagggttttcaggggtggtgggattatggtgaatatttagtaaaaatcaaaagaattctagagggaggctcacaccctaaacccacccttctccttagcagctgcctgttgagctgtggggtctcggcgtgatgagctgattcacccctgcattacttgagttggtctcctcccacccctgccccagtatccacaggaagggtcaagatctgaaccttccgtgttcccagtcccttagaaggagcagccccacctccaggaaccctcgcctgctgggaagctcctctccccagagggcaggtggctgtcaccctagccagactcctgggtcttcaggcctctgggtccacagagctgtaggccctgccttccatcctcccaattggcctctccgtactggcccctcctcccacagatgttcgagctgggcgagtgtgtgacgggcaccatcggccccactcacaacttcgagcccccgcactacgatggcatcgagtgtctcgccatccagggagacatcctgttcagtggctcccgagataacggcatcaagaagtgggacctagaccagcaggagctcatccaggtggggtcaggaggaaagggagagggtagactcgggtagggtggtttccatagcccacgcagggccttggagaccctgggacctggactcgcgggccccaggccagatggttttcacagctccccaagccctcctgttctccctcttcctcctctgtctccatcctcccttcttccctacccgcggcctctcctgatgccacatctccctcttaggcaacctgctctcagcaaagcctttgctctcagctcttgggtttgcatgtgaagctcagttacccaattcctttcctgggagcatttgtgttttagcctgacccgtgtgagggctgaagggttctctgccagggcaggatcttaggcttgaacctgggaagtagagcagagggacccatctctggtcccctaaagcccacagcacaggccaccccagcatggctcctggaaccagtgtcacccgcccgtgtggcagctctagaggccaggggagcctggaagtagctccactactagcaagaggggccctggggcaggttctctccctcatcacctcccccagccctcaccagccctgatcctctcacagcaaatccccaatgcgcacaaggactgggtgtgcgccctggccttcatcccgggccgccccatgctgctcagcgcctgccgtgcgggtgtcatcaaggtctggaacgtggacaacttcacacccatcggtgagatcaagggccacgacagtcccatcaatgccatctgcaccaatgccaagcatatcttcacagcctccaggtgggtgctggtcagagaggtctgcctctgctccctcatctccttcctggtgtgggcaggggaggctgggaggctcagggccctgcagttgtccccgcaggctcggttcacagagcagattccatggtggcctcctttgcatacctagcctgtgccagccttcagtgagtgcccaccatgtgctgggcactgcgctaggcaggggaggaggaaggtactgggccatgggccaagcttcgcccgcttgtctccaagcccttcctaccctcccctgccctggctgtcttcccccgtgcaggtatctctcagagcacagagcagccctgccagccccagaccacgcctcttacaccccacccacccgctctggccccctgtgtggggagcagccaggccctctgtcccatggggtgcgactcagatggctttctttcttgttccgactttgtcccttctctcccctccccttcccatctcctcccacctctcctctctgtcctcgcctctctccccacacagtgactgccgggtaaagttgtggaattacgtccctggactcacccctgccttcctcgcgagtcctggccataaagggncgcgccaccancctgccctgaccctccncaactctncctgtctcctcttcatttcttcccctctttccttttccctctctttccccacttcgatctgagctgcttcttaacggtatgagattattttactccttcttcttcctttcccttcctgtcctgcctggcctagagaggtgccctgcctgtccctcctgcacccaccgtccttttccaagcatgaacagtgggacaggccccaggagatgggtgccagggagcagaagggggagccttcaggcctggacaaaacgaaacacccccccaaaaaaagaaaacccatgacaaagctcccctgggggcctctgagtgcacaggcctctccatctgcccagcaccccaccacctgcagtccacctccccgtaagccatgcttgcctcccagccccaaccacatttggggagtttggggaatccagttcatcctctacttttgggggcagccagccaagcccactgcaagagctgaccggcacccctccactttgtcctccaccccagtgacctgacggtgaagttctggagtgtccggcggttaccccacagcggcccaccctaggagtgaggtcagagggatgcccccggaccctcgaccccagcagcctggacaccatggaagggaagctgtgacccggccgatggggccagctgctctggggacagagggcgtggccccctctcctgccctcctccctctcccttggccttcccacaggacactgttccctcatccctcccctgcctctcaggagcctctgggtgagagagaggctggggaggaaattaagctgtgaagccaaagggcattatcccttcttgttcccctcctggcagtcgtggccacattgtctcctgctgaaccggctctgcccctttctcaggcctttggcccagtggtggagccctgtggggaggtgcagcagcctggccccatcccacccttccgaggagctggcctccccgcttctcccagcccagcctctagagccactgcacctgcctctgagcccaaaaagataagtcctcaggtagctaaggaaaccaggtgtgggcggctgggccttgcagctaacccttaaccctctggcaacccgcagatagccccaactggccccaacagttccctggggtcccttttggatggggccaaggtggagctgctagaaagattcctttggggagatggtcagaaatacttcagttatttattattttgttatttttattttttgctgttgcctcctggaaacggacttgaagtttcttcccctatattctttccctcagctcttgggggccagaaatcccaaagggagtccgctgccccggccctccagggccgcctcctctgtttgctttgcagaggagggaactgctccttcgactctgcagctcaggcctgtccccgacacagcccccagggagtcttctagctacccctggcctctaggccgcctgacgctcagtgccttcctccgttccggggcctggcacccgtgccgggcagccttacaccagccatgcccgcggcaccacatgtgtcttctcactcgcgaggtcttgtgcccagcgcccccgggaaggcgggggcgctcaccccacagcccaggccccggggttctgccccacagtcctgcgtgggccacgtaggaagcagcatgggggctgtgtctgctgggaggtggcttggatggggaggacagcccggcaccctgacccccgcccctccccagccctgcagtcccccactgggccggggagtctctccagcttctctctctctggttattcaggagacacattttcggccttaaaactggcatggagcgcaggccctcccttgcagaaaattatcaaggaagagggagttggcagagtttctctgccccggggctggggacgcggagctccggggaaattgttaaatcagtgttctggcgccccctgttgggggaactctggaattacaggagtgggccttgggggggactgagctccatccctctcccccgccccacccccacccaaagttgcccaccctgtttttccgttgcatcgctggtcttgtgcttcccgcttcagtctgggagccaagagccagccccacctcccttcagaggacgcagtgacttttggactttccagaggtggttctgtgtttctgcccttggctcctctccgtcttgggctggggcacttggagccctctccatgtggcgcccagtgttggggggaggcaggctccagtggaggctgagtgaggcctggtcccttccccgtgccctcctcggagctgccacagaggctaagacggctgtcctgctggtgctggccctgctggatgtggtattgaagtctggggcagctgatagcaggaaggagacccccttggatgctggtctcctgggacctgaacagtctgtcagcaatggctggaaatccttcttcctctggccaccccgggggtgccgggcaacccccttagctctaagatgtggccacaaatctcttcccactcctccccgccaacctgaacagaaagttttgaccttgcaacctgtaagaaagaatccgtccgcatgactgtttacaagcgatagaaacacgtaagactctgtccccttgagctcccacccccgggccggggatgccccacctggggtgactgcactgtagctgcaaggcgtgttcttgcacgaagtgtgatcttatggccctgcgagaggtgctcatcatcatgcccattttctgctgtttctgatgggtcagctacctcacggcggggccagctctgctgtcctggcaagtgtcattgactctctaaacttgaagtccttcaggagccctgagcccaacatccatgagacaccccgagttgtgcttcatgagagttggattctctgcccactctttcagggatgtccaaggtccatgttagggggcaggcccccagctccactcactgcacaagcaccctaaatgttggaagcacaaaatggttgtgatttgagcacaatggcagggtcccgcaggcagacttgacaggcccaggcccgggaggatccccccacgttggctctgtccaaagtgagattgggggtgcctgtgtctgggacagggggctgcccttgctcagaccaggccttggctcatggcttgtcctaattctgggactcgtcatcttacttcttgcccttctgtgcccatcttaagactggaggctgagccttgtcaggcccagccacatctttacgccatgggaccaggagtaaagcgctctctaaaccccgcaccccaaatctctaaacgcctgagttcaggctgagtcctagccctagtgagcctgaagagcttggactgattcccagtctcctgggtcaagccccactttgtgctttcgaagcttatgagcgggttccctggatagaaggagtcttccatccccactgcccttgggcctcttcagcatagtcctgtgccagggccctgtcctcactatcagtcagttcagtatttgctttcacgtgagtggcggactcttctgaagcagccagaactctcaaaggcagcgcatggagttgccttgcgagatttccaaggaaggaggaaagattaacaggcggagcctggcacacccaagcctttgaggtggtcagagtgccaccttcagccccttgggaagggacagcggtgggtctgggagtggcctcaccctggattcagcctaggaatctcttcaccctcagctgtccagccctgctgcctgtctggggatgtgtggcctgggcagagggcagtttaaagcacaaaaccacatggggaaaacacaaggttgcggggactttctcatgtgcctgatgtggtggagggagacaccagcaggtggctgcagtgacgttagggaacataacacttctttgccctgctagctctcagctctggggggcatcccccgatgtggtctgggctgggagcaggcatatcccctggttgttgcctgtgcctggtctgttcaccatcgtgtttgtgtgggcagagcctgccctgcaggagcagtgactttcttcccactgtgtgtcccggacctgtggtatgtgtccctttgccatcccaaacaggcaactgcttgctgctctccttgcttggcatagcctcctggtcagtggccaatgccccacaggccttcctgggcctggccctcctctcctgactcccagatccttccctgccctcttgtgtgcaaggacagattttgcagggaaagttctgtttcttctttgatacctttgttctgtcccctgccccatccccagcactcatgatcttgaagcccctatcacactctagttcagtcctgtgaaccatgtcctgagggccttgcagggaagtaggaaatagaaactcctccacaaagagccgaggatcagagaagacccctgagatgaatcagggccctgccctgcccaccaactcttttctagcaatcatgtcctgcccaggctgcaggcttcattaggctcctgctgtcctccatgatgtgactagcacaaggtgtatatatgttttgtacctctgccgatggctgtacatagtgtatgaaagttatttaagccccatgttgtacatttctgttcctagattggatgtgtgtgttctaagaagttgtcataaataaaacctgaatgaccaatgtc

SEQ ID NO: 8623 - DNA, 15518 bp, Homo sapiens
tctcgtctcaccagtaatcagagccaggggtcagcgctggacaagtaagcagggctggagggcaagtgggggagggcactgaggtggcaatggggagcctgtggatggtccttgctggaggagggctcaggtggccaagccaaccccagcctgaagttccagcccctccaagagctgaggccctgatgccctctcctggcatttctctccttcctgtactaaccatgggcccttctcctcccctgagaatgccaggacctcaggagagggcaagaaggaggccacagggattggggccgggcagtcaggtgggctggtcgcatggggccggtgcctgagggctctccagagctgccctttaatccacctctgctgctgctttgagtctgctctgaagccccttccttcagcttcaaccactccactctctgtgcattctcccagcagaaagagaccagacccccaaattgccttcctcaggcaggttcaggtccacctatattcacagctcctgatgcaagactctactgcctaatggtgtggtttatgttaacagcctcccctgcattcaggctttctccctgtgctttacaacctgctttcatatatgtgatttcattaggctatgaaacaaccacgagaattgtcttccctatttcacataagaggaaatgaggctcaaagagggagccagggatgttcacctagaaagtggcagaattgcacccagagcctgggacttccagcccctgcctgctgtgcctcaggaaaggggaggaccctatcctccatgtgctgctctgggctccccagcattgctgggcccaccctggtcctgttttgctctctgcagccctcaagagggctcctctcttagctccctgaaggcttccctgccccaggggtgacagtgctgtggccttcaggggagtctcacactagaaaatacttgtccttgtacctagtgcctgatgtccaccctccccacctctccacagaaatgccccttcctgggtcaaaatactacttgatgaatgctgagcccaggagtcagagccctgcagacctggcaccccagacacctccttccccaaacctatcttggctcaggctgctgtggggggagccatggatcactcctagcccatctccatgttgttacaatcaacaggtcccctttttggaaggattggggcagggctgtgcccatcccagcctgatggtcttctggaggccttggtcttgtccaatggtccaggtcttggagcctgtgcatggtgcacagccaacttctaggcactgtcccagtgggccccctagggatagtgggctttgtaaataagtgagcccctgaggaattgctggaagaagccagctcccagggaggggtaggatcaggcatggcttccttcagccttgggcaggtatgagcattgctggggtggggcaggtgcccccagcttgtgcgatggggcagccagagagcttggaaccagcaaacagccctggaaacgtctccccatgtgtggggctggtgctcccacatctccccgtggccccctcctcgctcctcccttgccagccgagagaccctggcagcccactcctgggggagagtcccagctcccagaccagcccacccacctcctcccctgctctcccgaggccctcattcctctgcctgtctctgctccgctggaagagaataacctgccctctgaccaccccacacactgctgccgcctctgcgtccctctgtgtgtgtctcctctcaccccctaatccagctaattttctgccctccccaggtctgatgacagcgactcctctttgtcggaggtcctgaggtacacacagaatgtctctcgtgtttggttccccactctcactctcggcaccctctcttctctgtctcttgctgcatccctcccgcctgacacccgtgtcctcagcatgcggcccctccactccccttcctgctgcccccctctccagacctgttcctgcccccatggttcctctctctcagggtggccacaaggccttggactgcgccagctagagctgggggcttggggagggtgcacagttgcttgtcgcaagccctgttctcttctccctcctcacctgggcagggaggggcgcagcatggaggcctaggggatgctgggctggggctgagttctccacgactggaaggcaggggaaatgctgaaggctgctccttttgggggtgccggtggtgtgctctgggtcctttgattccctcagcttgtgctgggggtgagcttttcagacgttggctctgggaggggcaccatggggggaggggcaccatgggggcagcgccccttgcccacacctgttagcacacagatgtgtgggtacctccccttcccgcagcctgtgggatggctggaggctggttctcccagccagccgagcatgacaccgcacaacgaggagcaagactcaggacctggggtcccgagcccctgacaagccaagggcccctcgtgggctgagagcttcctcggctctcctggtgggctgtctcagctcctcgagcctccagccctgagtgtcgacaactggtttactgtgaatcatgaggctttgccaccacaagatgttagccagctggccaggctgtcatcggggggagcatgatccctttgacatagttctgtggccatgcagtgaagccaaaccattgtcagaagcagggtgctggagcagcttggggagctatttgtgcatgtgtggcacctggctggcagctggacgtatccgaccaccatcctcaagggtgggcctggcagagtctggggggagctgtgccagaagcgccacaggcaaaaccttgatcatttcagtagacccttggccagagtcactgtcaggagcagctttctcttgggaaaagaaacaaagctaggatatattttcagacatgactcagccagggtctcatcccaaaagaccctcactgagaaaaaaatcatcttcagaacctcaggaagctggatgtggcaaaaccctcacgctcacttgggccagcctccttctcgctcccctagcatcatgggagcgaggaggtgttgttccaggtccatacagccccattccagagagccccaaacctcctacccaaagccaagccagccccaaagggatttagcccttcgtaaatgccagtcacaagtttgaccccgctggtccaaaaggagtgtgtatgtgtacacatggctctctgcttggaagatgctagcctcagaggcagttaccagcagaagggtttactgggatcagggtgcatgggggtgatggcctgagcaaccctccctctcagcacccctccctcacactcggttaactgaagcagcatgcagcttctggtggaagctacagggcccagttccagcccctgggcctctgccctgcccagctggacccgggcgcattcacatctcaggatctgggtcagacattgtcagataggaactctctgtggacagagcccacacctcctgcaccttctagctgtgcctaacaccgggtttgcttccccagaagtgctcaggatggcaactgatgattgctgattaagacaggctatctccactctgtgtagcccgttcccggctctcagaccttggtggaatttggctggagtccttaaagtctctgttatttggtcctcatcccctccctgccctgtccccatcccacacacgtgccttgatcagcctggccacagtctccctggctgacgagcatgccttctctccctctctcccgggaaggggcatcatctccccggttggaggagccaagggtgcacggacggccccactgcagtgtgtgctccatggccgaaggccacaccaagcccatcctctgcctggatgccacagatgagttgctattcacagggtccaaaggtatgtggaacgccaactagccaggtagggttggggtctcctactcacccctgcttcctttgtcagagtggtctgtgaaggagaaaagaacatagagcccccaggagttgaggatatggggtctatttgcttactacccttgtttcttaccttggctcaaggcccccatcccatgcatccttggccaagccttccctcatacctgacctggtggctccatccagcacttccttccagaccttccagggaaacttcaggaagcttcttgggtgccccacctgtacttgcactgcccaacatcaccccagctcatacatctaggcactccctatgatctcagcagcagcactttacaaagtcacgctcacctgattacagcaacaaagtcaaacattttaccagcagataggctgggcacagtggctcatacctgtaattgcagcactttggaagcatgaggcaagagaattgcttaagcccaggagtttgagactacctgcgtgggcaaatagtgagatcctgtctctacaaaaaataaaaaattagtcacaatgacatgtgcctgtagccccagctactcaggaggctgaggtgggaggatcgtttgagtccgggaggtcaaggctgcagtgagctgtgtttgtgcaattacactccagcctgggcaacagagcaagaccctatctcaataagcaaatacaaaattctttatttactctttcattcattcattttaccgacagaaagaactagtctgtaatagacacgcatactataacacaagcataaatatagctctccacggcagtagggggatagctgtcaatctaggtgtgattgattgattccaagttttcccataacatttgcttgcactggttcatttgctttgtcagcaattagtgtttggaggaacaggcaccataaaagcttaagaattttattttagccctggacaccttagcagtatggctcacaaaactctggtgttagtggaaagtttgcttgaggaaccctggtctgaagttctgagggaattctctcttccctgagttttttactagcacacacatgccagtgagcacatgtgtatgtgtttttttcctcttcagacctggagctccgtcctctggagccctgtggatccctttcccctatcctgggcagcccctgcagaggtggagctgcgccccctagtggctgacatccctcccctccctgtggcttcctcccatctctcacagaccgaagctgcaagatgtggaacttggttacgggacaggagatcgcagctctaaagggccaccccaacaacgtggtctccatcaagtactgcagccactcggggcttgtgttctccgtgtccacctcctacatcaaggtgtgggacatccgggactcagccaagtgcattcggactctcacgtgagtaacccccgcctgcctcacagtggtcggctgcagcaggctgtgttgggtacagatgctcccagcccaagtgacccactcagcacagcacagcccggctacatgggcacagagaccattaccagcctatgaacttggcttgaccctggggtacaaggtgagatctcttggtttgggagacagtgtctggggcagcaccactagaggaatttttggcctgcctggcctccacccacagcccagtcccccaagccctgccccttgaggtgtgttagatatcatcctatgagtctgaaagaggagctaggaaacagggtgagcctccaaagccatgctggccactgcctgtgtaggcgaccacccagtcatggccctgagccctgccccgacagtctcagacacacaggcatagggcaggggaggcagaactgagaccaagagccttgcaaaataaagtggttttttttagcagaagtcatgctacatccttacattaacactgtaagctacagtctattaatttgatccttaagaagtaaacaggctgggcacagtggctcatgcctataatcctaggtattttggaggctgaagcaggaggatcacttgagaccaggagttcaagaccagcctgggcaacacagggagaccctgtctctacaaaaaaaaaatttttagttagctgagcatggtggtgcatgcctgtagtcccagctactcaggaggctgaggtgggagggttgcttgagcccaggaggtcgagactgtagtgagccatgtttgtgccactgcactccaatctgggtgacagagcaagaccctgtttcaaaaaataataataatgaataaagtaaacagagggtttttagggcagtaaaattattctgtatgatgctgtaatggtagatgcatgccattatacatttgttcaaacccttagaatgtgcaacaccaagagtgaactctaacataaactatggacttgggcaataacaatatgtcaacatgggttcataatcgaaacacaggcagctttctggtggggggtgttgataatgggggagactgtgcctgtgtgggagcaggggcatgtgagaaatctctatcttgtgcttagttttcttgtgagcctaaaactggccttaaaaaaaaaaataaagtcttaaaaaaaaaaagtaaacaaggctgggcgcagtggctcacacctgtaatcgcagcactttgtgaggccgaggcgggcagatcacctgaggtcggtagttcaagaccagcctaaccaacatgatgaaaccccgtctctactaaaaatacaaaattagccaggcatggtggcgcatgcctgtaatcccagctactcaggaggctgaggcaggagaattgcttgaacctgggaggcagagattgcagtgagccgagatcacaccattgcactccagcctgggcaacaagagtgaaactccatctcaaacaaacaaacaaacataaataaatgtaaacaggctgggtgcagtggctcacgcctgtaatcccagcactttgggaggctgaggcaggcaaatcacctgaggtcgggagttcgagaccagcccgaccaatatgaagaaaccccgtctctactaaaaatacaaaatcagcttgggatggtggcgcatgcctataatcccagctactcgggagggtgaggcaggagaatcgcttgaacccgggaggcagaggttgcagtgagccgagatcatgccattgcgctccagcctgggcaacaagagcgaaactccattcagaaaaaaaaaaaaaaatagtaaacagaatggatataatcacctcttttaacagatgaggaaaccgagactcagagaggttgatttccggaagatccatgttcacacccactctcatgactgagccttaccatctttccaagccagtgaccaggcacatgggcaggccacatggggagttgactcataggggactagagtggagctctcccctgggtctcacttatgggagaagctattgctcttctctgtcagtcaaggaagacttcctggaagaagtaggttatttgggctggtcttagtgacgttttattggtttcctgcactgtgcacatggattgttttgacctctggccttgcctttctccgatgggcaggtcctcgggccaggtgatctcaggggatgcctgtgccgccacatccacccgtgccatcaccagtgctcagggcgagcatcagatcaaccagatcgccctcagcccttcgggcaccatgctgtacgccgcctcgggcaatgccgtccgcatctgggagcttagcaggtcagcgtgatacctggggagggaggagggtttggcattcccaggcaaggtccccaggtcttggttcagggggacccaccccagggtgggtaggacctcagcaacacctttattccccccatgctgctgggcctgtgccctctccagtgagactgctgggatgcagggtagctcatgtctagattcttgatcttgccttgagcgagaggggagggtgagtaccctgaccaggcctatttgttttggggcagacaccccaccccaacccagggtcccctctaattcacctacccctggctgggcctcttcccactgcaggttccagcctgtcggcaagctgactggccacatcggccctgtgatgtgcctgacggtcacccagacggccagccagcatgacctcgtggtgactggctccaaggaccactacgttaaggtacctcagctatgaggcctgggtcggggctggtcttccactctccccaatctttgccctctgttgccctgggagtacccatgaaaaattataagacttctggggatgtctgctgaagaaatcaccccaaagaaggcaagaatttatgtgcagaaagttatagattgcagcattattttgtaactggtgaaaaattcataataacttaaatgttgaagggtagaataacaatcaaattatggaaaatccactaaatgggatgcattgcagctattaaaatgataaatagcaaaccaaacatgaagtatacaaacactaatttgtttgctctctgattatgccattgaaaactgtccatacacagtcagaaactgaaaggaagcaggccaggcgtggtggctgacatctgtaatcctagcactttgggaggctgaggtgggaggatcacttgaggtcaggagtttgagaccagcctggccaacatggtgaaactctgtctctactaaaaatacaaaacattaaccaggcatggtgtcgggcgcctgtagtcccagctacttgggaggttgagggaggagaatcgcttgaacccgggaggcagaggttgcagtgagccgagtttgcaccacggcactccagcctgggcaacagagtgagactcagtctccaacaaaaaagaaactggaaagaagtagggttttcaggggtggtgggattatggtgaatatttagtaaaaatcaaaagaattctagagggaggctcacaccctaaacccacccttctccttagcagctgcctgttgagctgtggggtctcggcgtgatgagctgattcacccctgcattacttgagttggtctcctcccacccctgccccagtatccacaggaagggtcaagatctgaaccttccgtgttcccagtcccttagaaggagcagccccacctccaggaaccctcgcctgctgggaagctcctctccccagagggcagtggctgtcaccctagccagactcctgggtcttcaggcctctgggtccacagtgctgtaggccctgccttccatcctcccacttggcctctccctactggcccctcctcccacagatgttcgagctgggcgagtgtgtgacgggcaccatcggccccactcacaacttcgagcccccgcactacgatggcatcgagtgtctcgccatccagggagacatcctgttcagtggctcccgagataacggcatcaagaagtgggacctagaccagcaggagctcatccaggtggggtcaggaggaaagggagagggtagactcgggtagggtggtttccatagcccacgcagggccttggagaccctgggacctggactcgcgggccccaggccagatggttttcacagctccccaagccctcctgttctccctcttcctcctctgtctccatcctcccttcttccctacccgcggcctctcctgatgccacatctccctcttaggcaacctgctctcagcaaagcctttgctctcagctcttgggtttgcatgtgaagctcagttacccaattcctttcctgggagcatttgtgttttagcctgacccgtgtgagggctgaagggttctctgccagggcaggatcttaggcttgaacctgggaagtagagcagagggacccatctctggtcccctaaagcccacagcacaggccaccccagcatggctcctggaaccagtgtcacccgcccgtgtggcagctctagaggccaggggagcctggaagtagctccactactagcaagaggggccctggggcaggttctctccctcatcacctcccccagccctcaccagccctgatcctctcacagcaaatccccaatgcgcacaaggactgggtgtgcgccctggccttcatcccgggccgccccatgctgctcagcgcctgccgtgcgggtgtcatcaaggtctggaacgtggacaacttcacacccatcggtgagatcaagggccacgacagtcccatcaatgccatctgcaccaatgccaagcatatcttcacagcctccaggtgggtgctggtcagagaggtctgcctctgctccctcatctccttcctggtgtgggcaggggaggctgggaggctcagggccctgcagttgtccccgcaggctcggttcacagagcagattccatggtggcctcctttgcatacctagcctgtgccagccttcagtgagtgcccaccatgtgctgggcactgcgctaggcaggggaggaggaaggtactgggccctgggccaagcctcgcccgcttgtctccaagcccttcctaccctcccctgccctggctgtcttcccccgtgcaggtatctctcagagcacagagcagccctgccagccccagaccacgcctcttacaccccacccacccgctctggccccctgtgtggggagcagccaggccctctgtcccatggggtgcgactcagatggctttctttcttgttccgactttgtcccttctctcccctccccttcccatctcctcccacctctcctctctgtcctcgcctctctccccacacagtgactgccgggtaaagttgtggaattacgtccctggactcaccccctgccttcctcgccgagtcctggccataaagggccgcgccaccaccctgccctgaccctccccaactctccctgtctcctctttcattcttcccctctttccttttccctctctttccccacttcgatctgagctgcttcttaacggtatgagattattttactccttcttcttcctttcccttcctgtcctgcctggcctagagaggtgccctgcctgtccctcctgcacccaccgtccttttccaagcatgaacagtgggacaggccccaggagatgggtgccagggagcagaagggggagccttcaggcctggacaaaacgaaacacccccccaaaaaaagaaaacccatgacaaagctcccctgggggcctctgagtgcacaggcctctccatctgcccagcaccccaccacctgcagtccacctccccgtaagccatgcttgcctcccagccccaaccacatttggggagtttggggaatccagttcatcctctacttttgggggcagccagccaagcccactgcaagagctgaccggcacccctccactttgtcctccaccccagtgacctgacggtgaagttctggagtgtccggcggttaccccacagcggcccaccctaggagtgaggtcagagggatgcccccggaccctcgaccccagcagcctggacaccatggaagggaagctgtgacccggccgatggggccagctgctctggggacagagggcgtggccccctctcctgccctcctccctctcccttggccttcccacaggacactgttccctcatccctcccctgcctctcaggagcctctgggtgagagagaggctggggaggaaattaagctgtgaagccaaagggcattatcccttcttgttcccctcctggcagtcgtggccacattgtctcctgctgaaccggctctgcccctttctcaggcctttggcccagtggtggagccctgtggggaggtgcagcagcctggccccatcccacccttccgaggagctggcctccccgcttctcccagcccagcctctagagccactgcacctgcctctgagcccaaaaagataagtcctcaggtagctaaggaaaccaggtgtgggcggctgggccttgcagctaacccttaaccctctggcaacccgcagatagccccaactggccccaacagttccctggggtcccttttggatggggccaaggtggagctgctagaaagattcctttggggagatggtcagaaatacttcagttatttattattttgttatttttattttttgctgttgcctcctggaaacggacttgaagtttcttcccctatattctttccctcagctcttgggggccagaaatcccaaagggagtccgctgccccggccctccagggccgcctcctctgtttgctttgcagaggagggaactgctccttcgactctgcagctcaggcctgtccccgacacagcccccagggagtcttctagctacccctggcctctaggccgcctgacgctcagtgccttcctccgttccggggcctggcacccgtgccgggcagccttacaccagccatgcccgcggcaccacatgtgtcttctcactcgcgaggtcttgtgcccagcgcccccgggaaggcgggggcgctcaccccacagcccaggccccggggttctgccccacagtcctgcgtgggccacgtaggaagcagcatgggggctgtgtctgctgggaggtggcttggatggggaggacagcccggcaccctgacccccgcccctccccagccctgcagtcccccactgggccggggagtctctccagcttctctctctctggttattcaggagacacattttcggccttaaaactggcatggagcgcaggccctcccttgcagaaaattatcaaggaagagggagttggcagagtttctctgccccggggctggggacgcggagctccggggaaattgttaaatcagtgttctggcgccccctgttgggggaactctggaattacaggagtgggccttgggggggactgagctccatccctctcccccgccccacccccacccaaagttgcccaccctgtttttccgttgcatcgctggtcttgtgcttcccgcttcagtctgggagccaagagccagccccacctcccttcagaggacgcagtgacttttggactttccagaggtggttctgtgtttctgcccttggctcctctccgtcttgggctggggcacttggagccctctccatgtggcgcccagtgttggggggaggcaggctccagtggaggctgagtgaggcctggtcccttccccgtgccctcctcggagctgccacagaggctaagacggctgtcctgctggtgctggccctgctggatgtggtattgaagtctggggcagctgatagcaggaaggagacccccttggatgctggtctcctgggacctgaacagtctgtcagcaatggctggaaatccttcttcctctggccaccccgggggtgccgggcaacccccttagctctaagatgtggccacaaatctcttcccactcctccccgccaacctgaacagaaagttttgaccttgcaacctgtaagaaagaatccgtccgcatgactgtttacaagcgatagaaacacgtaagactctgtccccttgagctcccacccccgggccggggatgccccacctggggtgactgcactgtagctgcaaggcgtgttcttgcacgaagtgtgatcttatggccctgcgagaggtgctcatcatcatgcccattttctgctgtttctgatgggtcagctacctcacggcggggccagctctgctgtcctggcaagtgtcattgactctctaaacttgaagtccttcaggagccctgagcccaacatccatgagacaccccgagttgtgcttcatgagagttggattctctgcccactctttcagggatgtccaaggtccatgttagggggcaggcccccagctccactcactgcacaagcaccctaaatgttggaagcacaaaatggttgtgatttgagcacaatggcagggtcccgcaggcagacttgacaggcccaggcccgggaggatccccccacgttggctctgtccaaagtgagattgggggtgcctgtgtctgggacagggggctgcccttgctcagaccaggccttggctcatggcttgtcctaattctgggactcgtcatcttacttcttgcccttctgtgcccatcttaagactggaggctgagccttgtcaggcccagccacatctttacgccatgggaccaggagtaaagcgctctctaaaccccgcaccccaaatctctaaacgcctgagttcaggctgagtcctagccctagtgagcctgaagagcttggactgattcccagtctcctgggtcaagccccactttgtgctttcgaagcttatgagcgggttccctggatagaaggagtcttccatccccactgcccttgggcctcttcagcatagtcctgtgccagggccctgtcctcactatcagtcagttcagtatttgctttcacgtgagtggcggactcttctgaagcagccagaactctcaaaggcagcgcatggagttgccttgcgagatttccaaggaaggaggaaagattaacaggcggagcctggcacacccaagcctttgaggtggtcagagtgccaccttcagccccttgggaagggacagcggtgggtctgggagtggcctcaccctggattcagcctaggaatctcttcaccctcagctgtccagccctgctgcctgtctggggatgtgtggcctgggcagagggcagtttaaagcacaaaaccacatggggaaaacacaaggttgcggggactttctcatgtgcctgatgtggtggagggagacaccagcaggtggctgcagtgacgttagggaacataacacttctttgccctgctagctctcagctctggggggcatcccccgatgtggtctgggctgggagcaggcatatcccctggttgttgcctgtgcctggtctgttcaccatcgtgtttgtgtgggcagagcctgccctgcaggagcagtgactttcttcccactgtgtgtcccggacctgtggtatgtgtccctttgccatcccaaacaggcaactgcttgctgctctccttgcttggcatagcctcctggtcagtggccaatgccccacaggccttcctgggcctggccctcctctcctgactcccagatccttccctgccctcttgtgtgcaaggacagattttgcagggaaagttctgtttcttctttgatacctttgttctgtcccctgccccatccccagcactcatgatcttgaagcccctatcacactctagttcagtcctgtgaaccatgtcctgagggccttgcagggaagtaggaaatagaaactcctccacaaagagccgaggatcagagaagacccctgagatgaatcagggccctgccctgcccaccaactcttttctagcaatcatgtcctgcccaggctgcaggcttcattaggctcctgctgtcctccatgatgtgactagcacaaggtgtatatatgttttgtacctctgccgatggctgtacatagtgtatgaaagttatttaagccccatgttgtacatttctgttcctagattggatgtgtgtgttctaagaagttgtcataaataaaacctgaatgaccaatgtc

SEQ ID NO: 8624 - DNA, 595 bp, Homo sapiens
ctggagtctgtaggaggcagaagtcaccgtgggtgggagggtgaagcttcctggggaaggtttcctctagagaggcttctggtcctcaaacagaaaggccttggtgagtgagagagggaccctgagccatggagggagacacaagtgggcagagttgccctgacatgccagccccgctggcaggcacagagcctcctgccccaggagcagggtggcttcttgcggacagttgtttttggctggctgacccggcatcacccatgccactccccgccccaccctcgctccccacaggtccatattttgcataggatcctgcctgacagtgggacagaagagcccactgtgaactgcaggaagtgacacctgggcatggccagctgcagactgggcagggtgtgtgggcaagacccagagaccggccactggggaactggtcacgggccagacctggagtggactccagccatctggttccttcttgccactgcgctcctccctgcaccctccagaaagtttgcagcacaaggtaatttttccaaatgtagttcaccctgtctctcgaggatgccaaggctcctgcagggtgcagtgg

SEQ ID NO: 8625 - DNA, 595 bp, Homo sapiens; identical to SEQ ID NO: 8624

SEQ ID NO: 8626 - DNA, 595 bp, Homo sapiens; identical to SEQ ID NO: 8624

SEQ ID NO: 8627 - DNA, 9392 bp, Homo sapiens
ggcttcctccagttccggagtccagtggctgaccgccttgctggagcggagatgcagccgccgccccgaaaagtgagcttggccctgaatggggactcctggcgggctgggggaacggagggagctaagggggcatccgacttgtggtaggagacggaaagtcggaaggggtcagaccccaaaccagaagtaacagaggaaagagctcagcacccccccggccccgccccctcaccgctccctgcgcggagtgttttttaggtccttgcgctggggtcttcatcctctctttgcccccacaggtgaagccggcccaggaggtgaagcttcgcttcctggaacagctgagcatccttcagacctggcagcagagggaggcggatctgctggaggacatcaggtagctcccccaacccccttcatttacactcaccttcgtcgttgtgcgccacttctccccaatatacatgtgctggggtggaggaacaggggccaagagctccccagccgacccatccacagccctcaccctaggcctggcctctccagatactggataggaatgctcccccacctaacccctcccaaccccctcccacccacataaacacacaggaaccctccctcaaagcccttgactccacaccactgcccccaaccccacaatcaaccttagggcagaatccctctccctcttccagacctgttggaaggctggcagacatcgtacccaggcccccatcagtcttcacctctaagcctacagatgaacctctggggtggggaggatcctgctggggcccggggcagtaaggtgagggtttcctgtgttgcagctgcccgaggtgatctcaaggactcccatcagtcccattccctctgggtgtagttacactctaggaacctggctccccccaaccgctccctcctgcccagagtagaggactgaggatgggagaacaggaccaaacataaccttatcccccacctcacccccgacctgcaatctccgcagatcctacagcaagcagagggcagccattgaacgggagtatgggcaggtatgggacttttctctggaccttacctcttgttccagcctctcttatatcaccagtaatgtctgtccatacctatccctattgtggtcaagagcagatgcctagagtcaagcagactggtgtcagatccctgctgtgtaattatagccatgtgaccttggacaagttacttaacctttcttgacctcagtttctttctctgtgaaatgggaataataataataccttaccttcatgtagggttgttgtaaggattaaacaaattaatgactataaggcatttagcaaagcaagtggcacataatgtacccaaagaatggtatgattatactctgatgtcatattctgccagttggggtgggtctttgaaagggaacttggttctgtgatggctttttcaccaggcactccagaaactggctggcccattcctgaagagggaagggcaccggagcggtgagatggacagcaggtgggccctatggagggggagggccacagaggccaaaaagtgatggggagctcagccccaggaacctgtggggatgaaggcctagcaagtggggaaggcacgtgagctgtaggtagagctgacacagcagcagcagaggagctgacccagcaaggacactgtgggtggggtggagggcaggagtgaggcttgtggctgagctaatgggctgatcgattgatgggctcccagacaagggaggatgggaaagcactctgtctcccatggtgttggtcagggggcagggggtgggggtggtctcatgaagctgtggagtgctctcctcctcaacacagaccttctctggggaggggcaggacagtgttcggtgcctggcgctgcctgctggatgccaccgtggctgggggccaaacccgactccaggcgtctgaccgataccgtgacctagcagggggtacagggcggagcgccaaggagcaggtgcttaggaaggtatggctcagaggttggggtgaaggaagagctggcttgggaccaaaggtggtctaggtaaggactttgtgtatgcatcccaatagggaacagagaacctccagagggcgcaggctgaggtgctgcagtctgtccgggagctgagccgaagtcggaagctgtatgggcagcgggaacgtgtgtgggccttggcacaggagaaggcggctgatgtccaggccaggtggggtcatggagagtgaggaagcccaaggttggggaacagggaggtggggctgtctaggggtggagccaagtcaccaaagctgggcctgactctgatctcatattctcccacttggggtgggcctgactcctttctctcatctgcacaggctaaaccgaagtgaccatgggatcttccactctcggaccagtctccagaaactgagcaccaaggttcgagggatgagggcatgagtgggggcagggaagagggaggcagagtagtctagtggtttggaacataggtgcatatgtatgaaagactgggttgaatccaggctctcctacttcctgggtgggtaaccttggttaatttacttgatctctgtgagccttattttcttctataaaatggagagaatacccttctttttcagtcctttaatatgcatttattgaggatctgtatataataggcactgttctagacattatggatacagtggagaacactaccaatggagttcctgccctcacagtctggttaagagagacagacagcaaataaatacttagattaagatgaaaataaaacaaggtactatgataaagaataacaagggggtagaatttagagggaggcctctctgaataggtggcctaactgtcaagaaggagctggccttgcaaagatctaggggaagaacattccagagagaagaaatggtgagtgcaaagggtctgaggtgggaataactttgtaggctcgaggaactgagagagggccagtatggctggagtactgtgagcaagggaacaagcgcttgaaaagaggtcagagagattgcgggggccagctcatattgaacctggtggaccatggtaaggaacagtggattttattttaaatgcgtgcagaaggcactagaagattttgagcaggagttgtgtgtatgcaacatttttagtgtagtgccaggcacatagtaagcactcaataatgtgagaatccattctggatctggcttctcaattggtcttggaaggactctgggggtctagggcttcctattgacatcagtttaccctcctagctgtccgcccagtcagcccagtactcccagcagctgcaagcagcccgcaatgagtacctgcttaacttggtggctaccaatgcccacctcgaccattactaccaggaggaactgccagctctgctcaaggccagttttaacccagacacccctatccctcagcagggagggaaaggaggacctccccctgcttcttgatccccatgacagtgggtggtgcaggggatcttgtctgtttagagtgagtagatgatacatacatgcactctggttctgctcctagctggctgcatggcattgtacagtacacttaaactcttccgaaccccagattcctcatcagggataaccctttctctgcctatcttatagcactagtggggctcaaaggagagaatggatgtgaacgtgttttaaacttctaagtgctctgcacacgagggcctttctcatgaagaatgtcttcttctctccttcctatacctcatgcccatcacctgtcaaatctggaacgagcctattttacagtagaggtctgggggaagggtggtgtcagtatcttggggttctctctaggccctggtcagtgagctgtcagagcacttgagggaccccctgacctccctgagccacactgagctggaagccgcagaggtcatcctggagcatgcccaccgcggggagcagacaacctcccaggtgagggctgtggcctctaagagcttccccggggatcctttttacccttccctcccaatgcagccctctttgcttcacacattgtcctttttcttccaagaagtgctagggacagggttggagagtgagtcagtgaatgagtgactttgacttttcccaacccctaggtaagctgggagcaagacctgaagctgtttcttcaggagcctggtgtattttcccccaccccacctcagcagtttcagccagcacggactgatcaggtgagatcttcctgcttgttggaaccaggccacatataaaggcgattatgatttaggcctcctccattatctttgttttgtgttaacttagtgagtgtacaccgtggagagggggtttcagaactccagctcacctccctcccaacaggacacacacaaaaaaacacacctcagtccacctttcagtcacttgactgcgccatccttttcattctacctctgtcccttgacctggatcccatttctgaagctctgtatctctgtgtccacattacctgtgtccatgactgtaggcatgtgcccctttctctttgtccttgtccttggaggtcaagatagagtggaaaaaggagggaactggagagaaggagcagcctcaggtcctcctcacagcaccccctgacccattcaggtgtgtgtcctggagtggggagcagaaggcgtggctggcaagagtggcctggagaaagaggttcagcgcttgaccagccgagctgcccgtgactacaagatccagaaccatgggcatcgggtgaggtgggggggcacaggtgtcatgtgcaccttcttgtctcagcaagaagagctgagagaggggatcttggagccattgagggtgtcatggagctacagaggggagggaaaggtattttaaggtaacagtgtggcacaatagttaagagcacagtttttggagctagaccgacataggttcaaattctcttctgttgcttcctagttctgtagccccaggtaagggagtgacttaacctctctggacttcaatttcctcatcactaaagtagggccaataatagcacccacctcatagggaagattaaatgacataatgtatgtgatgcaactagcaaagtaccagtcccatagtaagtcatgccccacagtatttccacccacccctgttctctgccttcccaaccaggtactgcaacgactggagcagaggcggcagcaggcttcagagcgggaggctccaagcatagaacagaggttacaggaagtgcgagagagcatccgccgggcacaggtgaggcacacccctgaggttagagatcccaccttctcaggcaagccccactccctctactcctctttctgatggtgggaggaaggaagggagaagcagagagtaaacactgccgtcagccaggttccactaacttacttcctccccatggcaggtgagccaggtgaagggggctgcccggctggccctgctgcagggggctggcttagatgtggagcgctggctgaagccagccatgacccaggcccaggatgaggtggagcaggagcggcggctcagtgaggctcggctgtcccagagggacctctctccaaccgtgagctcctcccccaacactacccatccttacttagaagggaaaaactccagtggaaggcaaaccctataaaactggaatcacagttgtgcctaactcaaagggttattacgaggcttaagtgaaatcatcatatatcattctttgcataatttctggcatagagtcctcagtacatttttattatgagcataatagaatgattaagaagtagggttctggggcagtctgtaagggctttgagtaccagccactccacttatgagctgtgcaatctcgaaaagtgacttaacctttctgaaccccagtttccttgtaaataaagtgaggttaatagttgtgcaaaactattaacactgggtcattatgaagattaaatgagacaatatacacaagatactttgcattgtacctggcacatagtatgcactcaattactgtaactctattactgttagtattatcctgctctgtggtgactgtggttgtgtacatggtgagtggatgggtgcacctgccttggaggatccatggtgtcctttagaggaaagatggaagagtgggagatagaaccagtgcttgagagtgggccccatatgaggtctgttctttgcccctctaggctgaggatgctgagctttctgactttgaggaatgtgaggagacgggagagctctttgaggagcctgccccccaagccctggccacgagggccctcccctgccctgcacacgtggtatttcgctatcaggtatgaatgggggtggggacctctgatgggcaagggtgggggacagccaagtcctgaatccttcgtgtgtggcccaggcagggcgtgaggatgagctgacaatcacggagggtgagtggctggaggtcatagaggagggagatgctgacgaatgggtcaaggtgggtatgggaccccgggctctgaccttgggttgggggcagtaggagggacttctctgtggcctccatagacccttctaggcaaagctagaagcctgagtagaagagagccagggtcatggactgctgaggtaagtctaatatctgttcacattgctgggtgagcaggctcggaaccagcacggcgaggtaggctttgtccctgagcgatatctcaacttcccggacctctccctcccagagagcagccaagacagtgacaatccctgcggggcagagcccacaggtacgaaagggaaattttgggttagaggaccctgggtatggagaaaaattgttaggggttgtagccctggggtgtcatggtcctggggcaccgctacccacctccctctcaccgtctctcctgggcctctgtagcattcctggcacaggccctgtacagctacaccggacagagtgcagaggagctgagcttccctgagggggcactcatccgtctgctgccccgggcccaagatggagtagatgacggcttctggaggggagaatttgggggccgtgttggggtcttcccctccctgctggtggaagagctgcttggccccccagggccacctgaactctctgaccctgaacaggtgaggcttaccttctccctgaactccccaggcacctctgggttgaccctctcaccccaatgaagcctcatattcatcttaatgcctcctctgctccccagttttacctcctacagtggcctgggcctcccatctcctatgggggggcagggaaaagggaaaccaaggcagccttcataggagtttggggggtcctactttagtgctggatagatctgagttcaaatttctattgtatgacttgggcaatgatttaacctctctgagcttgtttcttcacatgtaaaatggggataatacctactttagcaggctcactgtcataattagagataatcgaggtaaagccttcttttttttttttttttttgagacagagtttcgctcttgttgcccaggctggagtgcaatggtgcgatctcagctcaccgcaacctctgcctcccgggttcaaacgattctcctgtatcagcccctcgagtagctgggattacaggcacgtgccgccacgcccggctaattttctatttttagtagatacagggtttctccatttggtcaggctggtctcaaactcctgacctcaggtgatccacctgccttggcctcccaatgtgctgggattataggcatgagccactgcgccccgccgaggcaaagcctttagtgcagtggaatgcagaaggtgtttcaatataagatatctgttgttataatgtatatacatacagcagaaagagaataggagtgggcatcaggagaactgggttctagccagcactctgccaataactggcttcgtgattttggacagctggcttaacctgggtctcacttctaacataggagtcatattattaaaaatgcctacctcatggggtagtggtgaggattgaatgaattagtacacgtgaagtgctagcagaacacttgagacgtagtaaacataagcgttcaatacatattggctgttgaaatatttgtcagctacacccccccccccaccgaatgcaagcatttggccacttcctgtattgagaagtgatgaggaaggaactggagatgggatgagaggaaaagctggtaaaacctccccacatgccaggaataactctgtgcccaccccacctccagatgctgccgtccccttctcctcccagcttctccccacctgcacctacctctgtgttggatgggccccctgcacctgtcctgcctgggggtgagtggaaggaactgggagccctgggaggctaacagacaggaagaaggaggaagcttggactcccaggtcacgctctggtcctctccgtgccttcaggcatcttgcttggtggagagcacttgcctgggctctggagccaggctgactggttcaggtcccgctctgtcatctccaagtgtgtggtgggattctgaacctgtcttggcctcagtttatgttctttatgaggtaaggaaaaggtactagcttattgaattcttatgagagttaaaaaagatgcctgtggactacacagcattgtgcctggcacacagtaagtatgcagtcactgttattattttaaaaattagctaacttctctcacggtgtcctcccaatatgcaccttttgctcctagtgtccagatacctagctttgtatcattattttttctgatgcccacttttttttttttaaatgtctatagcagttttattttattatttattttagattcaggaggtacatgtgcttgtttgtcatatggatatattgcatactggtggagattgggcttctagtgtacctgtaactcaaatagtgaacattgtacctgataggtaatttttcaaccctcgcccctgcctccactcctacctttgccccctttggagtcctgggagtctgttatttccatctctatgtccatgtgtacccgttgtttagctcccacttataagtgagaacatgcaatatttggttttctgtttctgagttagttcacttaggataatggcatccaactccattcatgttgctgcagaggacatgatttcattcttttttatggctgtggaatgcctgccttttctaaaactttctggtacttccaccttgtccacaaggagtctccctccctggagttaccaccatctccaccaccccaagttcactttgcatgacttagcacttagtcatttattgtg

SEQ ID NO: 8628 - DNA, 5645 bp, Homo sapiens
caggcagggcgtgaggatgagctgacaatcacggagggtgagtggctggaggtcatagaggagggagatgctgacgaatgggtcaaggtgggtatgggaccccgggctctgaccttgggttgggggcagtaggagggacttctctgtggcctccatagacccttctaggcaaagctagaagcctgagtagaagagagccagggtcatggactgctgaggtaagtctaatatctgttcacattgctgggtgagcaggctcggaaccagcacggcgaggtaggctttgtccctgagcgatatctcaacttcccggacctctccctcccagagagcagccaagacagtgacaatccctgcggggcagagcccacaggtaagaaagggaaattttgggttagaggaccctgggtatggagaaaaattgttaggggttgtagccctggggtgtcatggtcctggggcactgctacccacctccctctcaccgtctctcctgggcctctgtagcattcctggcacaggccctgtacagctacaccggacagagtgcagaggagctgagcttccctgagggggcactcatccgtctgctgccccgggcccaagatggagtagatgacggcttctggaggggagaatttgggggccgtgttggggtcttcccctccctgctggtggaagagctgcttggccccccagggccacctgaactctctgaccctgaacaggtgaggcttaccttctccctgaactccccaggcacctctgggttgaccctcccaccccaataaagcctcatattcatcttaatgcctcctctgctccccagttttacctcctacagtggcctgggcctcccatctcctatgggggggcagggaaaagggaaaccaaggcagccttcataggagtttggggggtcctactttagtgctggatagatctgagttcaaatttctattgtatgacttgggcaatgatttaacctctctgagcttgtttcttcacatgtaaaatggggataatacctactttagcaggctcactgtcataattagagataatcgaggtaaagccttcttcttttttttttttttgagacagagtttcgctcttgttgcccaggctggagtgcaatggtgcgatctcagctcaccgcaacctctgcctcccgggttcaaacgattctcctgtatcagcccctcgagtagctgggattacaggcacgtgctgccacgcccggctaattttctatttttagtagatacagggtttctccatttggtcaggctggtctcaaactcctgacctcaggtgatccacctgccttggcctcccaatgtgctgggattataggcatgagccactgcgccccgccgaggcaaagcctttagtgcagtggaatgcagaaggtgtttcaatataagatatctgttgttataatgtatatacatacagcagaaagagaataggagtgggcatcaggagaactgggttctagccagcactctgccaataactggcttcgtgattttggacagctggcttaacctgggtctcacttctaacataggagtcatattattaaaaatgcctacctcatggggtagtggtgaggattgaatgaattggtacacgtgaagtgctagcagaacacttgagacatagtaaacataagcgttcaatacatattggctgttgaaatatttgtcagctacacccccccaccgaatgcaagcatttggccacttcctgtattgagaagtgatgaggaaggaactggagatgggatgagaggaaaagctggtaaaacctccccacatgccaggaataactctgtgcccaccccacctccagatgctgccgtccccttctcctcccagcttctccccacctgcacctacctctgtgttggatgggccccctgcacctgtcctgcctgggggtgagtggaaggaactgggagccttgggaggctaacagacaggaagaaggaggaagcttggactcccaggtcacgctctggtcctctccgtgccttcaggcatcttgcttggtggagagcacttgcctgggctctggagccaggctgactggttcaggtcccgctctgtcatctccaagtgtgtggtgggattctgaacctgtcttggcctcagtttatgttctttatgaggtaaggaaaaggtactagcttattgaattcttatgagagttaaaaaagatgcctgtggactacacagcattgtgcctggcacacagtaagtatgcagtcactgttattattttaaaaattagctaacttctctcacggtgtcctcccaatatgcaccttttgctcctagtgtccagatacctagctttgtatcattattttttctgatgcccactttttttcttttttaaatgtctatagcagttttattttattatttattttagattcaggaggtacatgtgcttgtttgtcatatggatatattgcatactggtggagattgggcttctagtgtacctgtaactcaaatagtgaacattgtacctgataggtaatttttcaaccctcgcccctgcctctactcctacctttgccccctttggagtcctgggagtctgttatttccatctctatgtccatgtgtacccgttgtttagctcccacttataagtgagaacatgcaatatttggttttctgtttctgagttagttcacttaggataatggcatccaactccattcatgttgctgcagaggacatgatttcattcttttttatggctgtggaatgcctgccttttctaaaactttctggtacttccaccttgtccacaaggagtctccctccctggagttaccaccatctccaccaccccaagttcactttgcatgacttagcacttagtcatttattgtgtttgttgaggtttcattattggtttcttgacagccattgggggtgggagcactatgcatcctatctcccttagttttgtaccttgagcagagctgattatacagcagttgcccaataaatgttgaggacagtggatagagtgatggattttatggtctaggatggtgaccattaatttaacaaatatttatagaatgccactgtcctaagtgctggagatacagcattgaacaaaacaaagtctgaagactgacttgtggttcttatttccagacaaagccctggacttccctgggttcctggacatgatggcacctcgactcaggccggtaagggcccttgccttggaggagattgtatgtagaggggttattccaaccagtcctgttttgtctgcagggctgagggaatagacagggatacccttaagggagaactctggagcactaactgtgtgttccctacagatgcgtccaccacctcccccgccggctaaagccccggatcctggccacccagatcccctcacctgaaggccagggaagccttgacccccagtgatgctgctgtccctatcttcaagctgtcagaccacaccatcaatgatccagagcaacacagccaaaagctggaatcgcccttatttccaccctcacctccaagggtggaaaccttgccccttcccatttctagagctggaacccactcctttttttcccattgttctatcatctctaggaccggaactaccttctcttctgtcatgaccctatctagggtggtgaaatgcctgaaatctctggggctggaaaccatccatcaaggtctctagtagttctggcccacctctttccccaccctggctccatgacccaccccactctggatgccagggtcactggggttgggctggggagaggaacaggccttgggaatcaggagctggagccaggatgcgaagcagctgtaatggtctgagcggatttattgacaatgaataaagggcacgaaggccaggccagggcctgggcctcttgtgctaagagggcagggggcctacggtgctattgctttaggggcccaccacgggcaggggcctgctcccagctgccacgctctatcatatggagcgaggtgttggggaaggcggggcaggcagcctgttgcaggcaggggaaggagaagagactgaggggctgtgacctctcctgaggcccccagcctgagactgtgcaactccaggtggaagtagagctggtccctcagctggggggcagtgctgtccagtggaggggagggctttcacgcccacccaccccctggccctgccagctggtagtccatcagcacaatgaaggagacttggagaagaggaagaataacactgttgcttcctgttcaagctgtgtccagcttttcccctggggctccaggaccttccctacctccaccaccaaaccaagggatttatagcaaaggctaagcctgcagtttactcggggggttcagggagccgaaaggcttaaatagtttaagtaggtgatgggaagatgagattacctcatttagggctcaggcagactcacctcacatactccctgctccctgtggtagagacacctgagagaaaggggaggggtcaacaatgagagaccaggagtaggtcctatcagtgccccccagagtagagagcaataagagcccagcccagtgcagtcccggctgtgttttcctacctggtgatcagaagtgtctggtttgcttggctgcccatttgcctcttgagtgggcagccctgggcttgggcccctccctccggccctcagtgttggctctgcagaagctctggggttcccttcaagtgcacgaggggttaggctgctgtccctgagtcctccattctgtactggggggctggctaggacctggggctgtggcctctcagggggcagcctctccatggcaggcatccctgccttgggctgccctcccccagacccctgaccaccccctgggtcctgtcccccaccagagccccagctcctgtctgtgggggagccatcacggtgttcgtgcagtccatagcgcttctcaatgtgtgtcacccggaacctgggaggggagggaacactggggtttaggaccacaactcagaggctgcttggccctcccctctgaccagggacatcctgagtttggtggctacttccctctggcctaaggtaggggaggccttctcagattgtggggcacattgtgtagcctgacttctgccggagctcccagtccaggaggaaagagccaaggcccacttttgggatcaggtgcctgatcactgggccccctacctcagcccccctttccctggagcacctgccccacctgcccacagagaacacagtggtctcccctgtccgggggcggctttttccttccttggagcgtccctgacggacaagtggaggcctcttgctgcggctgcaatggaggcaaggggctgcagagcccaggtgcactgtgtgatgatgggagggggctccgtcctgcaggctggaggtggcatccacactggacagcagggaggaggggagtgagggtaacatttccatttcccttcatgttttgtttcttacgttctttcagcatgctccttaaaaccccagaagccccaatttccccaagccccattttttcttgtctttatctaataaactcaatattaagatgtta

SEQ ID NO: 8629 - DNA, 12121 bp, Homo sapiens
ggcttcctccagttccggagtccagtggctgaccgccttgctggagcggagatgcagccgccgccccgaaaagtgagcttggccctgaatggggactcctggcgggctgggggaacggagggagctaagggggcatccgacttgtggtaggagacgggaagtcggaaggggtcagaccccaaaccagaagtaacagaggaaagagctcagcacccccccaggccccgcacccctcaccgctccctgcgcggagtgttttttaggtccttgcgctggggtcttcatcctctctttgcccccacaggtgaagccggcccaggaggtgaagcttcgcttcctggaacagctgagcatccttcagatcctggcagcagagggaggcggatctgctggaggacatcaggtagctcccccaacccccttcatttacactcaccttcgtcgttgtgcgccacttctccccaatatacatgtgctggggtggaggaacaggggccaagagctccccagccgacccatccacagccctcaccctaggcctggcctctccagatactggataggaatgctcccccacctaacccctcccaaccccctcccacccacataaacacacaggaaccctccctcaaagcccttgactccacaccactgcccccaaccccacaatcaaccttagggcagaatccctctccctcttccagacctgttggaaggctggcagacatcgtacccaggcccccatcagtcttcacctctaagcctacagatgaacctctggggtggggaggatcctgctggggcccggggcagtaaggtgagggtttcctgtgttgcagctgcccgaggtgatctcaaggactcccatcagtcccattccctctgggtgtagttacactctaggaacctggctccccccaaccgctccctcctgcccagagtagaggactgaggatgggagaacaggaccaaacataaccttatcccccacctcacccccgacctgcaatctccgcagatcctacagcaagcagagggcagccattgaacgggagtatgggcaggtatgggacttttctctggaccttacctcttgttccagcctctcttatatcaccagtaatgtctgtccatacctatccctattgtggtcaagagcagatgcctagagtcaagcagactggtgtcagatccctgctgtgtaattatagccatgtgaccttggacaagttacttaacctttcttgacctcagtttctttctctgtgaaatgggaataataataataccttaccttcatgtagggttgttgtaaggattaaacaaattaatgactataaggcatttagcaaagcaagtggcacataatgtacccaaagaatggtatgattatactctgatgtcatattctgccagttggggtgggtctttgaaagggaacttggttctgtgatggctttttcaccaggcactccagaaactggctggcccattcctgaagagggaagggcaccggagcggtgagatggacagcaggtgggccctatggagggggagggccacagaggccaaaaagtgatggggagctcagccccaggaacctgtggggatgaaggcctagcaagtggggaaggcacgtgagctgtaggtagagctgacacagcagcagcagaggagctgacccagcaaggacactgtgggtggggtggagggcaggagtgaggcttgtggctgagctaatgggctgatcgattgatgggctcccagacaagggaggatgggaaagcactctgtctcccatggtgcttggtcagggggcagggggtgggggtggtctcatgaagctgtggagtgctctcctcctcaacacagaccttctctggggaggggcaggacagtgttcggtgcctggcgctgcctgctggatgccaccgtggctgggggccaaacccgactccaggcgtctgaccgataccgtgacctagcagggggtacagggcggagcgccaaggagcaggtgcttaggaaggtatggctcagaggttggggtgaaggaagagctggcttgggaccaaaggtggtctaggtaaggactttgtgtatgcatcccaatagggaacagagaacctccagagggcgcaggctgaggtgctgcagtctgtccgggagctgagccgaagtcggaagctgtatgggcagcgggaacgtgtgtgggccttggcacaggagaaggcggctgatgtccaggccaggtggggtcatggagagtgaggaagcccaaggttggggaacagggaggtggggctgtctaggggtggagccaagtcaccaaagctgggcctgactctgatctcatattctcccacttggggtgggcctgactcctttctctcatctgcacaggctaaaccgaagtgaccatgggatcttccactctcggaccagtctccagaaactgagcaccaaggttcgagggatgagggcatgagtgggggcagggaagagggaggcagagtagtctagtggtttggaacataggtgcatatgtatgaaagactgggttgaatccaggctctcctacttcctgggtgggtaaccttggttaatttacttgatctctgtgagccttattttcttctataaaatggagagaatacccttctttttcagtcctttaatatgcatttattgaggatctgtatataataggcactgttctagacattatggatacagtggagaacactaccaatggagttcctgccctcacagtctggttaagagagacagacagcaaataaatacttagattaagatgaaaataaaacaaggtactatgataaagaataacaagggggtagaatttagagggaggcctctctgaataggtggcctaactgtcaagaaggagctggccttgcaaagatctaggggaagaacattgcagagagaagaaatggtgagtgcaaagggtctgaggtgggaataactttgtaggctcgaggaactgagagagggccagtatggctggagtactgtgagcaagggaacaagcgcttgaaaagaggtcagagagattgcgggggccagctcatattgaacgtggtggaccatggtaaggaacagtggattttattttaaatgcgtgcagaaggcactagaagattttgagcaggagttgtgtgtatgcaacatttttagtgtagtgccaggcacatagtaagcactcaataatgtgagaatccattctggatctggcttctcaattggtcttggaaggactctgggggtctagggcttcctattgacatcagtttaccctcctagctgtccgcccagtcagcccagtactcccagcagctgcaagcagcccgcaatgagtacctgcttaacttggtggctaccaatgcccacctcgaccattactaccaggaggaactgccagctctgctcaaggccagttttaacccagacacccctatccctcagcagggagggaaaggaggacctccccctgcttcttgatccccatgacagtgggtggtgcaggggatcttgtctgtttagagtgagtagatgatacatacatgcactctggttctgctcctagctggctgcatggcattgtacagtacacttaaactcttccgaaccccagattcctcatcagggataaccctttctctgcctatcttatagcactagtggggctcaaaggagagaatggatgtgaacgtgttttaaacttctaagtgctctgcacacgagggcctttctcatgaagaatgtcttcttctctccttcctatacctcatgcccatcacctgtcaaatctggaacgagcctattttacagtagaggtctgggggaagggtggtgtcagtatcttggggttctctctaggccctggtcagtgagctgtcagagcacttgagggaccccctgacctcctgagccacactgagctggaagccgcagaggtcatcctggagcatgcccaccgcggggagcagacaacctcccaggtgagggctgtggcctctaagagcttccccggggatcctttttacccttccctcccaatgcagccctctttgcttcacacattgtcctttttcttccaagaagtgctagggacagggttggagagtgagtcagtgaatgagtgactttgacttttcccaacccctaggtaagctgggagcaagacctgaagctgtttcttcaggagcctggtgtattttcccccaccccacctcagcagtttcagccagcagggactgatcaggtgagatcttcctgcttgttggaaccaggccacatataaaggcgattatgatttaggcctcctccattatctttgttttgtgttaacttagtgagtgtacaccgtggagagggggtttcagaactccagctcacctccctcccaacaggacacacacaaaaaaacacacctcagtccacctttcagtcacttgactgcgccatccttttcattctacctctgtcccttgacctggatcccatttctgaagctctgtatctctgtgtccacattacctgtgtccatgactgtaggcatgtgcccctttctctttgtccttgtccttggaggtcaagatagagtggaaaaaggagggaactggagagaaggagcagcctcaggtcctcctcacagcaccccctgacccattcaggtgtgtgtcctggagtggggagcagaaggcgtggctggcaagagtggcctggagaaagaggttcagcgcttgaccagccgagctgcccgtgactacaagatccagaaccatgggcatcgggtgaggtgggggggcacaggtgtcatgtgcaccttcttgtctcagcaagaagagctgagagaggggatcttggagccattgagggtgtcatggagctacagaggggagggaaaggtattttaaggtaacagtgtggcacaatagttaagagcacagtttttggagctagaccgacataggttcaaattctcttctgttgcttcctagttctgtagccccaggtaagggagtgacttaacctctctggacttcaatttcctcatcactaaagtagggccaataatagcacccacctcatagggaagattaaatgacataatgtatgtgatgcaactagcaaagtaccagtcccatagtaagtcatgccccacagtatttccacccacccctgttctctgccttcccaaccaggtactgcaacgactggagcagaggcggcagcaggcttcagagcgggaggctccaagcatagaacagaggttacaggaagtgcgagagagcatccgccgggcacaggtgaggcacacccctgaggttagagatcccaccttctcaggcaagccccactccctctactcctctttctgatggtgggaggaaggaagggagaagcagagagtaaacactgccgtcagccaggttccactaacttacttcctccccatggcaggtgagccaggtgaagggggctgcccggctggccctgctgcagggggctggcttagatgtggagcgctggctgaagccagccatgacccaggcccaggatgaggtggagcaggagcggcggctcagtgaggctcggctgtcccagagggacctctctccaaccgtgagctcctcccccaacactacccatccttacttagaagggaaaaactccagtggaaggcaaaccctataaaactggaatcacagttgtgcctaactcaaagggttattacgaggcttaagtgaaatcatcatatatcattctttgcataatttctggcatagagtcctcagtacatttttattatgagcataatagaatgattaagaagtagggttctggggcagtctgtaagggctttgagtaccagccactccacttatgagctgtgcaatctcgaaaagtgacttaacctttctgaaccccagtttccttgtaaataaagtgaggttaatagttgtgcaaaactattaacactgggtcattatgaagattaaatgagacaatatacacaagatactttgcattgtacctggcacatagtatgcactcaattactgtaactctattactgttagtattatcctgctctgtggtgactgtggttgtgtacatggtgagtggatgggtgcacctgccttggaggatccatggtgtcctttagaggaaagatggaagagtgggagatagaaccagtgcttgagagtgggccccatatgaggtctgttctttgcccctctaggctgaggatgctgagctttctgactttgaggaatgtgaggagacgggagagctctttgaggagcctgccccccaagccctggccacgagggccctcccctgccctgcacacgtggtatttcgctatcaggtatgaatgggggtggggacctctgatgggcaagggtgggggacagccaagtcctgaatccttcgtgtgtggcccaggcagggcgtgaggatgagctgacaatcacggagggtgagtggctggaggtcatagaggagggagatgctgacgaatgggtcaaggtgggtatgggaccccgggctctgaccttgggttgggggcagtaggagggacttctctgtggcctccatagacccttctaggcaaagctagaagcctgagtagaagagagccagggtcatggactgctgaggtaagtctaatatctgttcacattgctgggtgagcaggctcggaaccagcacggcgaggtaggctttgtccctgagcgatatctcaacttcccggacctctccctcccagagagcagccaagacagtgacaatccctgcggggcagagcccacaggtaagaaagggaaattttgggttagaggaccctgggtatggagaaaaattgttaggggttgtagccctggggtgtcatggtcctggggcactgctacccacctccctctcaccgtctctcctgggcctctgtagcattcctggcacaggccctgtacagctacaccggacagagtgcagaggagctgagcttccctgagggggcactcatccgtctgctgccccgggcccaagatggagtagatgacggcttctggaggggagaatttgggggccgtgttggggtcttcccctccctgctggtggaagagctgcttggccccccagggccacctgaactctctgaccctgaacaggtgaggcttaccttctccctgaactccccaggcacctctgggttgaccctcccaccccaataaagcctcatattcatcttaatgcctcctctgctccccagttttacctcctacagtggcctgggcctcccatctcctatgggggggcagggaaaagggaaaccaaggcagccttcataggagtttggggggtcctactttagtgctggatagatctgagttcaaatttctattgtatgacttgggcaatgatttaacctctctgagcttgtttcttcacatgtaaaatggggataatacctactttagcaggctcactgtcataattagagataatcgaggtaaagccttcttcttttttttttttttgagacagagtttcgctcttgttgcccaggctggagtgcaatggtgcgatctcagctcaccgcaacctctgcctcccgggttcaaacgattctcctgtatcagcccctcgagtagctgggattacaggcacgtgctgccacgcccggctaattttctatttttagtagatacagggtttctccatttggtcaggctggtctcaaactcctgacctcaggtgatccacctgccttggcctcccaatgtgctgggattataggcatgagccactgcgccccgccgaggcaaagcctttagtgcagtggaatgcagaaggtgtttcaatataagatatctgttgttataatgtatatacatacagcagaaagagaataggagtgggcatcaggagaactgggttctagccagcactctgccaataactggcttcgtgattttggacagctggcttaacctgggtctcacttctaacataggagtcatattattaaaaatgcctacctcatggggtagtggtgaggattgaatgaattggtacacgtgaagtgctagcagaacacttgagacatagtaaacataagcgttcaatacatattggctgttgaaatatttgtcagctacacccccccaccgaatgcaagcatttggccacttcctgtattgagaagtgatgaggaaggaactggagatgggatgagaggaaaagctggtaaaacctccccacatgccaggaataactctgtgcccaccccacctccagatgctgccgtccccttctcctcccagcttctccccacctgcacctacctctgtgttggatgggccccctgcacctgtcctgcctgggggtgagtggaaggaactgggagccttgggaggctaacagacaggaagaaggaggaagcttggactcccaggtcacgctctggtcctctccgtgccttcaggcatcttgcttggtggagagcacttgcctgggctctggagccaggctgactggttcaggtcccgctctgtcatctccaagtgtgtggtgggattctgaacctgtcttggcctcagtttatgttctttatgaggtaaggaaaaggtactagcttattgaattcttatgagagttaaaaaagatgcctgtggactacacagcattgtgcctggcacacagtaagtatgcagtcactgttattattttaaaaattagctaacttctctcacggtgtcctcccaatatgcaccttttgctcctagtgtccagatacctagctttgtatcattattttttctgatgcccactttttttcttttttaaatgtctatagcagttttattttattatttattttagattcaggaggtacatgtgcttgtttgtcatatggatatattgcatactggtggagattgggcttctagtgtacctgtaactcaaatagtgaacattgtacctgataggtaatttttcaaccctcgcccctgcctctactcctacctttgccccctttggagtcctgggagtctgttatttccatctctatgtccatgtgtacccgttgtttagctcccacttataagtgagaacatgcaatatttggttttctgtttctgagttagttcacttaggataatggcatccaactccattcatgttgctgcagaggacatgatttcattcttttttatggctgtggaatgcctgccttttctaaaactttctggtacttccaccttgtccacaaggagtctccctccctggagttaccaccatctccaccaccccaagttcactttgcatgacttagcacttagtcatttattgtgtttgttgaggtttcattattggtttcttgacagccattgggggtgggagcactatgcatcctatctcccttagttttgtaccttgagcagagctgattatacagcagttgcccaataaatgttgaggacagtggatagagtgatggattttatggtctaggatggtgaccattaatttaacaaatatttatagaatgccactgtcctaagtgctggagatacagcattgaacaaaacaaagtctgaagactgacttgtggttcttatttccagacaaagccctggacttccctgggttcctggacatgatggcacctcgactcaggccggtaagggcccttgccttggaggagattgtatgtagaggggttattccaaccagtcctgttttgtctgcagggctgagggaatagacagggatacccttaagggagaactctggagcactaactgtgtgttccctacagatgcgtccaccacctcccccgccggctaaagccccggatcctggccacccagatcccctcacctgaaggccagggaagccttgacccccagtgatgctgctgtccctatcttcaagctgtcagaccacaccatcaatgatccagagcaacacagccaaaagctggaatcgcccttatttccaccctcacctccaagggtggaaacttgccccttcccatttctagagctggaacccactcctttttttcccattgttctatcatctctaggaccggaactaccttctcttctgtcatgaccctatctagggtggtgaaatgcctgaaatctctggggctggaaaccatccatcaaggtctctagtagttctggcccacctctttccccaccctggctccatgacccaccccactctggatgccagggtcactggggttgggctggggagaggaacaggccttgggaatcaggagctggagccaggatgcgaagcagctgtaatggtctgagcggatttattgacaatgaataaagggcacgaaggccaggccagggcctgggcctcttgtgctaagagggcagggggcctacggtgctattgctttaggggcccaccacgggcaggggcctgctcccagctgccacgctctatcatatggagcgaggtgttggggaaggcggggcaggcagcctgttgcaggcaggggaaggagaagagactgaggggctgtgacctctcctgaggcccccagcctgagactgtgcaactccaggtggaagtagagctggtccctcagctggggggcagtgctgtccagtggaggggagggctttcacgcccacccaccccctggccctgccagctggtagtccatcagcacaatgaaggagacttggagaagaggaagaataacactgttgcttcctgttcaagctgtgtccagcttttcccctggggctccaggaccttccctacctccaccaccaaaccaagggatttatagcaaaggctaagcctgcagtttactcggggggttcagggagccgaaaggcttaaatagtttaagtaggtgatgggaagatgagattacctcatttagggctcaggcagactcacctcacatactccctgctccctgtggtagagacacctgagagaaaggggaggggtcaacaatgagagaccaggagtaggtcctatcagtgccccccagagtagagagcaataagagcccagcccagtgcagtcccggctgtgttttcctacctggtgatcagaagtgtctggtttgcttggctgcccatttgcctcttgagtgggcagccctgggcttgggcccctccctccggccctcagtgttggctctgcagaagctctggggttcccttcaagtgcacgaggggttaggctgctgtccctgagtcctccattctgtactggggggctggctaggacctggggctgtggcctctcagggggcagcctctccatggcaggcatccctgccttgggctgccctcccccagacccctgaccaccccctgggtcctgtcccccaccagagccccagctcctgtctgtgggggagccatcacggtgttcgtgcagtccatagcgcttctcaatgtgtgtcacccggaacctgggaggggagggaacactggggtttaggaccacaactcagaggctgcttggccctcccctctgaccagggacatcctgagtttggtggctacttccctctggcctaaggtaggggaggccttctcagattgtggggcacattgtgtagcctgacttctgccggagctcccagtccaggaggaaagagccaaggcccacttttgggatcaggtgcctgatcactgggccccctacctcagcccccctttccctggagcacctgccccacctgcccacagagaacacagtggtctcccctgtccgggggcggctttttccttccttggagcgtccctgacggacaagtggaggcctcttgctgcggctgcaatggaggcaaggggctgcagagcccaggtgcactgtgtgatgatgggagggggctccgtcctgcaggctggaggtggcatccacactggacagcagggaggaggggagtgagggtaacatttccatttcccttcatgttttgtttcttacgttctttcagcatgctccttaaaaccccagaagccccaatttccccaagccccattttttcttgtctttatctaataaactcaatattaagatgtta

SEQ ID NO: 8630 - DNA, 12126 bp, Homo sapiens
ggcttcctccagttccggagtccagtggctgaccgccttgctggagcggagatgcagccgccgccccgaaaagtgagcttggccctgaatggggactcctggcgggctgggggaacggagggagctaagggggcatccgacttgtggtaggagacgggaagtcggaaggggtcagaccccaaaccagaagtaacagaggaaagagctcagcacccccccggccccgccccctcaccgctccctgcgcggagtgttttttaggtccttgcgctggggtcttcatcctctctttgccccacaggtgaagccggcccaggaggtgaagcttcgcttcctggaacagctgagcatccttcagacctggcagcagagggaggcggatctgctggaggacatcaggtagctcccccaacccccttcatttacactcaccttcgtcgttgtgcgccacttctccccaatatacatgtgctggggtggaggaacaggggccaagagctccccagccgacccatccacagccctcaccctaggcctggcctctccagatactggataggaatgctcccccacctaacccctcccaaccccctcccacccacataaacacacaggaaccctccctcaaagcccttgactccacaccactgcccccaaccccacaatcaaccttagggcagaatccctctccctcttccagacctgttggaaggctggcagacatcgtacccaggcccccatcagtcttcacctctaagcctacagatgaacctctggggtggggaggatcctgctggggcccggggcagtaaggtgagggtttcctgtgttgcagctgcccgaggtgatctcaaggactcccatcagtcccattccctctgggtgtagttacactctaggaacctggctccccccaaccgctccctcctgcccagagtagaggactgaggatgggagaacaggaccaaacataaccttatcccccacctcacccccgacctgcaatctccgcagatcctacagcaagcagagggcagccattgaacgggagtatgggcaggtatgggacttttctctggaccttacctcttgttccagcctctcttatatcaccagtaatgtctgtccatacctatccctattgtggtcaagagcagatgcctagagtcaagcagactggtgtcagatccctgctgtgtaattatagccatgtgaccttggacaagttacttaacctttcttgacctcagtttctttctctgtgaaatgggaataataataataccttaccttcatgtagggttgttgtaaggattaaacaaattaatgactataaggcatttagcaaagcaagtggcacataatgtacccaaagaatggtatgattatactctgatgtcatattctgccagttggggtgggtctttgaaagggaacttggttctgtgatggctttttcaccaggcactccagaaactggctggcccattcctgaagagggaagggcaccggagcggtgagatggacagcaggtgggccctatggagggggagggccacagaggccaaaaagtgatggggagctcagccccaggaacctgtggggatgaaggcctagcaagtggggaaggcacgtgagctgtaggtagagctgacacagcagcagcagaggagctgacccagcaaggacactgtgggtggggtggagggcaggagtgaggcttgtggctgagctaatgggctgatcgattgatgggctcccagacaagggaggatgggaaagcactctgtctcccatggtgttggtcagggggcagggggtgggggtggtctcatgaagctgtggagtgctctcctcctcaacacagaccttctctggggaggggcaggacagtgttcggtgcctggcgctgcctgctggatgccaccgtggctgggggccaaacccgactccaggcgtctgaccgataccgtgacctagcagggggtacagggcggagcgccaaggagcaggtgcttaggaaggtatggctcagaggttggggtgaaggaagagctggcttgggaccaaaggtggtctaggtaaggactttgtgtatgcatcccaatagggaacagagaacctccagagggcgcaggctgaggtgctgcagtctgtccgggagctgagccgaagtcggaagctgtatgggcagcgggaacgtgtgtgggccttggcacaggagaaggcggctgatgtccaggccaggtggggtcatggagagtgaggaagcccaaggttggggaacagggaggtggggctgtctaggggtggagccaagtcaccaaagctgggcctgactctgatctcatattctcccacttggggtgggcctgactcctttctctcatctgcacaggctaaaccgaagtgaccatgggatcttccactctcggaccagtctccagaaactgagcaccaaggttcgagggatgagggcatgagtgggggcagggaagagggaggcagagtagtctagtggtttggaacataggtgcatatgtatgaaagactgggttgaatccaggctctcctacttcctgggtgggtaaccttggttaatttacttgatctctgtgagccttattttcttctataaaatggagagaatacccttctttttcagtcctttaatatgcatttattgaggatctgtatataataggcactgttctagacattatggatacagtggagaacactaccaatggagttcctgccctcacagtctggttaagagagacagacagcaaataaatacttagattaagatgaaaataaaacaaggtactatgataaagaataacaagggggtagaatttagagggaggcctctctgaataggtggcctaactgtcaagaaggagctggccttgcaaagatctaggggaagaacattccagagagaagaaatggtgagtgcaaagggtctgaggtgggaataactttgtaggctcgaggaactgagagagggccagtatggctggagtactgtgagcaagggaacaagcgcttgaaaagaggtcagagagattgcgggggccagctcatattgaacctggtggaccatggtaaggaacagtggattttattttaaatgcgtgcagaaggcactagaagattttgagcaggagttgtgtgtatgcaacatttttagtgtagtgccaggcacatagtaagcactcaataatgtgagaatccattctggatctggcttctcaattggtcttggaaggactctgggggtctagggcttcctattgacatcagtttaccctcctagctgtccgcccagtcagcccagtactcccagcagctgcaagcagcccgcaatgagtacctgcttaacttggtggctaccaatgcccacctcgaccattactaccaggaggaactgccagctctgctcaaggccagttttaacccagacacccctatccctcagcagggagggaaaggaggacctccccctgcttcttgatccccatgacagtgggtggtgcaggggatcttgtctgtttagagtgagtagatgatacatacatgggctctggttctgctcctagctggctgcatggcattgtacagtacacttaaactcttccgaaccccagattcctcatcagggataaccctttctctgcctatcttatagcactagtggggctcaaaggagagaatggatgtgaacgtgttttaaacttctaagtgctctgcacacgagggcctttctcatgaagaatgtcttcttctctccttcctatacctcatgcccatcacctgtcaaatctggaacgagcctattttacagtagaggtctgggggaagggtggtgtcagtatcttggggttctctctaggccctggtcagtgagctgtcagagcacttgagggaccccctgacctccctgagccacactgagctggaagccgcagaggtcatcctggagcatgcccaccgcggggagcagacaacctcccaggtgagggctgtggcctctaagagcttccccggggatcctttttacccttccctcccaatgcagccctctttgcttcacacgttgtcctttttcttccaagaagtgctagggacagggttggagagtgagtcagtgaatgagtgactttgacttttcccaacccctaggtaagctgggagcaagacctgaagctgtttcttcaggagcctggtgtattttcccccaccccacctcagcagtttcagccagcagggactgatcaggtgagatcttcctgcttgttggaaccaggccacatataaaggcgattatgatttaggcctcctccattatctttgttttgtgttaacttagtgagtgtacaccgtggagagggggtttcagaactccagctcacctccctcccaacaggacacacacaaaaaaacacacctcagtccacctttcagtcacttgactgcgccatccttttcattctacctctgtcccttgacctggatcccatttctgaagctctgtatctctgtgtccacattacctgtgtccatgactgtaggcatgtgcccctttctctttgtccttgtccttggaggtcaagatagagtggaaaaaggagggaactggagagaaggagcagcctcaggtcctcctcacagcaccccctgacccattcaggtgtgtgtcctggagtggggagcagaaggcgtggctggcaagagtggcctggagaaagaggttcagcgcttgaccagccgagctgcccgtgactacaagatccagaaccatgggcatcgggtgaggtgggggggcacaggtgtcatgtgcaccttcttgtctcagcaagaagagctgagagaggggatcttggagccattgagggtgtcatggagctacagaggggagggaaaggtattttaaggtaacagtgtggcacaatagttaagagcacagtttttggagctagaccgacataggttcaaattctcttctgttgcttcctagttctgtagccccaggtaagggagtgacttaacctctctggacttcaatttcctcatcactaaagtagggccaataatagcacccacctcatagggaagattaaatgacataatgtatgtgatgcaactagcaaagtaccagtcccatagtaagtcatgccccacagtatttccacccacccctgttctctgccttcccaaccaggtactgcaacgactggagcagaggcggcagcaggcttcagagcgggaggctccaagcatagaacagaggttacaggaagtgcgagagagcatccgccgggcacaggtgaggcacacccctgaggttagagatcccaccttctcaggcaagccccactccctctactcctctttctgatggtgggaggaaggaagggagaagcagagagtaaacactgccgtcagccaggttccactaacttacttcctccccatggcaggtgagccaggtgaagggggctgcccggctggccctgctgcagggggctggcttagatgtggagcgctggctgaagccagccatgacccaggcccaggatgaggtggagcaggagcggcggctcagtgaggctcggctgtcccagagggacctctctccaaccgtgagctcctcccccaacactacccatccttacttagaagggaaaaactccagtggaaggcaaaccctataaaactggaatcacagttgtgcctaactcaaagggttattacgaggcttaagtgaaatcatcatatatcattctttgcataatttctggcatagagtcctcagtaaatttttattatgagcataatagaatgattaagaagtagggttctggggcagtctgtaagggctttgagtaccagccactccacttatgagctgtgcaatctcgaaaagtgacttaacctttctgaaccccagtttccttgtaaataaagtgaggttaatagttgtgcaaaactattaacactgggtcattatgaagattaaatgagacaatatacacaagatactttgcattgtacctggcacatagtatgcactcaattactgtaactctgctattactgttagtattatcctgctctgtggtgactgtggttgtgtacatggtgagtggatgggtgcacctgccttggaggatccatggtgtcctttagaggaaagatggaagagtgggagatagaaccagtgcttgagagtgggccccatatgaggtctgttctttgcccctctaggctgaggatgctgagctttctgactttgaggaatgtgaggagacgggagagctctttgaggagcctgccccccaagccctggccacgagggccctcccctgccctgcacacgtggtatttcgctatcaggtatgaatgggggtggggacctctgatgggcaagggtgggggacagccaagtcctgaatccttcgtgtgtggcccaggcagggcgtgaggatgagctgacaatcacggagggtgagtggctggaggtcatagaggagggagatgctgacgaatgggtcaaggtgggtatgggaccccgggctctgaccttgggttgggggcagtaggagggacttctctgtggcctccatagacccttctaggcaaagctagaagcctgagtagaagagagccagggtcatggactgctgaggtaagtctaatatctgttcacattgctgggtgagcaggctcggaaccagcacggcgaggtaggctttgtccctgagcgatatctcaacttcccggacctctccctcccagagagcagccaagacagtgacaatccctgcggggcagagcccacaggtacgaaagggaaattttgggttagaggaccctgggtatggagaaaaattgttaggggttgtagccctggggtgtcatggtcctggggcaccgctacccacctccctctcaccgtctctcctgggcctctgtagcattcctggcacaggccctgtacagctacaccggacagagtgcagaggagctgagcttccctgagggggcactcatccgtctgctgccccgggcccaagatggagtagatgacggcttctggaggggagaatttgggggccgtgttggggtcttcccctccctgctggtggaagagctgcttggccccccagggccacctgaactctctgaccctgaacaggtgaggcttaccttctccctgaactccccaggcacctctgggttgaccctctcaccccaatgaagcctcatattcatcttaatgcctcctctgctccccagttttacctcctacagtggcctgggcctcccatctcctatgggggggcagggaaaagggaaaccaaggcagccttcataggagtttggggggtcctactttagtgctggatagatctgagttcaaatttctattgtatgacttgggcaatgatttaacctctctgagcttgtttcttcacatgtaaaatggggataatacctactttagcaggctcactgtcataattagagataatcgaggtaaagccttcttttttttttttttttttgagacagagtttcgctcttgttgcccaggctggagtgcaatggtgcgatctcagctcaccgcaacctctgcctcccgggttcaaacgattctcctgtatcagcccctcgagtagctgggattacaggcacgtgccgccacgcccggctaattttctatttttagtagatacagggtttctccatttggtcaggctggtctcaaactcctgacctcaggtgatccacctgccttggcctcccaatgtgctgggattataggcatgagccactgcgccccgccgaggcaaagcctttagtgcagtggaatgcagaaggtgtttcaatataagatatctgttgttataatgtatatacatacagcagaaagagaataggagtgggcatcaggagaactgggttctagccagcactctgccaataactggcttcgtgattttggacagctggcttaacctgggtctcacttctaacataggagtcatattattaaaaatgcctacctcatggggtagtggtgaggattgaatgaattagtacacgtgaagtgctagcagaacacttgagacgtagtaaacataagcgttcaatacatattggctgttgaaatatttgtcagctacacccccccccccaccgaatgcaagcatttggccacttcctgtattgagaagtgatgaggaaggaactggagatgggatgagaggaaaagctggtaaaacctccccacatgccaggaataactctgtgcccaccccacctccagatgctgccgtccccttctcctcccagcttctccccacctgcacctacctctgtgttggatgggccccctgcacctgtcctgcctgggggtgagtggaaggaactgggagccctgggaggctaacagacaggaagaaggaggaagcttggactcccaggtcacgctctggtcctctccgtgccttcaggcatcttgcttggtggagagcacttgcctgggctctggagccaggctgactggttcaggtcccgctctgtcatctccaagtgtgtggtgggattctgaacctgtcttggcctcagtttatgttctttatgaggtaaggaaaaggtactagcttattgaattcttatgagagttaaaaaagatgcctgtggactacacagcattgtgcctggcacacagtaagtatgcagtcactgttattattttaaaaattagctaacttctctcacggtgtcctcccaatatgcaccttttgctcctagtgtccagatacctagctttgtatcattattttttctgatgcccacttttttttttttaaatgtctatagcagttttattttattatttattttagattcaggaggtacatgtgcttgtttgtcatatggatatattgcatactggtggagattgggcttctagtgtacctgtaactcaaatagtgaacattgtacctgataggtaatttttcaaccctcgcccctgcctccactcctacctttgccccctttggagtcctgggagtctgttatttccatctctatgtccatgtgtacccgttgtttagctcccacttataagtgagaacatgcaatatttggttttctgtttctgagttagttcacttaggataatggcatccaactccattcatgttgctgcagaggacatgatttcattcttttttatggctgtggaatgcctgccttttctaaaactttctggtacttccaccttgtccacaaggagtctccctccctggagttaccaccatctccaccaccccaagttcactttgcatgacttagcacttagtcatttattgtgtttgttgaggtttcattattggtttcttgacagccattgggggtgggagcactatgcatcctatctcccttagttttgtaccttgagcagagctgattatacagcagttgcccaataaatgttgaggacagtggatagagtgatggattttatggtctaggatggtgaccattaatttaacaaatatttatagaatgccactgtcctaagtgctggagatacagcattgaacaaaacaaagtctgaagactgacttgtggttcttatttccagacaaagccctggacttccctgggttcctggacatgatggcacctcgactcaggccggtaagggcccttgccttggaggagattgtatgtagaggggttattccaaccagtcctgttttgtctgcagggctgagggaatagacagggatacccttaagggagaactctggagcactaactgtgtgttccctacagatgcgtccaccacctcccccgccggctaaagccctggatcctggccacccagatcccctcacctgaaggccagggaagccttgacccccagtgatgctgctgtccctatcttcaagctgtcagaccacaccatcaatgatccagagcaacacagccaaaagctggaatcgcccttatttccaccctcacctccaagggtggaaacttgccccttcccatttctagagctggaacccactcctttttttcccattgttctatcatctctaggaccggaactactaccttctcttctgtcatgaccctatctagggtggtgaaatgcctgaaatctctggggctggaaaccatccatcaaggtctctagtggttctggcccacctctttccccaccctggctccatgacccaccccactctggatgccagggtcactggggttgggctggggagaggaacaggccttgggaatcaggagctggagccaggatgcgaagcagctgtaatggtctgagcggatttattgacaatgaataaagggcacgaaggccaggccagggcctgggcctcttgtgctaagagggcagggggcctacggtgctattgctttaggggcccaccacgggcaggggcctgctcccagctgccacgctctatcatatggagcgaggtgttggggaaggcggggcaggcagcctgttgcaggcaggggaaggagaagagactgaggggctgtgacctctcctgaggcccccagcctgagactgtgcaactccaggtggaagtagagctggtccctcagctggggggcagtgctgtccagtggaggggagggctttcacgcccacccaccccctggccctgccagctggtagtccatcagcacaatgaaggagacttggagaagaggaagaataacactgttgcttcctgttcaagctgtgtccagcttttcccctggggctccaggaccttccctacctccaccaccaaaccaagggatttatagcaaaggctaagcctgcagtttactctgggggttcagggagccgaaaggcttaaatagtttaagtaggtgatgggaagatgagattacctcatttagggctcaggcagactcacctcacatactccctgctccctgtggtagagacacctgagagaaaggggaggggtcaacaatgagagaccaggagtaggtcctatcagtgccccccagagtagagagcaataagagcccagcccagtgcagtgccggctgtgttttcctacctggtgatcagaagtgtctggtttgcttggctgcccatttgcctcttgagtgggcagccctgggcttgggcccctccctccggccctcagtgttggctctgcagaagctctggggttcccttcaagtgcacgaggggttaggctgctgtccctgagtcctccattctgtactggggggctggctaggacctggggctgtggcctctcagggggcagcctctccatggcaggcatccctgccttgggctgccctcccccagacccctgaccaccccctgggtcctgtcccccaccagagccccagctcctgtctgtgggggagccatcacggtgttcgtgcagtccatagcgcttctcaatgtgtgtcacccggaacctgggaggggagggaacactggggtttaggaccacaactcagaggctgcttggccctcccctctgaccagggacatcctgagtttggtggctacttccctctggcctaaggtaggggaggccttctcagattgtggggcacattgtgtagcctgacttctgccggagctcccaatccaggaggaaagagccaaggcccacttttgggatcaggtgcctgatcactgggccccctacctcagcccccctttccctggagcacctgccccacctgcccacagagaacacagtggtctcccctgtccgggggcggctttttccttccttggagcgtccctgacggacaagtggaggcctcttgctgcggctgcaatggatgcaaggggctgcagagcccaggtgcactgtgtgatgatgggagggggctccgtcctgcaggctggaggtggcatccacactggacagcagggaggaggggagtgagggtaacatttccatttcccttcatgttttgtttcttacgttctttcagcatgctccttaaaaccccagaagccccaatttccccaagccccattttttcttgtctttatctaataaactcaatattaagatgtta

SEQ ID NO: 8631 - DNA, 292 bp, Homo sapiens
tccgacatgaggccctggggggcgagcgcgggccagggcgcctcctgggtttagggggctgcagctgggaatgggggaggggtaggaatgccgtcctcaggatctgaaacaagcacgtctaagacgtccggctgaggtccggccccaccccctacccaaccagggagctgtccgggccaggagtgctgtttcgcctttcggcaagaggtcagcggcaacgcaagctctctaccacgaccctggtcccgcttccccgacgccccgagcgttcccctttccagcttgttcgcgc

SEQ ID NO: 8632 - DNA, 13467 bp, Homo sapiens
ttttctctgcttttcgctaccccggtcactctcatttctctcccctattccttgtctcttcccccatccccctttctcctgtcctccccctgcctctacagtggttctccccgctgagctgccaccagctgctgggccccgggctgctgcggctgggccgcctatggctgcggtccccctcccatacagccccggcccctggtctctggctgtcagggtttggcctccttcgtggtgaccacctcttcctgtgctcagcgccgggcccaggccccccagcccctgaggacatggtgcatctgcggcggctacaggagatcagtaagcggggaggtttggggggacagggatgaagggtggccatgcgggtgcatggaagcagacctttattatttgggggttcttatgggaaacagcagaacatggtggcttcaggtacaagctctgaagggaaactgcccagctttagaccccaccttcatcacttcctagctgtatatcctggacaagttatttaacctctctgtgccttagtttcctcatctttaaaatgggcacaataataacaccttcctcagagggttgtagtgaggttcaaatagggtaatgcatctaaaacatgtatcgcagagcctgacaagcattttttaagtgctcaataaatgttgttattattattattattattatttttttttttttttggagacagagtcacgctctgtcccccaggctggagtgcaagggcatgatctcaactcctcaactcactgcaacctccgcctcccaggttcaagcaattctcctgcctcagcctcccaagtagctgggattacaggtgtccgccaccacgcccagctaatttttgtatttttagtagagaaggggtttcaccatgttggccaggctggtcttgaactcctgacctcaggtgatccacccaccttggcctcccacagtgctgggattacaggagtgagccactgcgcccggtctataaatattattattatttggaatcacttgctggttgggtcctgggagaggggactgggtgccctcactgctttcctttctcctaaaagaggaacaatgtaagataatattttaggactttggaaacaagagacctgggtttgtgctcagccttgccattttatagcaagtaatctggggcaagttacttaaactttctgagattaatgtgtcacctataaaatgggaataatagtacataactcataggattcaactgaacgttttttgtaatgctcctagcctggcatctatgcacgttaagcatttaataaataatagtctctataatgaagacgataatcatgaaaatgtccactgattctcctcccaggtgtggtttctgcagctgacaccccagataagaaagagcatttggtcctggtggagacaggaaggtaaattgcccctgcccttgacctggggctccccttcctggagcagagcccatactctgcaacctggcctgctgggccattgcccacttcctcaaagtttcttcccttgctccaggatgatttgggttgggtgttgctgccctctgctggtggctctgggaagtctggtccccatgcatctgggcctgtcggagctggctctgattcaggcctctggggtctcaggaccctgtatctgcaaggagagggccggctggacttcacggcatggaacgcagccattgggggcgcggctggtgggggcggcacagggctgcaggagcagcagatgagccggggtgacatccccatcatcgtggatgcctgcatcagttttgttacccagcatggtgagtaggcactggctggtactgagccaatgggggtggggggtgggggtgatgagggggtggagaacgtgagcacagccagggtggaacgtgagcacagcctggaagagctttgcctccagaaactgcagctggaccccagctggtcatttgactcttggcaggctgctttgcttttctgaacctcagttccatcatctgtaaaatggggccaacggtcctcattttccaggataattgtgacagtgagacaatgcctgtcaagccttgagcgcagggcctggcatgtagtaagtgttcagaagtttcgtcagagtgtggagtaggggaggagcactgaaaatgtgactgaggacacagagccatggcaaacagcgagcagctgcgaggtgagagctgagctgtgcagcacattcccagaagttttaagcagaattattctgtgtgggaggttttctgggcttaaatggtcagctgtgcaagtggcccccataattctttgtgagtttttttggttgttgttgtttgctttttttttgagatggagtcttgctctgttgcccaagctggagtgcagtggcatgatctcagctcactgcaacctccgcttctcgggttcaagcaattctcctgcctcagcctcccaagtagctgggattgcaggcgtgccccaccacacctggataatttttatatttttagtacaggtgagttttaccatgttggccaggctggtctcaaattcctgacctcaggtgatccacccaccttggcctcccaaagtgctgggattacaggtgtgagccaccacacctggccctttgtaagttttttatcctaaataaggaccgaaaagaatctatttctcctgtgaaccctctttagaaggctggactcttaagaaggaaaattcacagaaaactaaggtgggcagatccctagatcatttataatacctaatacaatgcaagtgctgtggaaatagttgttatgctgtattgtttttatttgtattttgttgttgttatattgttatcttggggtttttttccaaatatttttgatgtcggttgaatctgcagttgtggagcccatggatacagagggctgactgtaaggaaaaaaacagcgcctccacaaacatacacataattgttactagtcatgggacatggaaagtcagtggctaataacattttccatgccttggcagtggccttgttcagtgacctcccccactcgctacatccttatcctcttctcagcctctctcgtgttcgaaggaggaaataagtcagaggcccagtgagaaagccctgaagaaagaatatggggccgggcgtggtggttcaagtgtgtaatcccagcactttgggaagccgaggcaggtggatcacctgaggtcaggagttcaagaccagcctggccaacatggtgaaaccctgtttctattaaaatacaaaaattagccagccatggtggcgggtgcctgtaatcccagctacccaggaggctgaggcaggagaattgctgtgaggtgaggttgcagtgagctgagatggcaccacttcactccaccccgggtgaaagagcaaaactctgtctcaattaaaaagaaagaatctgggtgttcatcccctcccctccaaggttcctgcaccaccattgtttagtcagcatacattggttgagctgctaccgtgtgtcagacactggggatatggcagtaagcagggtgggtcctaggagggtcctaggaagcttatttattacccatctcttaggtaataaataagaaaacaaatatagtctgttcttgttatttgtggtagttatgctctaagtcactgcaaacatttaattagtgaatactggatcactgccccagaggaaatacagggttagcttcctgctagcctctggttacaataacattttagtcaagtgatcaatatgtatccttgttttgtgtgtttttctgtgtaaagagaccttattttatatatattgtttgatttgttaacactgaactcaaggccaacagcactgtaactcaagctaatctaacacatgtattttctctgtaaggcatgtcacagctttctcacacgtagaaacactagacagcatttcagcactatacttgggccattttaaacagtgaagtcaccaacaaaaagcacaaaaatatggctgtaaatataccattaaaaggatacacttgtttagagtaagaacatgcacattggggaggggacttaaatttttcttcactctgttcataaatgatgatgaaaatgccaaaagtattgattttggggttacaaataacttttagcaagtaggagaatgtgcagatatggaatccacagataataagggtggactataaagtgatttcagagagtgctatttaaaaataaaagtggtgaggagatacagtgtgatgggggttgtacttgtgacagtgaggtcagggaaggactttctgaggatgaggactccagcagagacctgagaatcaagaacatggaggcatagatctcctcctctctgaatcccatgcccccatcagccacataccacatagggaggccacagatgggccgtggtgggtggtggtagcctttgcaccatggtgagcagagacggctggctctcctcagggctccggctggaaggtgtataccggaaagggggcgctcgtgcccgcagcctgagactcctggctgagttccgtcgggatgcccggtcggtgaagctccgaccaggggagcactttgtggaggatgtcactgacacactcaaacgcttctttcgtgagctcgatgaccctgtgacctctgcacggttgctgcctcgctggagggaggctgctggtattcctaagatccctgagagccaaggcccaaccaggatctctgccttcccccaccagaatccatggtttggcagccctccgccccatcacttcccaccctgggggatcatccagagacttggctcagggggaggtgggaagggggcagagacacatccatcctgcatttgtgcctaaaaatccctccctctgtaccagctgccactctttcttcccgggtcctccccaaccctcctccattccatccccagagctgccccagaagaatcagcgcctggagaaatataaagatgtgattggctgcctgccgcgggtcaaccgccgcacactggccaccctcattgggcatctctatcggtcagtatggctagaccctctgcagaacccttcctcacttcaatctgaccctgcactttcattcatttattcattcattcattcatttgttcattccacaaacagttgttaagtgaaggtatcatagcactaaggttcagagaatggatttgagggatcaggcagacctaggctttaatctggtgccgtcattctagctgtgtgactttgggtaagttacttgttctctctgggcctcaatttcttcatttctaaaaggaagtaatggatgatgtaatgaatcatatccacctcatagtttatgagagagttaaatgaaggctgggcgcgtggtgtctcacacctgtaatcccaacactttgggaagcaaggtgggcgggtcatctaaggccaggagtttgagactagcctggccaacatggtgaaacccagcctctactaaaaatacaaaaattagcctggcatggtggtacataccagtaatctcagctactcaggaggctgaggcacgagaatcgcttgagcacaggaggtggaggttgcagtgagccaagattgtaccacttcactccagcctgggtgacagagggagatcttgtctcaaaaaaaaaaaaaagaaaaaagaaaaaaggaaaaaaaaagaacaaaaagagttaaaattcataaaattcttaactatagtacatgccagtacatccggcatgtcataagccttcagaaatggttagcaatcaatattattttgttttattatgcgatgtcagggaaagggttagatataagaaacacaaaaatgaataagatgcacatctacctttaccaatctgttagggagacaggcctttgagcaattctggggagaagccatttctgtattgcactgattatactatattacaggggccaggtatggtggctcacacctgtaatcccaacatgttgggaggccaaggcaggaggatcatttgagcccaggagttggagaccagcctgggtaacatagtgagacatcccatctctataaaagataaaaataaataaataataaaaatatactatattatagggattggtcaactacaggcccatgggccaaatccagcttgttgcctatgtttgtaaataaagttttgtacataaagtgtaaagccacacccattcatgtatatattttctttttttttttttttgagacggagtcttgctctgtggcccaggcgggagtgcagtggcgcaatctcggctcactgcaagctccgcctccagggttcacgccattctcctgcctcagcctcccgagtagctgggactacaggcacccaccatcacgcccggctaattttttttgtatttttagtagagacggggtttcaccgtgttagccaggatggtctcgatctcctgacctcgtgatccgcctgcctcggcctcccaaagtgctgggattacaagcgtgagccaccgcgcccggcccatgtatatattttctatagctcctttcatgatgcagcaacagagctgagagttagaacagagactgtctgtcctgcaagcctaaaatgtctactatctgtccctttacataaaaagtttgctgattcttgccttatctgtctcccctagactgggagctccttgaggccaatattatcttactgctgtattccaagcacttagcccaggcatacaatagggactcaataagtgtttgctgaatgagtggctacactgatgaagaccgtggcacccctctgcagggtgcagaaatgtgcggctctaaaccagatgtgcacgcggaacttggctctgctgtttgcacccagcgtgttccagacggatgggcgaggggagcacgaggtgcgagtgctgcaagagctcattgatggctacatctctgtctttgatgtaaggctttcctgacccctaacccacaacccctttcccctacccttgcaggacccagagactctggatcctgatcaccccaacaagcccccagcccaggcctctggtggccagctataccaggaactacctcccagagccctggcccttcttctcccacaacttcacttccaacatcctcacccccttggttcttagctcttctggcctccagccctcttaaacaggtcctccttggccttgagatcttcccggcagatcctcttccagcaccccaacactctcttttggctctttcacagatcgattctgaccaggtagctcagattgacttggaggtcagtcttatcaccacctggaaggacgtgcaggtaactcgtcctgaccttagtctcctgaatggggcaggaggagacatcaggacaggaagctgactttctgcccagttgaggaagtttccagcctgtccttctggacactagcactcagctctttgggagacagggggaacccaatgagagaagtgctttggggagtggggtttggttagggtttgctccatttgttccaccatgaggattcttcctggtgataatcttggcactggatagttggttttggttttctgtgggaacatcaagtgagaccatactactaagtgtaagagatccaaggacgagttagtaaagtcagacaaagcagtgagaataataataataaatataatagcaaacatagctgaggacttactatattccaagcatctctaatctcatgttagtatgatacaactccatgaagtaggtaatctcatttttttcaaataaacgggttcagcgggtcatttattcaaggtcaccctgtagcgagtggcagagagaccaggcagtctgactccacatctgtcctcccaaccactatgatgccttgggaagtacatgtgcagcctaaagatgcagttctgccactcccagaggtctcccttttaagagcctgagtgacattggggttgggaggagacctttgttggaagagtcacttatgaggcaacacgaggaaccctctgactttgatgtcttttgcaccctttttttgcccttctgacttttttacccctcccctcagctgtctcaggctggagacctcatcatggaagtttatatagagcagcagctcccagacaactgtgtcaccctgaaggttggtcctgaggggactggaggggaaataagaggatagtgaggttccaggggcaatagcctgaccagcatgaattctctgctcttgccctgaccccaggtgtccccaaccctgactgctgaggagctgactaaccaggtactggagatgcgggggacagcagctgggatggacttgtgggtgacttttgagattcgcgagcatggggagctgggtgagtatgaccacgcctgtgtgttcatgcatgtgtatatgcgtgtgtgtggttgtgtggtcaaggtcatcagtgacttcatgttaccaaatatgaatggtaactcatggatgactcatccactcatccatgcgaggggacattcaacacagttgactcactccctctttctcagtattcttccatcttggccttagtgacccccacaagctcgtagtttaccttctaccttaaagggagcttctcttcctcttttgcccagactccaaatgttggagagacccacggctcaatcctaggcccttttctctcatctatctacatttctccttggatgaattaacccattctcatggttttaaatgccattaataacctgacacccaaatttgtatatctggcccacatctctcctctcagctccagactcacatatccaaatgcctactcaacacctccacttctgacaagcaactcaaatgtaaaacatctaagaccaatttagatgatgtctagtcccctttcctcaaaaaaaaagcctaggccattctccaatttttcccaactcagtaaatggtaccacaattcacccagtgattaaggccagaaacctgggagtcctctgggactcctccctttgtgtcatcttcatacacaactcaccaactagtcttgtcgattccattagaatcaatcacttctctccatctccactgctaccaccatcctagttgaagtcatcattatgtttttgtctgtcaacagtaaccactaaaatgtgtggccccagaaaggggatagctggacaatgttccatgcttgcctccctacaatccattttccatgcagcagccaagtgaatatttcaagcataaatcagctcatatccttcctatggttaaaacccttcagtggcttcccattgaacttaaagtatcattccagtcccttaccatggcccacatggccttgaatgtctgacccctgcgtcctccatgcctcatctcacatcacctgttctcgtatctatcctctttgctgtagctacattggctgtttagttccccaaatacatctttcctgattgccagcctttgttcttgcattttgtcatgcttgaaatcttctaccacccaatcttagcatggcttgctcttcctaatccttcagatctctgagtctcatcttcaagtgccacttttgaaaggtcttgcctgactaccctatctcagttgctgtcctgttgcttgctcagtttattgtttcttgcaaagcaattatttgtctgcaattatttttttgtctgtaccctcactagactgtgtgctttgtgaagggaggccatgtgtatcatgctcaccaccgtatcccagggccagcacagttcctggcatagagacagtgaaaaataaatgtctgtggttggatagttgaatggatgaatgaatgactggtgagagctgggggcttagtatggatattctgattgatatataaaccctcacctttccccttaagagcggccactgcatcccaaggaaaaggtcttagagcaggctttacaatggtgccagctcccagagccctgctcagcttccctgctcttgaaaaaagtccccctggcccaagctggctgcctcttcacaggtgagcctccttcctctgcccagcatcccccaggtctctcccctagcatcctccacccaggattgcccatctatgcccaggtatccgacgtgagagcccacgggtggggctgttgcggtgtcgtgaggagccacctcgcttgctgggaagccgcttccaggagaggttctttctgctgcgtggccgctgcctgctgctgctcaaggagaagaaagtgaggccctggggccagaggtgtgggatgctgggtggccatggagaggagccatgactgcacccaccctctgactccacagcccatactctcatcaatctcattgcttccctgcccccgacttctgtgaccctgtgaccacagaccccattgcttccatgacgtcttgacctcattaaccatgatctctcatctctccatctcgctgactctgtttctgttctcagagctctaaaccagaacgggagtggcctttggaaggtgccaaggtctacctgggaatccgcaagaagttaaagcccccaacaccgtgagttttcttccccagcccgcacttccagggccttcctgccttcacccccctgccctttctgactgccccatcactgttctttgtctcccaggtggggcttcacattgatactagagaagatgcacctgtgagtacctcctgccctggcttctcctctggcccacctctgcaccctgtcttttctcttccctctttgtatgctccattcctatagctgtgaccctctctctccctctgattccattctgatcaccccagctacttgtcctgcactgacgaggatgaaatgtgggattggaccaccagcatccttaaagcccaggtgaggggaaagaaaaggctgagggctgggtctgtggtccccctggggcccagctgtcctcctcagtgcctttcatgcccactgatgccaacccctcacgctcccaccagcacgatgaccagcagccagtggtcttacgacgccattcctcctctgaccttgcccgtcagaagtttggcactatgcctttgctgcctatccgtggggatgacagtggagccaccctcctctctgccaatcagaccctggtaaggcaccccaccctgccccaacccgattcctgtcgtgtagcccttgtcacattgcagtaggcagtggtgtgcctgctagcctggtgccaccctatgctcactggtccccctcccttctgccttcttcacccccattccccacccctgtctcctgttgctagtcctcactgtgtctttatgtctttccttccccttgtccccaccccacctgtgtccagcggcgactacacaaccggaggaccctgtccatgttctttgtgagtattgtgcctgctccagcggtgtgcctgtcaaccctgtattcctctgtgctgcctgagccccgggtgtgctgttttcctcatgtaggccatcagggggtgtgtgtgtgtgtgtgtgtgtgtgtgtgtgtgtaggccatcagggtgtgtgtgtgtgtgtgtgtgtgtgtgtgtgtaggccatcagggtgtgtgtgtgtgtagagagagagagagggagagcgaggaaaagggagagggagaagggacaggacagagagagagaggagccagaaagaatgagaaaatgagggatgtaagatgcagtaataaaaggagaaaggtcgggcacagtggctcatgcctgtaatcccagcactttgggaggctgaggtgggtggatcccctgaggtcaggagttcaagaccagtctaatcgacatggtgaaatcccgtctctactaaaaatacaaaattagctaggtgtggtggtgcatgcctgtgatcccagctacttgggaggctgaggcaggagaatcacttgaacctgggaggcggaggttgcagtgagccaagatcgcaccactgcactccagcctaggcaacaagagtaaaactctgtctcaaaaaaaaaaaaaaaggaaaaagttgtcacagaatctgtgaaatagaaggaaagtgatgaagtgaatgcattttggagttagacagacctgggttcaaaccccagctctaccattcactcattatgtgatgctgggcaacttacttaacccctttgcattcagttgactcagtgtaacccactgcacagggttgttccagaatcatacatgccaagtattttacagcatctggcccagaggaagagctcagtaaatgttagtgattcataatctggtaactttaactatgtgcccactcctgccattccattcccatccagccaatgaagtcatcccaggggtctgtggaggagcaagaggagctggaggagcctgtgtacgaggagccagtgtatgaggaagtaggggccttccctgagttgatccaggacacttctacctccttctccaccacacgggagtggacagtgaagccagagaaccccctcaccagccagaagtcattggatcaaccctttctctccaagtcaagcacccttggccaggaggagaggccacctgagccccctccaggccccccttcaaagagcagtccccaggcacgggggtccctagaggaacagctgctccaggagctcagcagcctcatcctgaggaaaggagagaccactgcaggcctgggaagtccttcccagccatccagcccccaatcccccagccccactggccttccaacacagacacctggcttccccacccaacccccatgcacttccagtccaccctccagccagcccctcacatgaccctaggaccagcagtctgagagggtaggtaccagaagacccagaaactcttatcgtggcactgttgcagcttcctctgccctggctggaaagactccagaatccagtgtggtgctgtggaaggagcactggactaaaggcttcagtggctgcgtgtcccaggacaggtcatggcccctctctgggcccagcccatttatctataccatgaggtaactgaagtaaggagagcagtgaatgtcaaactgtgtttcttagagccataagccccacatattatccctgaacaagggcagctcctgctttatatatttgatacgtaggggttccatgagagattttgggttttaaaggaatggttttactgcattaaagaaaaaaaatgctttggaaaccagaggcctgggtgatgttaaagtctatcctgtcccacttcctacattctgggactaccgtgaagcctggagtagggagagcgagtttgggagctgggactcggggagtcaaaaatagatgagtaattgtcaataaacctgggaaccaaaagactaccattctcattcattcattcaacaaatatgtattgtgcacctaattggtgccaggtctggggatatagcatgaacaaaacaaacagggcccctgctcttatgaatcctccgttgtggaggg

SEQ ID NO: 8633 - DNA, 292 bp, Homo sapiens; identical to SEQ ID NO: 8631

SEQ ID NO: 8634 - DNA, 292 bp, Homo sapiens; identical to SEQ ID NO: 8631

SEQ ID NO: 8635 - DNA, 668 bp, Homo sapiens
caaatacctgttgcctataccagatggccataccaatacccaaatactgacaaacgtttaaaagaatttacggtactcccttcactttagaaatgttaacagttcaagtccaacagaacttaaaggaaaaaaagagaaatgttaacagtaagtaaggcatttatttaacataatctcaactaaagtccaactaaagagcttcccaggcaaacactccttttgcacttattttgaagacaaagatgcacaagttaaaatcctaatattaccattttattaaaaataacttttaagatccaatctgtggccaatattcgatctggatgcaaaaccctggcttccagacaggccagccaggggcactgctctgaaggtcattacttaagtatcccagtctcctcagtctgacagacctacccctgcccagccaatctccacataacagctagttgttcataataaatcccatcagatccccgcttaactactccccttcaaaggctccactgccctcaggaaatagttcaaccaccttctgtagaaaggccttctaaaacctctctccgagtctgtctgctaatctctcccacttgacactccccaggtctctggccagctgaacttcccgggcatttcctgaacaatgcccctcaataaaccacatgcaa

SEQ ID NO: 8636 - DNA, 672 bp, Homo sapiens
caaatacctgttgcctataccagatggccataccaatacccaaatactgacaaacgtttaaaagaatttacggtactcccttcactttagaaatgttaacagttcaagtccaacagaacttaaaggaaaaaaagagaaatgttaacagtaagtaaggcatttatttaacataatctcaactaaagtccaactaaagagcttccccaggcaaacactccttttgcacttcattttgaagacaaaagaatgcacaagttaaaatcctaatattaccattttattaaaaataacttttaagatccaatctgtggccaatattcgatctggatgcaaaaccctggcttccagacaggccagccaggggcactgctctgaaggtcattacttaagtatcccagtctcctcagtctgacagacctacccctgcccagccaatctccacataacagctagttgttcataataaatcccatcagatccccgcttaactactccccttcaaaggctccactgccctcaggaaatagttcaaccaccttctgtagaaaggccttctaaaacctctctccgagtctgtctgctaatctctcccacttgacactccccaggtctctggccagctgaacttcccgggcatttcctgaacaatgcccctcaataaaccacatgcaa

SEQ ID NO: 8637 - DNA, 672 bp, Homo sapiens; identical to SEQ ID NO: 8636

SEQ ID NO: 8638 - DNA, 124 bp, Homo sapiens
tctttgtgtgccatccacacccaactgcaactagagactttcattagcccctttctgtctcagagctttcggtggttctacaagtcaccagcctggatctctaacaatgtgtctctccaaagct

SEQ ID NO: 8639 - DNA, 124 bp, Homo sapiens; identical to SEQ ID NO: 8638

SEQ ID NO: 8640 - DNA, 8130 bp, Homo sapiens
agacagagtcgccctgttgcccagtctgtagtgcagtggtacaatcacagctcactgaagacttgacttcccagggttaagtaattctcccacctcagcctctggagtagctaggactgccgatgcacaccaccatgcccagctaattttttttaatttttcatagagacagggtctcgctatgttgcccaggctgatctcaaactcccggcttcaagtgaccccctgcctctcaaagtgtgtcatccaccatgcctggccccactcacaacttttcttattactcctaagaataaacaaacttcagctgctgaagcaagtttttgtgaactatatcacctaccttggtcgatgacccagagggtgaggctgttgttggggtccttgagagacttccggggcaccgctttaatcaggagggtcagggcattgtctcggccttggccagagacccccacctctgtcagcagatctaagaggttactgatgaggaccttcagctcccgggcaggatctggcaacaacaagaagacatcagtgggctccacagcagcccagcccagtttgacccttcaacttctccaacaaaccagggagacacagggaaggggggatccgcatcccaggctccagactgagctccagctttgtcctgaggcaccttggttgctgagaatctagagtaaaataatgtcaccaaaccgtattccaaacaacctgcagctgcaagtctggtccccaaaaaactggcctggctggctcagccccatcccttccatgacagtaacgtccaaaagaccccagacctgcttccactcacccacaatgatggcaccttctttgcctcggaagccttttttgacaccttccttgagggcatcaaacataacctgcagcaggtggcaggcagccagggacacagcctggctttccacgcccaggatggagactactcgccgagttcccagtatgctcagggttgccactgtctggggtgggagaggtaaacagaaggaagcttccagttgttgaagggcagccacagagatccctaactgtgagttagaggatacggccagaaggagagaattgggtggaaggcccagctccaggtgaaaacaacacagaatggatggcatgacccagggtaatggcaggataattttgttagaaagatttcctaaaggagacattacacggcaatgccctactacctctccttggtgccagagaagacatagtatactgcagccctgggagcagctgccttagctcatgcctccccaagaaaaagacctatacctagacgaagctacctgaccaccaggcttaatggtctagttcttccccagtctaaaccctgaggttctttccacaccctggggatgtggacgtcacgtacacggaatgggcccgtgagacctctccacccagtttctttcttttttctttttttttttttttttttgagacggagtcttgctctgtcgcccaggctggagtgcagtagcgcgatctgggctcactgcaagctccacctcccaggttcacgccatttccctgcctcagcctcctgagtaactgggattacaggcgcccgccaccgcacccggctaattttttgtatttttagtagagacggggtttcaccgtgttagccaggattgtctcaatctcctgacctcgtgatctgcccgcctcggccttccaaagtgctgggattacaggcatgagccaccgcgccgggccctctccaccctgtttctaagctggagaaccctagaaggcctgcttggtccactgagcccaaatcctgactgcttccacttagcagctaagtgtccttggccaagactgtgaactggaatggaccggaaggcaggagggaacagaatgcacatgcttttaacagtcttagccttgggagacccagaatgcagcccaagcttagcctaaagagatttcattgactatttcacagtttcacccctatctaggaattgtgggctcctctaaaagcaaccaagggcctagtctttggtcccctctcccctggagcaagccagctcaggtaagagctgggggcatggacttcaccacactggcccaggagcaggactgttattgctgcactgtccatgctgggccaccaccatccatgctgagaatcatgtcgggatcaagccctacgtgtccggtcactgtctcgatggtagatgctgtggtggccaggcacattctgggccatgagcttgcttgtgccatatggacattgaaggagtcagtgaccaatgtgtttttgtgagttggctgcaggaaagctggggctcacacttgtaagccccctacaaagcaagtgcttggggtaccccaaggctgtttttgctctttctaccccacttcatcctaatttatgttggtctttttcacgccatttttattttttctctcttgttacatgtatctccttgtactctgccttttctttttttgttgttttgttttgttttgtttctgagatagtctcgctctgtcacccaggctggagtgcagtggcgcgatctcagctcaccacaacctccacctcctgggttcaagcaagtctcgtgcctcagcctcctgagtagctgggattacaggcgtgcactaccatgcccggctaatttttttatttttagtagagacagggtttcgccttgttggccaggctggtcttgaactcctgacctcaagtgatccacctgcctcagccccccaaagtgctgggattacaggtgtgaggcaccataacctacctaagttctttttagaataaggtaaggggtagagggtggaagagtggatggatggatggacgggcagatgggcggatggacagatgggtggatggaggaatggatggacagacagacaaagggactgaagctgtaaccagcctctccactccacctacccgtgactgatgctcagagcaaatgccaaccagcgtacgcagagccgccagcatgaggtcagtctctcccatgtccagtaaacgttgcaagagctgaaccccattactccggaagatcttctccgctccagcatcctccctggccagcaccaccaggttctgagaagcctgcgtcaaaggaagcacattataatgttgacactgcacacggcataggatgcagcactggtgagcaggggccccgagccctggacctctctgcttccacttcacagttgagtgaccacggccaaaaaataacctctttgaagcttagcttcctctgtaaatagagggaagagccttctctcgggattgatggttagagcaaatgagtccccagcagagcctgaggggctgggacagtgcctcagttacctctgtacacccagttcctggcacagggcctggccaacaaggtactctgtgaacactggttctctttccttggttcacgctaaagccccagaccctcagagctcccatccaggccccgtgagcccagctgcacgattggaggagcggcagagcaaggcagcagtggcttcgggggcctatggatgggtggctctagtgggagctcactcactgactcagcccagggcctataccttttgctttttctcagtgcccttctcttctgggtccaacagtatctgaaacatctgttccactttggcatccgtcgaggacatgtatcgcacctagacaaaccaacaaagcatggaagaaatcacggctcttggccagagacatcacactccctattcatttgtctccagctcctcactctgggaggcacagtaaagatgtccaggctcagggctagcacctagctaccctgggcaggaagagacttgcctggcagtgcctcctaaatttcccgcacctgtttttctttctgagctatttcctgcttgggcagcaggggctgcgccgatgctggagtgccttttcggaggggaggtatcctgtcagctacgaggcaacccactcccagtggtgccatctacattgtggcagcgtgaatgggcttcccatggcactgaactcagcatttatacctcctgccagggagctggcagatcgtgaggtagttgctaacacttcctttagctccagaattctcttttcactgttttaaaaataatctgagctgggcgcagtggctcccgcctgtaatcccaaaactttaggaggccaaggcaggtggatcacctgaggtcaggagttcaagactagcctggccaacaaggtgaaaccccatctctactaaaaatacaaaaaattagccgggcgtggtggcagatgccggtaatcccagctactcgggaggctgaggcaggagaatcacttgaacccaagatgcggaagttgcagtgagccgagatcacgccactgcactctaacctgggcaataactgtgaaactctgtctcaaaaaaataaataaataaaatctgaagccaggcacggtggctcacgcctgtaatcccaacactttgggaggccgaggtgggcagatcacctgaggtcaggagtttgagaccagcctggccaacatggtgaaaccccgtctctactaaaaatataaaaattagccaggtgtggtggcgggtgcctgtaatcccagctactcgggaggctgaagcaggagaatcgcttgaatctgggaggtggaggttgcagtcagcagagatccactgcactccagcctgggtgacaggataagactgtctcaaaacaaacaaataaataaataaataaataatctgaatggggaagatcatcctaggcctactcccccaccccccagagtcctgggcatagatggtggcacaagcctagcatgtggaccacccgccttcctctcttgcatccatggcagccatgactaaccagtcatggcacgttcccctgcttggctcaggcaatctgcttcctaattcttctcaacataggactctgggcagccactgccaatcagagttggcattgagagaggaaacctatttgctttcccaggcttcaacatttcagtgaggtgtctgccatcatgttatctgcttccactgtgtcagcattttaacgtcaaattatctggcgaatttgagcttggttgtagctcataatggtctttagattcttttctcctaatttaaaaatatacgtattttacacaatttctctttattaaaaaaatatgaacaggtgatgcagtctcctttggaaagccctctcaatcccattcctttccccaggggtcaccgtgttatcattttgatgtatatcttttaaaatattttcctgaaaaaataaagaaacaaaaatgcatatttggcccagtgccatggctcacgcctgttatcccagccagttgggaggctgaggtgagtagatcccttgagcctaggagttcaagaccagccacctgggcaacacagtaaaaccctgtctctacaaaaaatataaaaattaggcgagcgtggtgacatgcatttgtcccagctacttgggaggctgaagtgggaggactgcttgagcccgggaggaagaggttgtactccagcatgggtgacagagtgagaccccgtctcaaaatacataaataaataaaaataaaaataaatttaaaaaataaaatattttcggctgggtgcagtggctcacacatgtaatcccagcactttgggaggccgaggcaggcagatcacaaggtcaggagctccagaccatcctggccaacacagtgaaaccgcatctctactaaaaatacaaaaaattagccgggcgtggtggcaggcccctgtagtcccagctacctgggggactgaggcaggagactcacttgaacctgggaggcagaggttgcagtgagccaagttcgcaccactgcactccagtgtgggcgacagagcaagactccgtctcaaaaaaaaaaaaaaaaattattttcctttgtatttacatacccaagtgtacccacagaaaaaatatagcattgttttgctatgtaggggatcattaacataaatgatattatactatatgtgttattgtatatttttcttcttcttttcttttttgaaagagacagggcctcactctgtcagccaggctggagtgcagtggcacgatcatagctcactgtaactgcaaaatccagggctcaaaggactctcctgcctcagcctcacaggtagctgggactacaagggtgtgccaccacacccagctaactttttaggttttggtagcaacagggtctcactatgttgcccaggctggtctcaaactcctggcctccagtgatcatcccatcttggcctccaaaagcactgggattacaggcatgaaccaccatgccctgcctattttgctttgttcattcaacaagtgtcccagagcttcccatttcaatatgtgtgtatctacctattctcagtaactatataagagtctgtagtaaggacattacccatttattcagccattcctctatggctgggcattcaggcaagttccaagtttttcttactacaaaaaaggctgaaataaacatacacatgtctacttgtgcacgtggacaaggtttctctgagagaaacagcaagaagtaaacatatgggatcacaagatacgctcatttgaaattgaatagatatgctaaagtactctcgaaaagagctgtaccaatttatacccctccagcagtcatcagagagcccttggcccccagcctcaccactgatgtgtctgcctctctccttctcgaaaagtgtacaaacttttaaatatctgccagacagacctccaaatcaacagtaatgtgctgtcatcttaatttgcttttccctggccacaggcaaggttcacttgccaccgggatctcgtctggagaactgtgtctacacccctggcccagaccccttcaccaccagtcaatgcttccacctctctgggtcactcacataccttctcctgaatctggcccccgatgttccgcaaggcctcctggaaaactttgttcttgggctccaagctcacacatctctgcaggtcaaggacagcctggtccaggcggcccagcttctctagggcttggctccgccggtagagtgctttgacatccccaccatccttttcaatggctgagcacaaacaggagcgctgtcagcacccatgaggccactgtctccaggcaagagcagtagggaaagatctcgaggaaaggccagaagaaggtgggggggacgaatgtggggctcggtgcttcagcctcagaaaaggtgagggtagctgcagaaaaggaaaggcccgaggcagtgggaaagaaagaaggcagatgtgtctctggggccaaaggaggagaatgtgacggtgcagcggtcccagagtccttgcccaccacagaagccctacagctccacaccagggcccaccattcccctacctttggatgcctctgtttctgctttgtcgtaatcttcctgtaagagaaagacaggagcctgaaggaatggtcatctccctctcggggcactaaccaggcagcaggggtactctcgctctccaaggtcacccgatcccccaccaccctgaggtgcaaaagacatctggcaagcggggatggcctgggagcgtgaatgtccagctggggcccaagcatcagcttagatgggcgaaccggggcccgggcgggcgaggggaagagcgccaggctccctcaccagcttgaggtggcaggcggcccggttccggtgcagaacggcctggtcctggggcgtcgcgtccagacccagggcctgagtgtaggccgccagggcgcccccgtagtctccacatttgaacagctcattgccctccttccgcagctgctccactgagctggcctgtagagagaaagggggcggaaacgtcggagggggttcggggcagagcccgggagctaaggggagaggagaggagggatcggggcgagcctcatggatggggagaaggaggccagggatggtcagggcgggtgcgaaggggtgatggcgcgggggttgggtacgcaccccgggggtggccggccggggctcgggggtccctggaccactcacagtcatcgcggagagggtgtctcgtgcccgcgca

SEQ ID NO: 8641 - DNA, 17450 bp, Homo sapiens
gtggtagactgtccctccaaagataggccgaatgctactattggccgtagcattggacatggtggtagtgttcagctagggagaagagcacgtgggtaactgatgtgcagtaacatcctcagcatttctagcaacctgtctaccctacagagaaatgactatgggaggaggcagtctagggaagacgggtttacatggtgaagggcctgctgtgtctaatactgcatagatttgaagtaacttgtgaaaaattttcaaagcctattgctatccagcaaatggaagtgtagaatggtacaaccactgtggcacaagacatctagcatatgacccagccattccactcttagatgtttctacccaaacgaaatgaaagcatagatccatacaaagacttagacgtaaatgttcacaacagctccctgcagcagccaaaagctggcaacagccaaatacccatcagcaggtaagtggacaagcaaactgtggtaaattcatacagtggaatgaatattgatctacaataaaaaggagtgaccttttgatacatacagcaacagagatgaatctacactaaatgaaagaagccagacaaaaaagaatatgtactgcgggattctatgtaaaatgtttcaaaatgaaaactaatctatagttagttaaagactaaatccctactcgccacagctagaggctgggggcaaactaggagccagggaaggagggaggtaatacaaagaggcactaggaaactttggggaccatgaaatgttcattatctaaattatggtgacagtttcattgtataaacctacatatgtcaaaacttattatatgctaatgataagagctgtaaatgtttttgagatggggtctcactctgtcacccaggctggagtacagtggtacaatcttggttcactgcagcctcgacctcctgggctcaagcaatcctcccaccccagcctcctgagtagctgggaccacaggcgtgtgccaccacaaccagctaatttttgtatttgtagtagagatggggcttcaacatgtttcctagtctcccaactcctgagttcaagcaatccccctaccttggcttcccgaagtagtgggattacaggcttgagccactgtacccagccaacactttttttttttttttttaattaaaaaaattctagggggccgggcacggtggctcatctgaggtcgggagtatgagaccagcctgaccaacatggagaaaccccgtctctactaaaaatacaaaattaggtgtggtagcacatgcctgtaatcccagctactcgggaggtggaggttcacgcctgtaatcccagcactttgggaggctggggcgggcagatcttctgaggtcaagagattgagaccatcctggccaacaaagtgaaaccccatctctactaaaaatacaaaaattaggtgggcatagtggcgcgggcctgtagtcccagctactcaggaggctgaggcacgagaatcacttgaacccaggaggtgtaggttgcagtgagctgagattgcgccactgcactccagcctgggcaacagagcgagactccgtctcaaaaaaaaaaaaccaaaaaaaacacattttaggccaggcacagtggctcatgcctgtaatcccagcactttgggaggctgaggcaggaggatcacttgagctcaggagtttgagaccagcctggacaacttagtgagacctcatctctactgaaactcaaaaaaaaaaaaaaaaaaacaccaccaacaaaaaaaaaaaccccaaaattagccgggtatggtggcatgtgcccgtaagtctcagctacatgggaggctgaggttagagaatcacttgagcccaggaggctgagctgcagtgagccatgatggcgccactgcactccggtgtgggtgatagagcaagacactgtctaaaaataataaatttaatgttataaaatagcagtagagagaagaaataatactcttttatttatcaaaaagaaaaaagtaggccaggcacagtggctcacgcctgtaatcccagcactttggaagtcaaggtgggtggatcacctgaggtcaggaattcaagaccctagccaacatggagaaaccctgtctctactaaaaatacaatattagccgggtgtggtggcacatgcctgtaatcccagctacttgggaggctgaggcaggagaattgcttgaaaccaggaggcagaggctgtagtgagctgagatcacccattgcactccagcctaggcaacaagagcgaaactccatctcaaaaaaaaaaaaagtcctctctgactgtgctgtagagatgaagaattattacatcttccatttagtaagcgtgaacgttgtttttcacatggtaccacaaggccatctcttggtcttacagggaaaatggcattacaggttttcaggaaaactgctgaagctttcttttcatcgttaccagaatgttggcaatcattcccccaccgcaccccgaatttaatgcaaggacgcaacaagcacagacaccaaagctggccactccgtgactgtcactataggccgctactcagccttccatccactcaagtggactcgacatgcagggacagaaaaaccctttcccatctctgcaggacagagggcaagaggtagggaaaagaaagatcagagtgttactgtgtctatgtagaaaaggaagacataaactccattttgatctgtactaagaaaaattgttttgccttgagatgctgttaatctgcaactttagccccaaccctgtgctcacagaaacatgtgctgtatggaatcaaggttcaagggatctagggctgtgcagcatgtgccttgttaacaatatgtttacaggcagtatgctcggtaaaagtcatctgcattctccattctcgattaaccaggggcacgatgcactgcggaaagccgcagggacctctgcccaagaaagcctgggtattgtccaggtatttccccgcactgagacagcctgagatatggcctcgtgggaagggaaagacctgaccatcccccagcccgacacccgtcgtctgtgctcaggaggattcgtaaaagaggaaggcctccgtctcctgcatgcccctgggaacggaatatctcggtgtaaaacccgatcgtacgtacctatgttcgttctattcttagataggagaaaactgccctgtggctggaggcgagatacgctggcggcaatgctgctctgttactctttactacactgagatgtttgggtggggagaagcataaatctggcctacgtgcacatctaggcacagtaccttcccttgaacttatttgtgacacagattcctttgctcacgttttcctgctgaccttctccccactatcaccctgtcctcctgccgcattccccttgccaagatagtgaaaatagtaatcaataaatactgagggaactcaagagaccggtgctggtgcaggtcctctgtatgctgagtgctggtcccctgggcccactgttctttctctatactttgtgtcttatttcttttctctgtctcttgtcccacctgatgagaaatacccacaggtgtggaggggctggcccccttcaaagaggtggctgggactaccctcacccactcccttgaaatcagtgtttccctaagccttgtgtttaccttacgtgctttgcccggtgtattgggagccagtcctcgccgcttgctaggtgttcgaggagcgctgccatacagcatctctgtctctgtctgttttttgttcttcagttgctgtgtgaaagtcagaagcaacagtgataaatctcaggaagagagcgggtctgggatggcaacagcagcagggccgggaatctaggcccgtgtctctacagccagagctaaagagctgccgcgggctccccgttccacaagccccggtccccggctccccgttccacaagccccggtccccggctccccgttccacaagccccggtccccggcttcccgttccacaagccccggtccccggctccctgttccacaaaccctggtccccggcagagactatgggctgctcagattactttcttcgtcttttcccaatttgcgttcacgttcacacttactctttcctgcttggctctctctttctccaatcgatgcatctcccattgttctgccacatactccatgaatttctgcccattcaccataaatgcctttgaatgttcctgttcccacaattcaattcgtgccttcaactcttcttccagctgagaccagaaacaaggacatgttaattacttcaactctttagtgcaaagcccaaatgaaatgatttccctagagagtgactcctcctccccagagcatcattagcctcatttcaggtagctgggcccacatgggtacaggtcagagtgaccagaaatcaaagcccggagacatttcattcacacaacacacaagagtggaaaatggcaagaacccaaagtttgaccactaaggttttggtgcctgaagttggaggcagcacagggaagatcagcaatatgaaataggcggtgaacattaggagcaggactctgaaatcagacttaatggggttcaatctggaatcaccctctttactggctgtgaagcagtgagcaaatttacattttttttgagacagtctcactctgtcgcccaggctagagtgcagtggcacgatctcagctcactgcaacctccacctcccgggttcaagcgattcttgtgcctcagcctcccgagtagctgggattacaggcatacgccacacctggttaatttttgtattttttagtagagatggggtttcgtcatgttggccaggctggtctcgaactgcctcggcctcccaaagccctgggattacaggagtgagacaccacgcccggccagatttacctaatttcttagtacctcagtttcctcgtctgtaaaaatggaaagaataccgacctcataaggatgttgtaaggattagacgaatcactaaatgagagcgttttgaaatgatatccctgacttaactcaaaaaatggtattattattatcaaagtggaaaatggtaatggagcccacaggactctctctcaaaagctttcctcatgtaactgactgaattgtgtttcccccaaattcaaatgttgaagccttaacccccagtacctcagaatgtgactgtatttggagacagcgtctttaaaaagagaattaaggccaggtatggtggctcattcctgtaaccctagcattcctgagaccgagatgggaggaatgcttgaggccaggagtccaagaccagcctggtcaacacagcgagaccccatctcttgcggggggaaaaaagaaagaattaagttaaaatgaggtcattaggtgggccctaatctcatacgactgggagtgtttaggccacacatattgtgggaaaaccatgtgaacacacggagaagacgacaaccatttacaaagccaaggagaaaggcctcagaagaaaccaactctgccaacgacatgttgatctcagatttacagcttctagagttgtgagaaaataagttgctgttgtcgaaactgcccagtccgtagtgttttgtttttttgtttgtttttctctctgagatggagtctcactctgttgcccaggctggagtgcagtggcgcggtcttggctcactgcaacctctgcctcctgggttcaagtgattctcctgcctcagcctcctgagtagctgggattacaggtgcccgccaccatgcctggctaatttttgtatttttagtagagaccaggctggtcttgaactcctgacctcatgatcaagaccaggctggtcttgaactcctgacctcatgatcaagaccaggctggtcttgaactcctgacctcatgatcaagaccaggctggtcttgaactcctgacctcgcgatatgcctgcctaggcctcccaaagtgctgggattacaggcgtgagccactacacctggcctgtagtgctttattatggcagtcctagcaaacgaatacaccttgatatggagttgcttatactaaatatataacttattatctctgcctaagctttgaagaaaatagttttggggctaaacaatagaaagataaagacatacaaatagtgaggtatctttgtaaccaagcatcaaaaacccttagcaacattattaccttgggcagcattttctggagcttggctcgttgtttttcttcttttagaagatttcctcctcggtttgtaaatcgatttggatctgaagcttttctctgtgaaaaatacatttttaattagtggaaaacctggcaccatgagaccaataacttctgctaagattctttgttctcgccaggcgtggtgactcacacctgtaatcccagcactttgggaggccgaggcgagtggatcacctgaggtcgacagttccagaccaacctggccaacatggcgaaaccccatctctactaataataaaaaaattagcgagcatgacggtgcgcacgtgcagtcccagctactcaggaggctgagacagcagaatcacttgaacctgggtggcgtgcagtgagccgagactgcgccaccgtgctccaccccgagcaatgagcgagacgctcaaaaaaaaaaaaaaaaaaaaagtcaattgttaaagcttctcattctttttaacttttctttttgttaacttttctgttttttactgtcttctttctagtcaagtaatgcagtgggagtgggagaggaacaaatctgtaactggctgtgatcactgacttataaacaccactacactcggaccagcatgtgttttcttttagaacatataaggtatatcagaacagtaatgcaagtatatagcttgtaattataaattaggtgtgtatactcaaaaataggggcacacaggcagaaaaatttagaagatattctagaaaattaaattgtttcccttccatactgcttgattggtgacagccaatagttactagagaggatggtaggtaattcatttcttgttttcttcttaaatattggcatgtcaacaaaggttgctgccttagctccttatttacgtttttttttttttttttttttttttgagacagagtctcactctgtcgcccaggctggagtgcagtggtgcgatctcagctcactgcaacctccacctcccgggttcaagcgattcttgtgcctcagcctcccgagtagctgggactacaggcatacgccaccatgcccggctaatttttttgtatttttttagtagagacggggtttcactgtgttagccaagatggtctcgatctcttgacctcctgatctgcctgcctcggccttccaaagtgctgggattacaggcgtgagccaccacacacacctggcctccttatttatgtttactcttcttgttgtaaccagaagtaaagaataactgaggacaaagacatctgttcttaagcagctgtaagatatcccatagttctctccacttctgagtcctagtttgctgcctgtaaacttgaaggagttgaattcagattctctgaaggccctctgagctctaacagggccagcatgaacccgagaacaaggtctccttccatctgtgccctacacacctcacttgctttaccacagtccctgagctctaaaatgctctgaaggaacccaccatgttgcctatcagaagaaaaggaatcaatacccatgcaatattctaagtatagcaaaagttggaatggtagagaatgttagttgcctgccccaacatccattcttctctccttccttagtttaacagaaccagaatttacctggggcagcaattcacccagcctcaccagcaggtgacagagcatgtgagccacggtgctgtgaagagagccgggaagagctcttgaaggagtgaggggcaatgccttctttgttccttcctccaccacactgtatgacatgtgccatcaggccaggcgtggtggctcacgcctgtgatcccagcactgtgggaggccgaggtgggcagatcagctgaacctcaggagtttgagaccagcctggccaacatggtgaaaccccatctctactaaaaatacaaaaaattagccgggtgtggtggtgcatgcctgtaatcccagctacttgggaggctgaggtaggagaatcacttcaacctgtgaggtggaggttgtggtgagccaagatcgcaccattgcactccagcctgggcaacaagagcgaaactccacctcaaaaaaaaaaaaaaaaaaaaaaaaagtgccatcagggtgggagctctagcagccatcctggccctgaagatgaggtccacccttagtggtgggggagcgccctgagccggagaagcctggggtcctgctcactgtgcagatctgccatgcctgccccacactgcccacctctgaacctcattcatgcaagaaatgcctaccttatttaagccattaattttgggcttttctcttaaaagaccctgtagataagcttatcaaacagaggcggtcagcagaaattcagagagacttaatgataaagatggggtatcaaaagcctggcaaagaacaaagctaactggattgattccgtacatggcatgctttcttaacagttaaaaacacaaaaactaggacaatacctcaaactctaagaaaagcctccaggtttcttcccacttctggacaccttcaaagagttccttgtgaacttcatagtagttttttaaccgcacaatctcagcatcgtggagctggagcagactttctgtgtagtcctctgcaaaatataggcccagtagtttaaaacaattcctctagtatttagtatccaattttacgaatccccgattccctaaaatggaaatagattctttccttatagtaaactgatacaggaagaggcgtgtgtgtgtgtgtaatagatatatagtggttaataaaaaccagctttgtcacaatcagcctgggggagtagggcctaagagactaggatagagactaaaataatgttgtcaaaaatctgcatcatctcttgccttgtcttcggtttctttcatattctgcttgtctgtcttggccagccagtagaggggtggatcacagaaaatgtgcaaaaacatctgttgaatttagttggggtagctcgcatctttatattcagtgcagttcagactagcattcaactggactccaggagtcaagctccttttggctcaaacgtaggctctggcatttaccattatatgtctctgggttaaatgactcagcatttatgtgctttagtatcctcaccgtcttgacatgaggatgtgaaataatattaagggtttgacactgcacctggcaaaaagtaagcacctgataaaaacttaagcttcacagctagaggctacagtgacatattgcttcagaaagcaagagaccaatatttcccaataaaatttgcaaatgctttttcatacaggaatggcaattatgctaaatgtcttgaaaaggtggctttatctgttcagaaaaggatatacttcctgttgaatgtctggatgtcttaaaaactagtgagcaggccacatgaagaccccacttttggctgggtgtggtggcccaacactttgggaggccaagttgggaggattgtttgagcctaggaacttgagactaggctgggcaacagagtaagacctgtctccaaacaaacaaaccaaagacctcactcttgtactaaccagcacagaaaggggcaaaagcttgtctctgctcctggctataaaagcactggtcccagtactgaaccagctccactcgaattgcctcaatcactttcttcatgttttgcattttcagttcttccaaccgatccacttctaattgcagctgaaagaaagaaacttgttaagggtggctgccatagttttatattcactcaggtttgcaaaagatcccccccttttaagtaaaattataatgcaaagccacaaaggtattataaatcaacacttttttttttttttttttttttttgagacagggtctcactctctcgcccagacaggagtgcagtggcgcgattctggctcactgcaaccctccacctcccaggctcaagcgattctcctgtctcagcctcccaagtagctgggattacaggcgcacgccactaccacctggctagtatatacagggtttcgccatgttgtccaggctggtctcgaactcctgacctcaaatgattcacctgcctcggcctcccaaagtgctgggattagaggcatgaaccactgagcctggccaaatcaacaacagtctttatgactaacacagaagtgctaagagaagactgctgacccagtacccactgggtttcttaccgctttccggaccttggcctttgacccagacataatggtggccacagcttctctttcttcttcaggtatttgcaacctgtcccagagctctcggatttgagtacgcagcccctcacacactgcttcattttgtgatttctgcatttccagctacagcatagaaagccagtgtcactcacggcaaagcagcagcacagaggctagccctctagcctcccgcaaagaaatgtctggagtagaggaggaggcactttcatgagagttcaaagtagcatgttttcatgcctcctaaacacgagctgtaaggctgtcgggatctcagaccccaagaattagcattcaaatttagaactgaaaaagattttaattaaacactagtctaattcaaatgactaatattatttcatctataatttcattttcttggagccatataaaggttttttaactgttaaacaaaaatcaaggttgtatatcatatattactatccttagcttccctcattctcttaccttacattgtctccttatttaagactgaagaaacagctgtcagttttgttcaaactgctatatactacggagatcctagggcataatttgagaagacagtacctgccgtagcaacttttgtagtgttgcaatattctccaaagacaaacaaaaggcatcttcgtcttcacacaccacatctctttcaaagcttgtgtctggggtgtggtctaattcttccatacacagtatgatctgtctctttatactgacaaactcctcacgcctagaagcctttaaaacaaagcaattacaagatacctagaggaaaaccaaagtgacttttaggaagaacaaatgtaggcagtgtacctttgtttccctcaaagttgtcacatgttgcctgaactggttcagctcttctaagctgggcactgaggcactgtcaatatcatagtggggcatacaaagaatttcgcacagttcttgatcttgctcttgaagtagcttcagttcctgttttctctcctttttctgttttcgcatcaattccacttgggtgcgcaaatctttttctagttgcaagatggtcgtctctccttcttcctgaataagacaacgtaccactgttataagattccaagtgaattccttcagaggaagagaaggacaacataagaaggcgtggatgacagactttcagttaaactaacaagtaagtcaactcatggtcaacagaatatggcacaaagagggtctcctaaggaaggtcccagtgaggaaaagtgagtaagtaccagggtacttttccccccaattttaaaacttgtggtagaacacatataacataaaatttaccatcttaaccattacgtgtacagttcattggtattaagtacagtcatattgttgtgcaatcataaccatcacctccaaaactcatttcctcttgcaaaagtgaaacttcatactcaaacaaataagtccccattttttcccttctccaagcctggcaaccaccattctaccttttgtctctatgattagactactccaggcaccaggcacttttatagaatgtgtaaattggcagccaggcacggtggctcacgcctataatcccagcacttcgggaggccaaggtgggcagatcacgaggtcagcagtttgagaccaacctggccaacatggtgaaaccccgtctttactaaaaatagaaaaattagccaggcatggtggcggacacctgtaatcccagctactcgggaggctacggcaggaaaatcgcttgaacccgggaggcggaggttgcagtgagccgagaccacaccattgcactcctgcctggacaacacagcgagactctgtctctaaataaataaagaaataacagtgtaaattggctggaaagcttgctttgggttagctatagggtggcatgcctagctcatatctaaatactcatcctgctaatcctatgaacatcgtctcaccttagcaacaaaaacccatctggtagtccctgctctactcctaactggttaacaagaaaaaaaaaagtggcatttttttataggacatatacatttttcttaaatgtcctatacatttacacaatttcatttaacattgtgaactaggaacatcaggtaacttaagggagatgatcgttgtacacctcacttctcgcccaatttcacatggaatgtgaaaaaagaaagagaaactatgtccaaaatcaattatatttatgacatttatgttgactccaggaagctccacttcatgttctcttctgcctgattgctcttggctaccaagtatgaattatcctttgccctttaaaggtgatctccctcctaagctaactccaaatagatatccaggcaggtcttcctgtaacaggaagagggacctgagaaccttatgggtgtactcattgtctttccaagctccacatctgtcctaatttttatgatcctggcactatttttactggttctaagcagagattttcaggaccccatctgttattcatttcatccttgctgtgtcctcactcaagtccctgacttgcagtggaccacaatatagccacttctcagctccatacccagatggatgtcatggcatgctctgaaatggactatgcactcccagtattccagcttttgagacatttcttctgaagaagccattttggctggttcagtggtatgcagcttctgggtatgataaaacccacaaaggttggtgttttcatagtattccttttaatcattagttacttttgttcctgttttcattttctttcagagaaagaacactgcagcaccatctatgcctacctttttctcagcgtttataaaaaaaaattcatattccctacaaagcaaaactatggtaagcagcagcttctttttgatcatctattagttgcttcacctcttaccagggcaactctctacagaggtgagaattactctgctgggcctaattaactacacagcatgttttccccacttcttacgtctagctccatccctacgaggaagccttccatctgcaggcccaagtcaacgttgctttctaagtctcaggccccagacagatcaccagagaccctgtgggctgccacggacctgaaatggctcaacatgtaactcgctgcacagagtgttcagctctttctgacagacggatatgcttttgatgagtctttccttcaggctttcctcttcagcaatcatcatatccaggagttcctacaagagggaaaacagtccataagtttggggcaatggaggaaaaaaactcccaacaccaataccaaactcctcaaatttctttcatctttatctatttatctttgagatggagtctcgctctgttgcccaggctggagtgcaatggcgtgctttcggctcactgcaacctctaccttccgggttcaatagattctcctgtctcagcctcttgagtagctgggattacaggtgctcaccaccatgcccggctaatttttttatttttagtagagacggaggttcaccatgttgatcaggctggtcttgaactcctgacctcaagcaatccatgcgcctcggcctcccaaagtgctgggattacaggcatgagccaccgcacccagcctcctcaaatttcaagaagggacttcaaaaccaaaccaaaccaaacaggaagagcctgtgctatcctaatgccgatgatcacatgtcccttctgtatgctatctcgggtgagacaccaacatccttaccctggtccaatgcagagaccagtactattcaacccaccttgatatgcttctttaccacctcagttctttgtaaccgctggtcctctggaatcccaattagctcccatatttcccgaaggtgatttagggctttctgcagacatactatggactcctccgccagcacctcactgaaaaccaaaaactaaggcctgttagttacatcagtcacagcctctggactaaaagcactattttcgagaactaaaaagactagcttctcagtggcctcgagaaaaaaacaaattgaaaacaagcattcagcttaattcacctttaaccactccccatcccttttcctaccaaatgccactagcaatacaagatttcatatcatattacatcatggaagctcaaccttctggactttcaacaatgatctacctatggaagtataatacagaattataaatacttttactaaagaaaaaccggacaaaagatgttggtaaaataaactaacacaagaacttgctggtgagaaactcctgcaaaatgtttggcaatttattactatttttttggtgttttttttttgttttttctttttttttgagacagcatcttgctctgtcgcccaggctggagtgcagtggtgcgattttggctcactgcaacctctaccttttgcgttcaaatgattctcctgactcagcctcccgagtaggtgggactataggcaggtgctaccacacccagctaatttttgtatttttagtagagttggggtttcgccatgttagccaggtgggtcttgaattcccggcctcaagtgatccgccctcctcggcctcccaaagtgctaggattacatatgtgagccactgtgccttgccattttatttaattaatttatttatttttattttcttttttttttttgagacagagtctcgctccgttgccctggctggagtgcagtggtgagatctcagctcactgcaacctccgcctcccaggttcaagtgattctcctgcttcagcctcccaagtagctcagattacaggtgtgtgccaccacacccagctaatttttgtatttttacaaaaacacaaaaatccacccacctcggcctcccaaagtgctgggattacaggcatgagccactgcgcccgggcctagtattcttaaattgcaaccggcagctcaaagaatggctaaagttaaaaagccattgagatggggtttcactacgttggccacgctggtctcgaactcctgacctcaagtgatccacctgcctcggcctcccaaattgctgggattacaggcgtgagctaccatgcctggcctattcttcttaaattacaactagcagctcaaagaatggctaaagttaaaaagacagcattaagtgttggtgagtatatagaaaagtgagaactttcatatgctgctggcatggtgtaaattggtacaactattttaaaaactgttggcagtctatctactaaagctgaacccagcagttctacctctacatacatacctagcagaaatgaacacatacgttcaccaaagacatatatgagaatggttagagaagcactactcataatagcagggaaacagaaacagcctagatgtctatcaacagaatgaatagtacattcctacaatgcactaatgcagcaatgaaaatgaacaaactggctgggtgcagtggctcacacctgtaattccaggactctgggaggccgaggggagcagatcacttgaggtcaggagaccagcctggccaacatggggaaaccctgtctctactaaaaacacaaaaaattagctgggtgtggtggtgcgcctgtaatcccagctactggggcggctgaggcaggagaatcgcttgaacccgggaggcagggtttgcagtgagccaaggttgcagtgagccaagattgtaccactgtactccagcttgggcgacagagcgaaactgtcaaaaaagaaaatgaacacactacacatgatatggataaagctcaaattattatatttctattttatttatttatttattttacttttttggggtgatgaaatagttctagatcttgatggcgattatacaacagtatacaattgaaactacctgtaaagcgagtctgttttactgtgtatgaattatacctcaaatcttttcatttttttaatgaagtaaaataaacaactaaaaaatagttgtaaggggaagaggaaggaaaaaaaaaacactttaggctgagcaaatgccactagatatgcaaatgtgtatcactatgtgattccgttgacagagagttcaaaaacaggcaaaactggccaggcacggtagttcacgcctgtattcctagcaccttgcaaggccgaggcaggaaaactgtttgagcccaggagtttcagatcattctgggcaacatagtgagactctgcgtcttaaaaaaaaaaaaaaaaaaaaaattagccgggcacggtgacgtatgcctatagtcccagctactcaggaggctgaggtgggaggattgcttgagcctgagaggatgaggctgcagtgagctatgatcactgcactccaaagcaacaccctatctcaaaaacgaaaacaaaaaaagcaaaaacaaaaccaggccaaactaatcaatgctttcagaagtcaggatagtagttcttttggctcaggggaggcagtgactggtagagggcttctgggttgctgcttacacaggtgcatcaactgtgaacaattcactgagtttacacttgatttctgtacgtttctgaatgtatgttattcttcaattaccaaaagcttattttaacaaaaaattatttatctaaaatacaaatttaactggcttctgtatcttatcttttaagaacagcttactttaaaaattatcacaattagtctgctttacagaacatttaaagaatagaaatttttctcccttttcttaggtataacaggacaactaagactgccctggcaccagagaaactacaatctagatgtgctctgcttccagtcggccgagaagcctgcagcaaatcacctaaacacttaaggtctttgtgtgccatccacacccaactgcaactagagactttcattagcccctttctgtctcagagctttcggtggttctacaagtcaccagcctggatctctaacaatgtgtctctccaaagctgttaatacattcacatccaaaata

SEQ ID NO: 8642 - DNA, 5312 bp, Homo sapiens
ccaacagactgtggcggagggaccggcaagcgccaggcagggacccggggtagatgctaaatccaaactgaaacgtacagggctggatgattgaagcaccagcgggaactagtcggacctccgagctctttaaactgtcctcagctcggctggttctccacgagctccgggcagacggcggggggtgggtcggcgtttaagtcaaaggccttggggctccgagtcccttcctctccccgtcctgtgaaggcacgacccagttcagctgtctgtaaagtggagccattagtccctgcctcgtagtgggaaaactgggaggcggaacgaggaggccgccggtcccaacccggcccaggagcatctttctccgcagaccgtttcctggcgaggtgcgtcttcgtccttttccgcccttgggaacttagagcggccccttggccgctggttccgcgcctcccgcggttgggggcgtgcccgaagtctctctacggaagctggtagggctgtgggtgcttcactatggcgacggtgggggctccgcggcacttctgccgctgcgcctgcttctgcaccgataacttgtacgtggcgcgctatgggctgcacgtgcgcttccgaggcgagcagcagctgcgccgggactacggcccggtgagtggccgctgtcgtccctacggagcagtgggcagagaggggtagtggaggagggaagttcgtccccagggtcgtttgctttgcgcacgccgcgcaccgtatcttcaaatacaagaatgacggcctctctctgcctcggttttctcaccgtaaaggggtaatagtatctccctgtgagattgtgaggaaggaatgaacaagcatgtagggtgcttaggacagggccgggctcagcttgccgcctcacagcaacaccagcccggagccctgtcctgagcttgacagggttccgcagttcattctctccatgatcctttgaggtcggggctcctctccccattttaagcaggggaaactgaggcttagagagtgaagggatttcctcaggtcatacagtcatgctcagtgttctttctgctcccagatcctgcgcagccgaggctgtgttagcgccaaggacttccagcagctgttagcagaggtaccagtcccctgcccctgcacagctcctcctcgttagatttgtgtccgcagcttgaggacacagcttgagcctagcctcagtccctgatccctgaagggtcacttaggccctcactttcctccttcctgccccccactcatccctccacacctgagtcttggcaccaggagagagaaggggaaatgctaagttgctaagttgcctagtcatgccgttcttaacagctctgtgagataagcacaagcaccactctcattttggattgagaagctgaggcttaaagagggatcccttgcccaagcttttacagcaggagcagatgtgatcccagccacagcttccaggcccctgggctcctcacaccttaccatataccccgcaggctgctgccagggctgctgccccactccctcctcctccttcccctggagtcagtggtgggaagcttcccaggagagtcctcagcaacctctggaacacaggacttggccatgactgtctcctgtccctgtgtgggcccagatggttgaggtacatctaggggttctcatcccagctaggctcaggttggggcagcctgaaacaggatgggtccccttctagaagtccctttcagctaacagtctggaacttgcagttgacccagatagattcaggagtgtaggctagacttggcttccagcctgggccctgtctggcgttctgggcttcagtttcttcatctgtacagtggcctcaggaggatgggaggccccacctggtaacaaccctgtgccaccccagcttgagcaggaggtggagcggcggcagcggctggggcaggagtcagcagctaggaaagccctcatcgcgagttcctaccacccggcacggcctgaggtctacgactcactgcaggtaccagccagccagagtgcttgaaggccggtactggaaagaggaggtagcatccagggctgggggtgctgcctgccccacagctggtgtgttttgctcccaggatgcagctctggcccccgagttcctggccgtgactgagtacagcgtgtccccagacgcagacctcaagggccttctccagcggctggagacagtatcgggtgaggtcctggccctgagacctggcaggaccagggaatggcagcctgggaaacctgggtgtgggatgctggggtccctccagccaccatctctgcctccaaaaaccaaaccagcaggagctggaagggtcagtgggaccaacctgccaggagcaggacatccgcattcattcattcaatacctgccatgagcctggtatcttcattctttccttcacccttccttcgtgccctcatccagcaaatagtggatatttgtgtcatgtgtgggacagctggcacactcaaacagggctgatccaagatcttaaagggaccattgagacaggtatgggcaggataaagggaccagtaaggaatggcaaagcccggccccccagggctggcaacaggagggagcagttaccacctggagttgtggctctgggcggaggcctgcggccatgccaaactccaagtagggcaaaaaatgccccacttctcttcggatttcttgctgggctcacttattggctaaacccagcaggaaatgctgggcaagggaggtttgcgtgttgtttaacctctgattcagtttcctcatctgtaaaatgggagcaacagtaaccccctctcttaaggcactgcgacgatcaagtgagttaatctgcatagagtgcctgtcacagggcccgcacgtagtgtttggaaagtgtttcctattcttattggcactgatagcctgggctaggggctcctgtgggaggcagatacaagtttcccctcatggagcctgtgctttgttgggagtcatgggtggaatgaatccccctcctcccagcctgggggtgctctcctcattgccttccactccccggcagctgagatagtgctgaggctgttggctggggcagggcctaggctgcgaggtggccccatcgtgggcacactagccctgcacccctgggcattggtgcgtccgccaagaaatgtttaggtttccattctcagcctggtttcttccccctcagggcccagcaagaaagaacagccccttctggccttcctgctgggggacagaggctcccagagccacttctgagttggggtacagacttcggtggctcatcagatgaaaggaggtgcagagagagcctgaagttggctctgtgatcccgacttggctgtcactggcctgctgggtgtccctgggctacttccttcccctctctgggcctcaggacccatatgtgagctcccagggccagccctgtggacacttgtagagtctggggaaaggttccgggcataagtggggggcatgggaatcggcctcccctgctcctcatgttacttccttaagtcatcacaatagccctgaaaagcaaaggcctcatctccatggcacaggtgatgaaacaggaagactgaagcccaggcctggccggcccacggccacattcaggccaacagaccatccctccttccacagaggagaagcgcatctaccgggtgcctgttttcacagcgcccttctgccaggccctgctggaagagctggagcacttcgagcaatcggacatgcctaaggggaggcccaacaccatgaacaactacggggtgggtgaggcctggccggtggcagaggagggggtggctggggtcaggaggcagtgtcagaggttctgcagatgggctgcctgcccgggctgcgaaagaaggtcacagtgggatcaccgtggagtggaagcccagggttgcagccctctagtttccttgctgaccccaggaatcccctcccaggtgctgctgcacgagctcgggctggacgagccgctgatgacaccactgcgggagcgcttcctgcagccgctgatggccctgctgtaccctgactgtggcgggggccggctcgacagccaccgggcctttgtggtcaaatacgcaccgggccaggacctggagctgggctgccactatgataatgccgagctcaccctcaatgtggccttgggcaaggtcttcacagggggcgccctgtattttgggggcctcttccaggtgagtgtgtgacccatgcggcagggcctggggcagctgtgagtgcccaggcctgagtcgtgccatctgcaggcacccacagccctgacggagcccctggaggtggagcacgtggtgggccagggtgtcctccaccgtggcggccagctgcatggagcccggcccttgggcactggtgagcgttggaaccttgtcgtctggctccgagcctctgctgtgcgcaacagcctctgtcccatgtgctgccgtgagcccgacctggtggacgatgagggcttcggtgatggcttcacccgagaggagcccgccacggtggatgtatgtgcgctcacctgagcttgcttgggcccagtgtgggggtggcaggcaggtgagggctccgttgccttggtctgggggcagaaataaaatccccgcagcctactgcacttcttggctcaacggtgtgccagcttctgggtcattctatgggcaaagatgctgccttagttcaggtttgtcagaagcagggtctggaatggggcttcagcgagggagtcagggaagcaggggaggggagggagcagctgggcaaggaagtggcttcagaggacgtccagcctcagctggccccacggagagctccaggcagagcccacagtaccacagtgtgcccacaccaccggttactggctcctggatgagggggccagagaggagtgaataacttcccagacacttatctccagggcagggtgccttccagtagccaagggaagcctccagagagcacagatgtgaaccctcagcagcaggcatcaccccccagtggactcgggtgggccaccagtagcatcttctagatggcagaggggtgaatggcagggccaggaaccaggctgcccgggttcccattctgcttctgccacttccagctgtgtggctttaggtgagccttcaccttttggtgccttcgtttcctcatttagcacctacctcctagagctgttttgggagtcaaatgcgctgacgtatataaagtgctttgcaagatc

SEQ ID NO: 8643 - DNA, 336 bp, Homo sapiens
tgggggcccgagattggatgaagcgcacagccacgctttgggttacacatttgaaactcagggggcttccatattgcagtcttgagtttggtctccctgggaaggtggggcaccagccccatgccacgttgcacgtatcagctggagcagaatcctggcttccttccggatgggcctggggtccatgcccgcgctcactgccaagatctttctggcccctacggacacgagtttgcgacctctgagtcactgggtgggcgcgtcggaaagaccagggcgcctcagtctggagctcgcagtcgtatggagagggcaggaccagccggggaggagggc

SEQ ID NO: 8644 - DNA, 6987 bp, Homo sapiens
ctgatacccaggagtctccagcttccaagagaggttagtgcatatgttttaccttgtgggaattctttcttttatgatctaaatttgtacatattcagtaattgttttctctgcatttctattgtatctcatgtccatgcattaagtaaacagccttttgcaaagagagacagatgtgaaaatattaacagtaatgataatggacagacgtgaatgcatttttttaaaaagtagaaaaggatgatgagaaggttttacatgaagataaatgaccctgaaaacattttttttttttttttttgagacagagtctcactctgtctgcccaggctggagagcaatggcacgatctcggctcactgcaacctctgcttcccaggttcaagtgattctcctgcctcagcctcctgagtagctgggaatacaggcatgtgccaccaggcctggctaatttttgtattttttagtagagagagggttccaccatgttggccaggctggtctcaaactcttgacctcaagtgatcctcccacctcggcctcccaaagtactgggattacagacgtgagccaccgctcctggccctgaaaacattttgtgagaagatcttcacctaagaatctgcttggctctgaagaggaccatagcccttctgtgggtgacgtagctttcctacaaggctgtgtgtttctccacgtctgatccaggtccagtggttttgcacagggctgcacttttccccaaaaacttgtacaaagagtgttacctacagtttacctcggtgtgttttgtgtgtgtgtgtgtgtgtgtgtgtgtgtgtgtgtgtgtgtggtggggcggggattctttaactcgtcactaaaggaaacctggaaaacatgaggagtatgtatgtacccaagatttcccgttcagagagacaccacattagaaacagatgattcaccttccatatctcagaactgtgctgcttcaacacaattgctgtcacttgtagagaaggtgtatgctaaatcctaatgtggttggtaacacatagcaaaaacgagatggcaatatctttcacataaagaggcatttgtgtgcatctatttcaggtcgggtcacagccagcagctatgtctgacataaatcttgactgggttgacaggcgtcagttgcagcgcttggaggaaatgctgattgttgtggatgagaatgataaggttattggtgccgacaccaagaggaattgccatctgaacgaaaacattgagaaaggtagcccccgcccattttctctgtccagttcccagggttttcccatttttcccacccgacggcaacctaagaagagagtctaggcctttccggctaggaggcgaccactgggtcacctgtgtgcttgctgtgccgtctttagaaggctcggggagcagcacctggatgacgtctttgcttggtcaagcccttgtcaggctcctgcaccttctcctaggcatccgtgctcttcctcgtaagatcctgtttcagcaagaattctaccaggttgttttagcgagaaccctgaccttggcatctgattaaattcctcaaccccgtccctcccaggtgacgtctgatcacgcaggcctgtcttcagcaggtcttgttaggtcggtgtagccagaacccccttcccactgatgttttctcttagtaacttttaatccataggccccagcctgctccttgggtgttgtgtgcagttaggctggttctccatggaggtctctttcccctattgaaatggttctcagtaaagtcagactttcctgctttaactcctgtccagctctggttttctttgaccatcttaagccattttattattttttaattttcatttttgtgtcttttttataaacacataataattatgcatattaatggggtacatgtgatagtttgataccaccatgtcatgcataatgatcaaatagggcattttgggatatccatcacctcaaacattcatcatatctttgtgttgggaacattccaaatcctctgttctagccacattgaaacatataatacactgttgttaactacagtcaccctactgtgctattgaacagctgatattattccttctctatcgcggtatgtttatacttattaaccaccctctcgtcatccctccccactgcccttcgcagcctctggtgtctagcattgtgttttctgcctccatgagatcaacttctttagagcccacatagcagtgagaacatgtgatacttgtttttctgtgccaggtttgttccacttaacacaatggcctccagttccatccatgttgctacaaatgacaggatttcattcttctttttttttttttttttgagacagagtcttgctccattgcccaggctggagtgcagtggtgcaatctcaggtcactgccagctctgcctcctgggttcatgccattctcctgcctcagcctcccgagtagcttggactacaggcacctgccaccacgcccagctaatttttttgtatttttagtagagacggggtttcaccatgttagccagggtggtctcgatcttctgacctcgtgatccgcccacttcagcctcccaaagtgctgagattacaggcgtgagccaccgcacccggcccgatttcattcttcttttgtggtggaatggtatgccactgtgtatctaaccctcatgttttcaacccttcaaacctccacggacacaggttgatctcatatcttggctgtcgtaaatggtgctcagcacccaggaatgctgcgatatctctctgatagactgatctcttttattttggatatttgccctggtagtgggatttctgggtcatctggtagatctatttttagtttcccgagtgttctaatccgctgagattctgaaacgttgtgtttgggcatccagcagtcccctttgccctgcccaggtgccacaatcacaggcttttctacgagaaacagactgaggacaaaaagcacgaaggacaatcgtacagactccaggcatgcactcacacaaatggcacttacctttgcagggctgctgcaccgagccttcagcgttgtcttgtttaacaccaagaatcgaatcctgatacagcagaggtcggacacgaaagtcacgtttcctggtgagtccgttcaaccaagccccggactgaagagagcatctcatgtgacttgaccggaggaatctgggacaggaactctctggtgctcagtgccgcactgtggtgagctggcagctcatcctgcagaaaatcggcagcttaggcagatgctaattatgctgatagctcttcagtaggctgggttttcttttttaaaaaagtaagaaactatatgagtttctgggtttttttgttttgttgtttctttgcaacggcaagttacttaaatgcagaggaatttatcaacctaaggatttaggggattaaaatagcatttagcataaaattaactaggtaataataataaaaattatcttacaggtcttagagttttaattatcttgtacttcttaaaattacaacttaaaatttttttttttttttggagatggagtctggctcagtcacccaggctggagtgcagtggcgccatctcggctcactgcaagccccgcctcctgggttcacgccattgtcctgcctcagcctcccaagtagctgggactacaggcgcccgccaccacacccgggtaacgttttgtatttttagtagagacggggtttcaccgtgttagccaggatggtctcgatctcctgacctcgtgatatgcctgtcttggccttccaaagtgctgggattataggcgtgagccaccgggcccggccaaaaaattttttagaggggaacagcatttacgtcaattgtggtcatttaaagtgttttggcctaggctgtcctcaaattttcaaaaccagaccttgcctgagccattaaagcgaatggctaagcacggccagctgtggccgaggttttctcctcccttagttcttcctcggagccgcagtgggtacatcctgcccattcccaaacccaccaccatacttgctggtcaagttgtactcacgggctccttgatggagctgaatgcaaagtttgtttcagaaaaattcaggagctgcaaagttaagagggtcaactgtagtacatagtcaacagtttgcaaataaagcccctggagctaagatttcctatcatgtgttagccgcctccaggatacataggggcaggtgggagtaccagctcttgtacttgcaagagtggattcaacttcagccaaactccttgcagagtgaccgaaggaagcactgagggtctgaggaacgagagggaacagagatttactgaggagagtgtgacctcccgtcatagcgctattgctgttacttgggtaaattaagtagaacctctcagtaaggaaacttggtcaaaggtattccagcagtcttcctgtgaaaccatgctcactgatcaccaccctcaaagtgcagcccagcttcctcagcccagctggtgcagccacccagcccacagccccaccacctcctcccgccaccccatggcatctcaggtcctctgtgggtacaaaactgagtaggaaccagtccctctcctaagacatactgggatagtgccacgggacatgtgtgtgcacatctgcaggaagggccgcaggagcggtcagggccagccccgccaggtggtcatgtggaagaccctcaccaagcccacagccgtggaggctggaggcgagtgctgctctgagagcccatgacaaacccactccccccgccaggctgtcttctgctgatgacggatgatggttttacatgaagcatctgcatttgtatttaatatattcacttttcaggaataaagagggatgttcccacatgcattttttccagggtattttaccgactcctgtagtagccacccattatacaacccagcagaactggaagaaaaggatgccatcggagtgaggagggcagcccagaggcgtctgcaagcagagctgggaattcctggggagcaggtacacacagcatccagtctcagctgtgtccacgggagtccaggttggcagcgggcagacggtgaacaaagtccaggctggatctacaccattgacctcatgaagcaccatgaggatgaaggatggggctgtggatggggctgtgaatgagctgtgaatggggctgtgaatggggctgtgaatgtagctgtggatggggcagtgtgagtccctatgtgtcccaggcagggttgagactgtgcaggaatctgtcgaccacacaccgaagaggaaattcaagccgggcgtggtggctcacgcctgtaatcccatcactttgggaggccgaggcgggcggatcacaaggtcaagaaatcaagaccatcctggccaacatggtgaaaccccgtctctattaaaagtacaaaaattagctgggcgtagtggcacacgcctgtaatcccagctacttgggagtcagaggttgcagtgagccgggattgtgccactgcactccagcctggcgacagagcgagactccatctcaaaaaaaaaaaaaagaaagaaattcaagtgtagaaagaatgtccaggatcctgtgagcatgtgttaccttcatccactcaagaacacgtttaagagaggatggatgttctcctgacaacgctagccggtttctacggggttttctgttgaggatgtgtgtgtgacacggttagttctttaaatgaagacagacaggtttactggaaccaagaaaccaaagccggtttatcattcagacttgagtccacaaaaatttacttagctaaaatcgaggttttggaaattatcaattaccaaagaaagtgttcattttctgaggaaaacaaatgtgtttattttctctatttttctgtaaattctgtgttttacattagcgttgttaacactgcaccaatttctgtcaatagatttctccagaggacattgtgttcatgacaatctatcaccacaaggcaaaatcagacagaatttggggagagcatgaaatttgttaccttctgcttgtgaggaaaaacgtcactctgaacccggatcccagtgaaacgaaaagcatcctctacctgtcccaggaggagctgtgggagctgctggagagggaggcgaggggtgaagtcaaagtcaccccctggctaagaaccattgccgagaggtttctgtaccggtggtggcctcacctggatgacgtgaccccgtttgtggagcttcacaaaatacacagagtgtgagaggcagggaggtcgagtcagccatgtgtaatgccctcagtgcaggcagacgcaccattgaggcaatgatacaccctctccaaaaaacagggcaaaaggggcacttgattgcccatcatgtataaatcactatttcaaccttttcatcaactttgtcatatcttcattttcccttttccttatttccatatttctcatctgcctggttgcagggaggaaatttaacatttcctttgtcccaatttccattttataagcacttgtttgattaacagcagctgatcctgaaagtcttggggagatcttgagagtcctgaagcaggcggactagcctggctggaccatgaggctgtctccccacagctttatccaagcctccaaggtcaggatgggatctctgtatcatgtttttctttttaaatcacttatttcagagtgcaacacaaggctgcatttttaaaaaaaagacacattcaatcttgcatcctaatacaagcagtacggaagatgcgtatggtctcagccaagtgactcgacgtttatccacttctgttcatttgatcgtttcagtaatatgcttacaaataaagacatacttgctttaaaacatactgttgttgtttaacacaaagtaaactatatgttaagttttggtgtttaa

SEQ ID NO: 8645 - DNA, 102 bp, Homo sapiens
ggctcacacctgtaatcccagcactttgggaggccgaggcgggcggatcacctgaggtcaggagatggagaccagcctggccaacatggtgaaacctcgtct

SEQ ID NO: 8646 - DNA, 1005 bp, Homo sapiens
gccaactggaaggcaacaattggatggcctgttaaagaagaaagaagcttaggacagggagaatgccactttccagtattacaaaaatatcctttaggcaaggtgaggcctttttttactctgacactatttttttttaaaccaaccctgaaagaaaaatgatagggtcaaggttggtccaaggaacagtaggtagggaagcagatgagaggttcagagctctggagtgtgagcaagatattcttcttctaggcacctgagttaccttctttctaaatcagggcgaaatgtcccttttcatgtttcctgagtagtcagggaagcaacgaaccaaagtcattgggaattagaactaagaatcagacgggcctcgtttgcatgccaatggtgtcactggctagccgtgcaacccatggcaagccactgcaagtctcagagctttggtttgcttgtgtgtgaaaatgacaaatatagtgcaggcctaacagaagcatggtgaacatctgatgatgcaatatgtgcaaagtgcttaacgtagttcctggcacaatattaagtacttcataaatgtttgctgttatgattatcaatcaaaacacagcagtaataaattaaggcatgttattagaccttagctttcctaccagtaaagaactagacaatctcaagtgttccttccagctctgctgtttatctgaaaattcacgacagacactcagtgatacagaaatgtgtgctccagaccatgtgaactggagaacagaatttggttctcttcagcttcaattcacatttgggttcatgtgttttgctgccttccttcttttctctacgtattgacacctaggaaaactcaagatgccagagatccctgacacctggctcatatggtaggctgcgtgatgatggagccgagagctgaaccgcccaaggacagagggcctcagcaggaactttgggaatcagcatattgatacctaagtggagacctctttccagacccag

SEQ ID NO: 8647 - DNA, 258 bp, Homo sapiens
ccaggctggagtgcagtggcatcatctcggctcactgcaagctccgcctcccaggttcatgcctttctcctgcctcagcctctcgagtagctgggactaccggcgcccgccaccatgcccggctaattttttttgtatttttagtacagacggggtttcaccgtgttagccaggatggtcttgatctcctgacctcgtgatccacccgccttggcctcccaaagtgctgggattacaggcgtgagccaccgcgcccgg

SEQ ID NO: 8648 - DNA, 692 bp, Homo sapiens
gaagatccagtgcacccgagcatagtcaccacctcctgtaacaacatccgccctctacaatcctgtgggtgcatttgctccatagaacttgggtctcgccgcaagggagtcagtatattgtttccagctgtctaggctcgtggaaaagaaagcacactggaaggaggttgaagtgggtgttgagaaagcctgtatttggtatctgctgcagatgtggccagataatgagagtccagtgagccaagtcctgctgtagagttgtgttctgagggttcgctcaccatccgacacaagcacaacaaagggagcacaaagtgatactggagtgctgacagtcagggagaagatcacagcgcgagaaagagagagcgcagaaacttcaaaagcatgaaatgatgctggggccatttcatttaggagcaaataagacctgcagaaggtagtcaccaagggcatcagcgtaatagagcagagtaaaaagaatagctgtgcgtgatccttagccatcaaggaaagtttagattgcattcaggagacttcgactagaaggcaggaatgtctcaaacaggcatccgaaggatttccacaaataacgaggtgcattttccctttacaatttgtgctacaggactgagacgtggaaatctggggactcatgtactctgtgttattattgattatatacctttttt

SEQ ID NO: 8649 - DNA, 691 bp, Homo sapiens
gaagatccagtgcacccgagcatagtcaccacctcctgtaacaacatccgccctctacaatcctgtgggtgcatttgctccatagaacttgggtctcgccgcaagggagtcagtatattgtttccagctgtctaggctcgtggaaaagaaagcacactggaaggaggttgaagtgggtgttgagaaagcctgtatttggtatctgctgcagatgtggccagataatgagagtccagtgagccaagtcctgctgtacagttgtgttctgagggttcgctcaccatccgacacaagcacaacaaagcgagcacaaagtgatactggagtgctgacagtcagggagaagatcacagcgcgagaaagagagagcgcagaaacttcaaaagcatgaaatgatgctggggccatttcatttaggagcaaataaccctgcagaaggtagtcacaaagggcatcagcgtaatagagcagagtaaaaagaatagctgtgcgtgatccttagccatcaaggaaagtttagattgcattcaggagacttcgactagaaggcaggaatgtctcaaacaggcatccgaaggatttccacaaataacgaggtgcattttccctttacaatttgtgctacaggactgagacgtggaaatctggggactcatgtactctgtgttattattgattatatacctttttt

SEQ ID NO: 8650 - DNA, 691 bp, Homo sapiens; identical to SEQ ID NO: 8649

SEQ ID NO: 8651 - DNA, 543 bp, Homo sapiens
ttagtacagcagtgctcccagcttaattgaaaatgctgcatatgaggggcagttaatgagaaatgcaagatgtgatgattcagaactgctgagatttagcagctcggtggctgtagcgaggaagtgttgggcttttttccctttgctattctctttgtacatctggacaggaagggggctgaaaggagttactaacagtgtgtatggttagagaactttgattatctggaagtccctcagctatttggaatgcagcagagagctagccaagcaggaaacgaaaaagagcctctgagccgacaaaacacatttctatttggccgtgcactgcagtcttcagattcttgtgatacgaaatcctctcaacccacactcacaactgatttgtttgtgcttactttatttttttatttttttgagacggagtctcgctctgttgcccaggctggagtgcagtggtacgaacttggctcactgcaacctccacctcccaggttcaagtgattctcctgcctcagcctcccaagtagctgggattatagg

SEQ ID NO: 8652 - DNA, 197 bp, Homo sapiens
agcgattctcctgcctcagcctcccgagtagctgggattacaggcacacaccaccacgcctggctaattttttgtatttttagtagagacggggtttcaccgtgttagccaggatggtctctatctcctgacctcatgatccacccgcctcagcctcccaaagtgctgggattgcaggcatgagtcaccgcgcctgg

SEQ ID NO: 8653 - DNA, 197 bp, Homo sapiens; identical to SEQ ID NO: 8652

SEQ ID NO: 8654 - DNA, 543 bp, Homo sapiens
ttagtacagcagtgctcccagcttaattgaaaatgctgcatatgaggggcagttaatgagaaatgcaagatgtgatgattcagaactgctgagatttagcagctcggtggctgtagcgaggaagtgttgggcttttttccctttgctattctctttgtacatctggacaggaagggggctgaaaggagttactaacagtgtgtatggttagagaactttgattatctggaagtccctcagctatttggaatgcagcagagagctagccaagcaggaaacgaaaaagagcctctgagccgacaaaacacatttctatttggccgtgcactgcagtcttcagatttttgtgatacgaaatcctctcaacccacactcacaactgatttgtttgtgcttactttatttttttatttttttgagacggagtctcgctctgttgcccaggctggagtgcagtggtacgaacttggctcactgcaacctccacctcccaggttcaagtgattctcctgcctcagcctcccaagtagctgggattatagg

SEQ ID NO: 8655 - DNA, 543 bp, Homo sapiens; identical to SEQ ID NO: 8654

SEQ ID NO: 8656 - DNA, 6665 bp, Homo sapiens
ctgggtttattgaaactggggaaaagtatacacttcttagcaagcagatgctaagatgagttctttataggatatggttggtaataatttaattagcctagcttttttggggaaaagtgttaattagtttttgcttaaaatacaccatcttgatggcctctgcttctccacttctatcccctgggtgaagactcaatttctcatccacactctgcagcaagtcccagcctggtcactactgttattacagaaaaaggaaatacaaaaaattatttttgggcagccacagattatgacacatgctaattattatcactgtaggttcaataaactgggggtagggtggggagcaggaccccatgaagttctcagtggactgctagcccccagtgccaatgctagaggctttgaagggctgctgaccgccaaggtggagggcagaaatgtgagattggggcatctcagtgagagggtgggggccctagcccctcagacagaagggaagaggtctctccaggtgagtccatccccccgcttcttgtccagccacctgccacagttgaagatggtggccacgccggtgctggtgttggtgacctccaccttctccaccagccagcctgagcagtagccactgctgtcgtgctccaggcgcaccttgcgcagctcacccagctccagcgtctccaggaagaagcggtctgtgctgccccgctcgaagaggttgcgcattttctgcttcagctcccgcttgcctgtgtctccgttggccccaaagatggtcacgaagacgttggcatcagtgcctgcccctggctcatagcctgttgtcacgatgacttcgtacttgacgggcaccaggctctggaccttgctggcaaagctctctgtcgtcttggtaacctcgaataccttgaagtacttcctcttcctcttgagggggatgaggcagtcacagttaaagaagtacctggcagagaggtgggagagtggaggggtaggggctaagcagaccccagccgaggctgctccctcccccagatccccttgctcatctataaatgatcccttcccaaggtgatgggatattggagctggaaatgttggtttaaatgtgcgtatggattcttgtttaacttcaaattcaccatggacgggcatctccattcttccagttgcttcttgattcttctacttcttttttgcccctcatactccatgtccaatccataagcaaatcctgttgactttattttttttttctcaccatcttggccaggctggtctggaactcctgacctcatgattcacctgcctcaggctcccaaagtgctgggattacaggcgtgagccactgcgcctggccgaccctatttttaagatatatccagaaccagcccacttgaaaactgtctagtatctatctgccctcctgctacttgggtccaagtcaccatcatctcctatttggaaattatcaagagcctcctaactggtcttctagctttttgctacctgtggtcaattctctatgaagcagccatgtgatcctattgagaggtaagcccaagtatgtccttcccctgctcagaaccctccagtggcttcccatgtcaagtaaaagccaaagactttacaacggtctgcaaaactcctcatgatctgactctcctcttcctgtgttttcctttattcatttttatgtatttttaatttttattttctttagagacagggtatcaatttgctacccaggttggactgcaatggcgcgatcatagctcactataacctcgaactcctgggctcaagtcatcctcctgcctcagcctcctgagaagctggaactatgagcatgcactatcatgtccagctaatttaaaaaaatatatttttgtagagatagggtctcaccatgcttcccaggctaatcttaaatttctggcctcaagcaattctcctgcgctggcctcccaaagcactaggattacaggtgtgagtcactgcacacagctgtgctttcctttctcacctgtcacctgctcttttccaagctcactcccatctgcagatactcttgctcccttaaagggactggttaatttttgtacctggtgttgtcacctttagagggagttgctgaatccagagtgacaattttaggcaaaaccaagtggaaatatgactattaaatgtacgctcccagatcccttacacttggctgagttgaacaaagagtttgtatatatatgtatgtgtgtgtgtgtgtgtgtgtgtgtgtgtgttcatggactgcagagtacaaagggaaagagaaagtcctctatcgaagaagccatcacaagcagaagcaagtctagagccaagagaatggtcttggaccaagaagtcctcccaaaccttctcttgcacatccccaattttagcctctgggtaatgacagtgggttcaggaattataaaggaaaaagccagacagcatggtgggaaaatgctgcacaggatgtgagagggcatggtctgccccagccctgccacctaccatctgtgtgaccttggacaagtcacatatcctacccagatcttgattttcccattggcgaagctggaggtttggactgaacaattgctatggtttcttcccactccaaattgctaatatgctaacacctttgaaaacaagctgtcttggtgctggctaacaacttcaggaatgcaacactgaaaaggtgtgcccaatggtgcaaaatcaaaccctattttagatgaacattcttaacagaaaaaaaaaaaaacaaaaaaaaaaacacctttggttttttgcctgcttacacaactccaggactttgcattcttgaatctcattagctcccacaacaaccctgggcatcatcctcccatttcataggaggaggaactgagacttgaagaagaaaagtcagcgcttaaggtgacccagagccagagcctgcctggccctgaagaataagccatttaaagacatttgcaggaaatccttattctgttttgagatccttcttcccccaatttatcacttgataaatttggattgttgttacatactacaatttcttagaggaggagatacttgcattgttttaaaattctcttaaaatgtatttctttatgcatatgcccactaatatgcatcattctatataaatacaaaaatcatctgatcatatacatacttttctaaacgtacttttttttgctccctctttgcttggctctctttctttctccttctcacttcagcatcgcttctcctcagataacccatgtaacagttgagggtgtagcctgccaaatttccctccatttcacccaaccctgcacagacccacgtgtacatagacatatggggatgtcagtgttccctttacaaaacggcatcacataagacatgttttcctgtgtctcgcttttctcactcaataatacttcctgggaattgctccaagtcatctggtatgtatttaattcattatttttgatggctgaaaaatattccctggtgtagatataaggaaatgttttctgatagacataattataggatcaccaaaatgtgggccctgcagacttacacaaagctctggctttggaaggacactcagcgggctgctcctgctagaaaggggggaaggtgtccagccagagtaaaggcaaaagcagagaaaaatgagcagaaaaaagtgatacatattcaaaactatgtataagcacacatctgtgaacattgtgtattagaaaaatcccagagagaatggggtcaccaaaatgctcatcatggtggccacctctgatgggcagggctgtagggaatttttactttcttttacatacgtttctgtatttgaatttttatggttgtgtattagatatgctaccgggataaacaataaaggtgttttcagttaaaaaataaggtctttttgtatgacctttcacccaaatcctgaggctattagtgatgaatgagaactggtcaggaaggtcaacagcacactgcaaaagagggatcagaatggaaatagctgtgagatggacatttggagttattgtgtgtatgagatattgagattaaattcatttgtaattcatgtaactccaaatatggctaacatggtggcaggaaaggaattgtggatgttacacacagtgttaagcaagtggttttataatgcagaatgtaggttccttctagaatgaggccatgtgaattgtcaccacgattaaacatgcctgcaaagtcccccttctggacgaaggtggtatttctgcaggcgacaggttttcatccagcagagaccactgagaactgcaggcgacaggttttcatccagcagagaataaggcttgagaattgcaggtgacaggttttcatccagcagagaccacaggcttgagaactgcaggcaggcaggggtgagctagggcatgacttcagagagctcctaggctgacacccctgccatcgtccctctaccctagaccctatagagcatccagctctcctcccaaagggcagcgtgaagcacaaggagttgatgggtaactgctggaggccacacagttgaccaggtgacagcgctagtatccagaggcctggaccccctgcaaccccttcacttcaggaagagccccttcctcacagatatctcttcctccccgctccagccctggtgacaacaaaagacaggctgcattcctgaggctggagggaaagatgcttcaattaagagcggctttttcttctgcaggatggaaaattctacaactgaggcccaggactgtggggcaggaagcttacagctgggcctttgccttcctttcctcctaagacaggaaggtgccaggtggtgctgagaactctctctcggccaacattgtgggtttaagggtaatgtgagggtgactattttattttgttttgtttattttgggaggtttgcagatgagcagtatcagcagacacagtccttgtggatgggaggtagtactgagccatggaaagggcttaggcctggccctgacttgctcagtgagtcattcacttttctgggatagtctcccagctgtcaagttctcatcagtactggtcctagcagccacatagagcaactcctacaggattgattgtacttgagctgggctttctctaaaagagcagcaaataatgccatagctcaagagggaagttgctatgaacagagttgtatctccccaaatttatacattgaagctggaacccccaatgccatggtatttggagatgggggacttcaagagataattaggtttagataaggtcatgagggtggggcccttatgatggaattagtgcccttacacaaagaggaagagaaaccagagctctctctctctgccacgtgaggacacagagagaaggcggccatgtgcaggacagaaagagagtgctcccagaactccaccatgctagaaccctgatctcagacttccagcctccaaagctgtgagaaatagctttctgttgtttaagccacccactctctgatattttgttatggcagtctgagcagaggtcagaacctcttctgccaaattcccaaggagttgcttggtctgggggagccaaatccagggagctgcaggttggacaagtgtggctttgagaagcttggcctcctgagggccagagcccatagccgagggctctgcctaggtccagcctggctgccgcttctgtgcagacaagggctacctttccttgtgcagggaaggctctagggtgtggtatgagcagggccagccccagggagaggtgcagatgtgggagcgtccacagtggttctggccctgtgagctatgtactcagctttcacttaccctttggcaagccttgatcttggattcccctttccaccctcccctggctccttctcagcacctttcctgccttccagagcctcagggctcttcctggcttccagcttggttaccaaggggttttaattagacaaattgatgactgtgactatgttgcccaggtaactaagacccttaatcttccagaaatgtctgagtctccagaaggctctgatgagagaatgcaaagccccttatctggggtactgtgaggcagatggaccattggattaccctagcttgtctctggtccctactctgcccacatggatggtgggttttcactatgaccgtgtaaacagcaggcttcataactgtgtttctttgtcattttagattgagggaaggggaaggcaaggaaagtctctgctctctggcactgtttgactttctcagtatccttccaaggaagcatccctggatccaaagactagatgcaccccaggtcatctggcctactcccctgcctctgatagtagatgcacaatccagatagcttcagaagcatacagctgtctcttcccttcctgccttctaggcctcctgaacagggtaatcttgaccttgaagaagagacctcatcataccctgctctcttgcccatggtccagctcagtccctgccccatgctgagggagtggcacttccttggggagaggctcagtacatacacattgccgtactccatctcggtgatggtgatggtcttgacatgccaggcaagttctctct

SEQ ID NO: 8657 - DNA, 560 bp, Homo sapiens
gagatggaaacaaagctgtttaatgatgccatcttcccctccccatcccccaagtcctgcgtgttcagcatggtggatatactcactatctggtgtaggcactgaatttaaactacatacacatgaactcatttagtcctcatcataacctacaaggtgggcattgtgatcattccccctgtgttacagataaggaaactgaggcccagagagagaaaataatgtgcccaagttctcacagttgcaaagaggcagaacggggatttaaacccaggctggttgcccccagagcctgtgcatttaacctctctctgagagatctctgagaggggcctgaacttgcctcagggtcctgaagcctcactgcgagtttagacctttctgggacagagggtgcagggacagcaaagtggcagaaacactggtcctggggtgccctcctgtagggatattttccagcccgacccaccttgttgctgtccttttctctacaggaaaatcagaagttaggtgctgagctctgcgaagtcttgctgtgactttgtgactgccgatcaggg

SEQ ID NO: 8658 - DNA, 831 bp, Homo sapiens
tccatagcaacaaataccagccgatgccagttattctcaagtgtgtcttcccatccctgactccaccagtctcctgttctgtacttccaattgcctactggatctctccttttgaatgttgcgtaaactcagtgtgtctcaaatagttacccaacccaatcctccacactgaaatattttctggcagtgctacaccttttgcagtgatactgtctcaggcactcacacagctgcagtactctaatactctgccactggccccttggcagtcgacaagagccagtgatgttgggaacagaaaagaagggatagacattagaatcatgttacatgatggagaaagggttcaagataagtatcagtgcaggacaggacttggagaatggttagttattggaatgaatggcaaatccaacaatctgaagacaggagcagtttgagcaaaggtgatcccaggactttcagcctgtcctgcatgtttctacggtttcgtctacagtgactggatcagttctggagtctcccagttctcattatccacctgggggctggggataagactccagagagtcctaggacaagctggcctttgggaatgcagtagatagttctcatttctctgattcactctttaatttattgaataaacactgtcaagtgcttcttatgacaaggcactctgctagatgctatgtgggacataatgaagtttacagctttaaaaaaaaaaagtcattattttggccaggcacgatggctcacgcctataatcccaacactttgggaggccaaggttgggggatcacttgaagccaggagtgaaaagaaaga

SEQ ID NO: 8659 - DNA, 831 bp, Homo sapiens; identical to SEQ ID NO: 8658

SEQ ID NO: 8660 - DNA, 324 bp, Homo sapiens
gttaggcaaggccatgtgattatttctgagcagttagttggcagtgagtggaagtgatgtgacatgtgtcatttccaaggtgaagctcttactagctggcttgagaacttttagatctcttttcttttgcatggaaaacctggaaataccatgttgagacagagacacccaagataaaattgcctggaaggctgagccaccacatgaaaatgccaaactacccatggcaaatgctgtgtgagcaagaaataaaattacattctgtttttttcttggagaaataagggaaaaaataaaaataaattacattctaataaaccatgg

SEQ ID NO: 8661 - DNA, 1128 bp, Homo sapiens
gctccttaaggaaaagtcagcaatttaaatcaaaattaaagcttgaatctctaaaactggctaacctcatctggaacatgtggctcccgcttgcacctaagatcaccttctccattgtctaccaggctagcgtgagccacacctgttcagttttccaactatcagctaagagaaagacttcattaatatttggaggatacaggccgggcacagtgtctcatacttgtaatcccagcactttgggaggctgaggcaggtggattgcttgaggccaggggttcaagacctgcctggcaaacacggtgaaaccccatatccacaaaaaatatgaaaattagccagacatggtggtttgtgcctgtaattccatcttcttgggaggctgaggcaggagaatcacttaaatccaggaggcggaggttgtagtgagccgagactgtgcctttgcactccagcctgggcaacagaatgaaactctcaaaaatatatatatattttggggaaacagataataaattcagaaaatacttggaatctagatgatatggctaataaaatttaatgtgatcatcttcagcatgaatctccactttgttctagctctccttccagattccagatacctcttctatcccctccacaagacgatactcacagacatacatatacctctgagtgcttcctggaaagggcagagtccaaaaagaagcctcttctccatgacagtcattgctagaacttgcccataaccagttctctctttccaagcacacaggtggggtcacactttctgcccccttggcagttaggcaaggccatgtgattatttctgagcagttagttggcagtgagtggaagtgatgtgacatgtgtcatttccaaggtgaagctcttactagctggcttgagaacttttagatctcttttcttttgcatggaaaacctggaaataccatgttgagacagagacacccaagataaaattgcctggaaggctgagccaccacatgaaaatgccaaactacccatggcaaatgctgtgtgagcaagaaataaaattacattctgtttttttcttggagaaataagggaaaaaataaaaataaattacattctaataaaccatgg

SEQ ID NO: 8662 - DNA, 1106 bp, Homo sapiens
gaccctcccagaattgaagccccgcccccttcgggccggccggacattggtcatccctccagtcaccatgggcttttatgtggtcaagaatgtcaatgctttggcctgccgctaccgataagctatcctcacactcacggctaccagtgggcctgctgggctgcttccactcctccactccagtagtatcctctgttttcagacatcctagcaaccagcccctgctgccccatcctgctggaatcaacacagacttgctctccaaagagactaaatgtcatagcgtgatcttagcctaggtaggccacatccatcccaaaggaaaatgtagacatcacctgtacctatataaggataaaggcatgtgtatagagcagaatgtttcccttcatgtgcactatgaaaacgagctgacagcacactcccaggagaaatgtttccagacaactccccatgatcctgtcacacagcattataaccacaaatccaaaccttagcctgctgctgctgctgccctcagaggaagatgaggaaggaaaaaaactgggtggacctacaaaaacccatcctctcccaactccttcttctctgcctctttcttgctgctgccctgagttttttgacacatctctttccataggggagtaatgggtgtgtcagccctggcctgctgggagagctgtttgtatgatttcccggctgatgtatgagcgtgcgcatctgggttcctgacagtggcatccatcactggcagttcttctgggaagcgggtgcttcaaaagtaaaattacaatcacactccagatttggtaagaaggttctattcctctgtgaatccagattcccccagagttgtaatgggagtcaagtaacaatattcattgagtggagagcagtttattaggcacaacaaaaagtagtcatcattcttcatgttgctatgagggagagtttgagtacaaagagaaagcatactgaaacatcaggtacacacacacaccccaactggacaaagcaaattagacctctccaaaattaagagaatattaggggctctatagggtaagcccttaattgtttggttaactcaaatcattatttttaaa

SEQ ID NO: 8663 - DNA, 4082 bp, Homo sapiens
aaagactcgaacagacatgcgagacctctaccaactgaaggtttcgtgagcgcactcctttgccaagatcttggtgaatagtctttcactgtgcaattttatcttagaaattgttttacgtttgatcatgattgtgcttggctggatgttttttgttggacttgtgtgttacatgggcacgtttccagagttgatggtaagtaatggctctgcctgtaaatccctggtggtcagtcctgtgctggctcatcttcctgtctgggttttctgaccaaatgggaaagatagttgaggtctcaccactaactggaagtcagaatgtgatgggaacaaagttagtgtcccaggctaccgggctacttcccatcccactagggacatccttttttattttttatttattattattattattttttgagatggagttttgctcttgttgcccaggctggagtgcagtggcgcgatctcggctcactgcaacctccgcctctcaggctcaagcgattctcctgcctcagcctcctgagcagctgggattacaggcatgcaccaccacgcctggcgaattttgtgtttttagtagaaacagggtttctccatgttggtcaggctggtctcaaagtcctgacctcaggtgatccacccacctcggcctcccaaagtgctgggattacaggcatgagccaccacgcctggctggggacatcctttttttttttttttttttttttttggagacggagtcttgctctgtcgcccaggctggaatgcagtggtgcgatctcggctcactgcaagctctgcctcctgggttcatgccattctcctgcctcagcctcccgagtagctgggactacaggctcccaccaccatgcttggctaatttttggtatttttagtaaagacggggtttcactgtgttagccaggatggtctagatctcctaacttcgtgatccgcctgcctcggctccccaaagtgctgggattacaggcgtgagccactgcgcccggccaggacatccttttaagtctttttttgtttccccctcccttgcatatatagctgtacttgtttcaaagcactatggaatttgcaaggggtctgctggagaccgtatttgacttgcggattgcaggccaagtggatcagtggttattggtaggaagggggacggtagggattggtgggaccttttagcagcccttctggtcaccacacagagtggttacccactgggccaatgagtacagccatctctgccctcaaattttctttttgattcagcctccaactctaaagtggcaggaaaggtggcctgttcaggagagcaaaacacaactgaggaggcgggctttaggtgaagatttgctgcagtaagtgggtggtcaggtttggtgggttggattcctccctttccaaagtacttggtagcaccctgaagtttcagtggagaatgtttattcctttggaaaatataataaactgtggaaggggaaatgatttggtgagtactgctgaggacagcaggccaaagttgtctattaataaccatgtctcataggtgttgttttgaagactgttcccatctattatttttctcctcacaaccctgtaatatattatactattaaaagcattcttttttttttttttttttctgaaacaggtcttgctctgccacccaggctggagtgaggtgcaagcagtcttcccatctcagcttcttgggtagctgatcctcaggcacatgccaccatgcctggctaattttttttttatttttttagagacaaggtgtcactatgttgcccaggcaggtcttgaactccaggcctcaagtggtcccccagccttggcctcccagagtgctgggattgcaggcataaaccaccgtgccttgccaggaccagcatttttaacgtcccttttggcagatactgaaactggagttaacattgaacttgggtttaggtcctaactttgtgactttctagctacgtgaccttgggaaagtttaattagtttctttgaacttcagtttcgaagtttcttctgtacaacaggagatatcactatttttgtgaagattatatttgggaattaatgtaaagcatttaatgcaaagctcaaaaattagcatttagtaaaatactaacttaacaacaagcaaataatgaaccagtcaacaaagatttactggtgacagtgacctcaactatttacctgaggccacacacagtagctcgttggtaaaggtgggatgcgagcacatttctctgtctctggacttcatagcctcccatactcattccactagaccagcctgcctacaggaaacactaatggcagtgcccttagcagaccagctcctgggtttcttaacgtttcaccccatttcattcagacctgttttttttcagagctgtgcctattgttagagaaacttaactcggagagttttaataatatactgattacaggagcagaaggttttttggaagctactccagaagttaggggtgtttagccccagccccaggtatactaagagcaggacttgatggttggggtttttatctccatctgccccaggatttctgtgaatgcattagcccaaagcagtcagaactttgtggcagtcctgaccagaccacttaactatttctgtgcctcactttctccagctgcgaaatgagtaaacagacagcccatcttccttctcttcccttctcaggaaagttgtaaataggctcaccctacatgttaagagtttaactgtaccattttataaaatgaaagatttcttttttgaacagcctaacaatagcatattaagttatttgctcatggcatacctagccagctaattctcttaatgaatccaggctttttttcttttgcatagcatctgattgcacaaagccaatagttaaacattttggcaggtgacgagttaatgagtatactgccagctaggtccaaatcacagacacaccagagcacagggcccttttgataaattttctttaacccaacgcatctagcaccctggccaaccatcccataggtgctcatgctgactgggttgccaaggttacaggagctgatatcataattggtgtctgagctctgcccccctaaatggccatgaggagccacttcaattcagactaggccacgaagctccttagtgaggagctgccatgctgggccatccaccatctggattcctacgactcagggaatagaacactgcaccttccagaagcacttgtttcttcgtgggtacaccaccagctgagaaagaagcctcatgatgattgttgtcttatggatgcttctcattgcaggaaccatgtggaagggatataaatatcccccaggaggggtaagtgtaccttcaactttgttctctattcctactttgaaatgtattcccgcccccaaaacaaactaagtatgaaaatccaactctagtaacattagaaacaaatacttttattatttttttaaagttactgtagctgttgggagggttcccattttctttcacgtgatctttaaggcccagagtcaaagctttctgagttgggcagtcttgtctctgttgtgctaatggacattttgtatgcccagtctttgatgccatttcctaaggatcagtccacttcagaaatccaaacttctctcttccacaagtaaacactagtctgtaaaagggatctggtggcagatgtctcttttctctctcctcctgctagaccttggaatttctgtcttttctctgcctcttgtcagctccccagtgctaagctccccttgcatccgggatcagaggcattaggtgagacagaattggaggtaacctcccctgccagtccttgcctgggaggccaaatgcctaagcccccacactagaaaccactaggcctgcatgacacacactttcttttttcccccacagactccagtggaagtaagcaaggatgatcctggtgaagtaatgcagctgtgaagctcacctgaccagctgtacagttcctgttgttggtttcacataaagtaattgcacatta

SEQ ID NO: 8664 - DNA, 570 bp, Homo sapiens
cgggtggatcacctgaggtcaggagttcgagaccagcctggccaacatggtgaaacaccatctctactaaaaatacaaaaattagccaggcgtggtggcgggtgcctctaatcccagctacttgggaggctgaggcaggagaatcacttgagcccaggaggcggaggttgcagtgagctgagattgcaccactgcactccagcctgggcgacagagcaagactctgtctcaaaaaaaaaaaaattgtagagatgaaaaatacattaaatgtccatgatgttgtagcagaaaagcaaaaaatatctttggtgacctctgagagggtgtctaatagtggggtggggctagaagtcagaatgtaatgcatggaagaggcgtagattggaaaaagctttgagtatggaccacttgtttaggaagtttggtcataaaaggaaattaagaaataagacagggaaggagccacagtatcatctggaagtttttttgaggaaaggacaggggtacctgtggcttcatgatggccaagaaaagagaatcaatggagaggaactaatccaaggtgatgaa

SEQ ID NO: 8665 - DNA, 322 bp, Homo sapiens
aagaagttaccgcaccttttttttttttttttttttttttttgagacagagtctcgctgtgtcgcccaggctggagtgcagtggcgcgatctcggctcactgcaagctccgcctcccgggttcatgccattcccctgcctcagcctccagagtagctgggactacaggcgcctgccaccacgcctggctatttttttgtgtttttagtagagacggggtttcaccgtgttatccaggatggtctcgatctcctgacctcatgatctgcccgcctcggcctcccaaagtgctgggattacaggcgtgagccaatgtgcccggc

SEQ ID NO: 8666 - DNA, 498 bp, Homo sapiens
gaaaaataaagcaaaggagaagatagactgaataaaaaaattttttggcttggtaatgaaagatcatagatacgaaatgaaaaatcaatgatgatgaaaaatgctttcaatttagaaatcaggagaactaggaaaagttctacagtagttccgaatcatctactatcacgttctgtgcccttgggcaactcaattaaagaagtatctagtaagtgctgtagtaggtactgggtgatctctaaggtcacggttatctctcaatttctttctattgatgccactaccattagaagactacctaaagagttctgaaggaactcaagggtgagcttgtggaaccactgccaaaaggaataggcttgatttctaccgaagaaagtacaagttggcaatgagtcccatctctaagaagggttttagaagggggcttggagccccatgcccatgagtgcctatttcagatccatgtaactttttgagataaaggataaagagtag

SEQ ID NO: 8667 - DNA, 498 bp, Homo sapiens; identical to SEQ ID NO: 8666

SEQ ID NO: 8668 - DNA, 116 bp, Homo sapiens
atttttgtatttttagtagagatggggtttcaccatgttggccaggctagtctcaaactcctgacctcaggtgatccacctgcctcggcctcccaaagtgctgggattacaggtgt

SEQ ID NO: 8669 - DNA, 104 bp, Homo sapiens
atttttgtatttttagtagagatggggtttcaccatgttggccaggctagtctcaaactcctgacctcaggtgatccacctgcctcggcctcccaaagtgctgg

SEQ ID NO: 8670 - DNA, 5265 bp, Homo sapiens
acagccacagtagaagcggtagaggcccgggaaggtatggccatattactctgatagatgtgatccatgtgtctgtgtactggtttttcgaagctttatcaacatttcaaatattttattattgcatcaccagaactataacagtgagaaaaggtatagttgtttctaggcatgttaacgaagcaggtgtttcctttgtgtcctatctttgcattaattttaaataaccttcaccacagctacagttttttttctgggctctatcagctttaatgcaacggcagaagcttaagcaactggtcatgagaggtcaagtggtttacttctgtatcccttccatgtacaagagacatccatttgattctcaagagagccaaataggtcagcctcttcagcgattctaaaagatttcaagagcagaggcagaagtagactggaatttagttcaattcatttctgaggttgccctaaggtaggcaagttaaattaactttgtttctatgaaaaccattggaactgataaacttgtattatacttgtaattgttttattaggtaagatggttcaaaacgcgaatgccttaacttggtgttataaaagttgaatcggaaggaaaatatgtagaagctatttttaagtttttaacttatgtacagctcctggttgtgcaagatagaaagctgtcctaaacgaaaagattagctcttttgttacttttttttgtggtctatgtggcctttgtgcgaaaagcaactaccctgggtttaacttgttcaattattctagtgttgcctttgttctagcattgagtatgtttctggtgcataagacactctttcttaaaggtactggggcccagtaagtacttgttagctttttgttaggtatatgtctaccatgattatgcatatagagcttttatgaaaattactttcacaatttcagctgccctttgggctttaaggaagcagtagctgcagccaagactgattcagtcagacattgcccatgactttcactagacgtgtgctccatagccacctttctgtgtgtttctctaggaggttgctgtgtgctaagaaactttttttaagcctgttgctttgctgcctaattgagctctctccacctgcttcctgtttttctgtagccatcagagggttctcgcttcagcacaagatccggagttttgaagaagcgcgaggtctggaccgaattaatgagcgaatgccaccccgaaaggatagcatacacgctggtgggccaatgaaatctgtaacctcagcacactcacatgctgcgcacaggagcgaccaagggaagaaagcccattcatgacttagagtcctgccgtggctcaggtggatctaaaactcaagaacaaattctatttatttattattggaaaatgaaaagcaactcaaaacaacttcaacgtggaggtgcatttataattcagtctgcatttattctgtaaaaaggtggctgttttataaattcttttaatttatgttcaatatatataaaaagtgcatctgttttgtttttcccttttttctccataattttaagaaatgaatctgattgttgtcaacacatttgtgaagtcttgtgctataaaggggaacttcccctaataaaagggccttggaaacctcaaacctgggtttctgacttgaactagtcagtcttcattattgttttttggaaggtaatgtctttcatgtaagactaataacgtttcaaatgcaagaagatttttttccttttcatttttttccttttctgctgggtgccattgaagaaagtcctcttagatttcagtggctaaaagtgcttcccttttgatgggaaactggatcatagtagaacttcaaagtgaataacccaaatccagtgattttaagggcgaagggaaatgttttctataataacctactttctctggactctcagttcgtttaaatatgttctagtaaacaaaataaaaaataataagggatgttcttagatttacttaaaatctgttcatctgaccatgggcatgattggtttaaatttccttaggactttggaggagaaagattttcagaaagctttcacaattgccagattattttactttcatttttgaaccccaggtgacttctgtaaaggaagtcactttctaaatatttgataaatgccctcagcagcaccttctacaacaagatgtatatatgcccttctaggctgttggcatcagctctcgcatgtgccttcccatcatccttctgttgttccctgtcagtattactgaaaccagctggggtagtagaaactgacaagagttcaatggtccccttgtgaattgaaggtcttgctaaagaacattggataagtgaggatttcctgtcttctatatcagttactctttaggttgaatggtatttcagccttcattagcatattttggaatgcgaaaagcaagtgttcagatgtagtgtgtgaattatcttcccttagtttgattttcaagtcacaaccaactagtgaaggaaattttggggctacttaggctcccattttaactagcctcatcgcaggagccgtgtcataatagtcattggtcagctctgcagtgaatgtacatgcctgggaacattacatcagagcatggaacgtgcacatttatggcattccttagtgtcatttgtgatgcggcagtctagcactaaagcaagtatttcagacagtaatacttcatattgggagtttccaggaaaccagaaaaacaaagaacaacataattttggtggtgtttttttttttccccaaaaaaccatacttctcattagaagaatgaagacttagcccatctatctctgttttcctatactttttttctaacagtttctgatttgtttatggcagaaatcaaggcactcttagggaatggaatctgcctgcatagattgctccattaataaaaagataggaaggagataaaggatctctgaatgggttgtgagtaaaacctgtgaaagaaggggggaaaagtctctagtaactgtcttttcctgattgttgttgaactcaaatcgggtattaagcacctagatatccttatgctcctttcttttccaatcccaggattagaaaagatcctgtctttggaaatttcactgatgaaagtcattccatgtgacagactgcagagctgctagtaccttatcccttttctccttttcattaaggctgttacatatatacaatccacaggtagaaaccactcttaggggcctccataagcaggcagtagtagaaatagttactgtaaatccttataagcaaaaaataatattttattacggatgattatttaggaatggcttcactattgtctcaaaaagcagaatgataaagcaagtttccttgacagaaccatcacaaaattatatacagtatttcactggttccctctgagctgtggaggaatcagccagagtagagaggtaggtggtcctggttcaagaaaacctgagtaagttttagagcagcactaactcttagaggaggttaagtttgaaaattcggttgaattctaaagataaagttatcccttccgttctgtagctgttttaatgtaaacaacaacttccaagatggctggaccctgccctgggtttgctcgaagactacttttcctgtctagggccatgattaaacagacattttaattgctgtcaaagttctgcagttttggtgttttcaaagtctcttctgttttattgaatgtttccccctgtgtgtgctaaagatactggaaacagttacattgtgttttccttcacaggaccttccttgtggaaggcccacagggaccttctttttctgcaacttctcccatttaggaaaacaaaaacaaaacaattcctcaggcatgtcaggactcctttgtaaacttttctgaaatgccattttgaaaatgatgcttcacatggaccaggtttctcacttttagtgacatacatatcacaggacatttaaatcgatcagatgattatttcttttacaaatttgaaaactcatttaatgtaagttcaaaacatatatcctttttttatttccgtgttctgaatgtttagagcaaaagcaaaactataacccaagggggtgtgtgtgtgtgtgtgtgtgtgtgtgtgtgtgtgtgtgtttctttaagagaatgataaaacaaaaatagcctccgttttccttaaactctcaaggtgacactttggttacaagtagaggcattgctgatttgctggtcttttgtgactggatattgattggcaaggtaagaattgcttatcacactctgatgagcttgatactgctccttgcctaggagtaaaagactcagcctctccaggaacatcagtattttttatgtctttcattgccttttttggttcttccatgaacaattcaatgaagcaagtttctctcaatagcaaagatttgccttcttaagattagctttctttgccatcctgataacttagggatgatttcctgacattgttcaaaataggaacagagaaacccttatttgttttgtcaatagactattattgaatgtcattaaggagcaagggaagatttttaaaaattggataatttcggggccttttttgccttttggcattgtcccttagatcctcttccctctgagtgctttaaaaacacacggtttgaggcacagctgatctctataggaaaaatattataagccatgcctgcatgagacacagctggacttgctgttcatggtcattattcaggagtctctccagcctcagaatgagtaaagctaaaatctgctccctctaccctgccctattttatgtaaatatggtagctgatctccaaaattttcaactgtaccatatctataaagtttaaccttttaagaattttcatccaagctgggcgcggtggctcgcacctgtaatcccagcactttgggaggctgaggccggtggatcacaacgtcaggagatcgagaccatcctggccaacatggtgaaagcccatctctactaaaaataacaaaaattagctgggtgtggtggcacatgcgtgtaatcccagctactggggaggctgaggcaggagaattgcttgaaccagggagttggaggttgcagtgagccgagattgcgccactgcagtccgcagtccggcctgggcgacagagcgagactccgtctcaaaaaaaaaaaaaaaaaaaaaaaagaa

SEQ ID NO: 8671 - DNA, 1679 bp, Homo sapiens
  SITE (1476): n equals a,t,g, or c
acagccacagtagaagcggtagaggcccgggaaggtatggccatattactctgatagatgtgatccatgtgtctgtgtactggtttttcgaagctttatcaacatttcaaatattttattattgcatcaccagaactataacagtgagaaaaggtatagttgtttctaggcatgttaacgaagcaggtgtttcctttgtgtcctatctttgcattaattttaaataaccttcaccacagctacagttttttttctgggctctatcagctttaatgcaacggcagaagcttaagcaactggtcatgagaggtcaagtggtttacttctgtatcccttccatgtacaagagacatccatttgattctcaagagagccaaataggtcagcctcttcagcgattctaaaagatttcaagagcagaggcagaagtagactggaatttagttcaattcatttctgaggttgccctaaggtaggcaagttaaattaactttgtttctatgaaaaccattggaactgataaacttgtattatacttgtaattgttttattaggtaagatggttcaaaacgcgaatgccttaacttggtgttataaaagttgaatcggaaggaaaatatgtagaagctatttttaagtttttaacttatgtacagctcctggttgtgcaagatagaaagctgtcctaaacgaaaagattagctcttttgttacttttttttgtggtctatgtggcctttgtgcgaaaagcaactaccctgggtttaacttgttcaattattctagtgttgcctttgttctagcattgagtatgtttctggtgcataagacactctttcttaaaggtactggggcccagtaagtacttgttagctttttgttaggtatatgtctaccatgattatgcatatagagcttttatgaaaattactttcacaatttcagctgccctttgggctttaaggaagcagtagctgcagccaagactgattcagtcagacattgcccatgactttcactagacgtgtgctccatagccacctttctgtgtgtttctctaggaggttgctgtgtgctaagaaactttttttaagcctgttgctttgctgcctaattgagctctctccacctgcttcctgtttttctgtagccatcagagggttctcgcttcagcacaagatccggagttttgaagaagcgcgaggtctggaccgaattaatgagcgaatgccaccccgaaaggatagcatacacgctggtgggccaatgaaatctgtaacctcagcacactcacatgctgcgcacaggagcgaccaagggaagaaagcccattcatgacttagagtcctgccgtggctcaggtggatctaaaactcaagaacaaattctatttatttattattggaaaatgaaaagcaactcaaacaacttcaacgtggaggtgcatttataattcagtctgcatttattctgtanaaaggtggctgttttataaattcttttaatttatgttcaatatatataaaaagtgcatctgttttgtttttcccttttttctccataattttaagaaatgaatctgattgttgtcaacacatttgtgaagtcttgtgctataaaggggaacttcccctaataaaagggccttggaaacctcaaacctgggtttctgacttgaa

SEQ ID NO: 8672 - DNA, 1680 bp, Homo sapiens
acagccacagtagaagcggtagaggcccgggaaggtatggccatattactctgatagatgtgatccatgtgtctgtgtactggtttttcgaagctttatcaacatttcaaatattttattattgcatcaccagaactataacagtgagaaaaggtatagttgtttctaggcatgttaacgaagcaggtgtttcctttgtgtcctatctttgcattaattttaaataaccttcaccacagctacagttttttttctgggctctatcagctttaatgcaacggcagaagcttaagcaactggtcatgagaggtcaagtggtttacttctgtatcccttccatgtacaagagacatccatttgattctcaagagagccaaataggtcagcctcttcagcgattctaaaagatttcaagagcagaggcagaagtagactggaatttagttcaattcatttctgaggttgccctaaggtaggcaagttaaattaactttgtttctatgaaaaccattggaactgataaacttgtattatacttgtaattgttttattaggtaagatggttcaaaatgcgaatgccttaacttggtgttataaaagttgaatcggaaggaaaatatgtagaagctatttttaagtttttaacttatgtacagctcctggttgtgcaagatagaaagctgtcctaaacgaaaagattagctcttttgttacttttttttgtggtctatgtggcctttgtgcgaaaagcaactaccctgggtttaacttgttcaattattctagtgttgcctttgttctagcattgagtatgtttctggtgcataagacactctttcttaaaggtactggggcccagtaagtacttgttagctttttgttaggtatatgtctaccatgattatgcatatagagcttttatgaaaattactttcacaatttcagctgccctttgggctttaaggaagcagtagctgcagccaagactgattcagtcagacattgcccatgactttcactagacgtgtgctccatagccacctttctgtgtgtttctctaggaggttgctgtgtgctaagaaactttttttaagcctgttgctttgctgcctaattgagctctctccacctgcttcctgtttttctgtagccatcagagggttctcgcttcagcacaagatccggagttttgaagaagcgcgaggtctggaccgaattaatgagcgaatgccaccccgaaaggatagcatacacgctggtgggccaatgaaatctgtaacctcagcacactcacatgctgcgcacaggagcgaccaagggaagaaagcccattcatgacttagagtcctgccgtggctcaggtggatctaaaactcaagaacaaattctatttatttattattggaaaatgaaaagcaactcaaaacaacttcaacctggaggtgcatttataattcagtctgcatttattctgtaaaaaggtgactgttttataaattcttttaatttatgttcaatatatataaaaagtgcatctgttttgtttttcccttttttctccataattttaagaaatgaatctgattgtcgtcaacacatttgtgaagtcttgtgctataaaggggaacttcccctaataaaagggccttggaaacctcaaacctgggtttctgacttgaa

SEQ ID NO: 8673 - DNA, 2999 bp, Homo sapiens
ccttgcccaggcagaaaagatggcagagggagggtgaacccagggcccatctgtgggtatgggctccaatttcctaaattgtttgtggttataaccatggcttccaccttgtctggcaccgggtccacatcttttctgagacctgctagaaggtgagtaaaggacagcctaggaaggcccagcagtggattgaggagggtcgggttacctggaggacgggtcccaaaactggcttgccacagtccctttcagtattgctgtgatgagacgcctggaggaaagctgtcagagcagatgtgtgtagaggaagaaagttgtgtagtcgaaggacagtgttgtttactcttatcttgagtgtgagtagagaactgtattaacaatagggctttgtgccattgacagagtgtgaaagagggagcctatattacattggggtttgggacctgacctgcctatatctagccagcgagagtgaatggggtcagtgttagctgccttcatctatgcagtcacaaaggtaaagatgatactggagagtatattccctcccgggaggccttggcctcacgcccctgccaccttggcaagacctgctaaataacacctttgtctgagacagggttatgcatcatctcctcttctatgccctcatggcaagtctaggtggcttaagattaagaagtgaggacatggaggcggactgtccctctgagcagctctgaagtagggccaagcacactgccttccagtaagttcttgcccacattccttcactcccttgacgtagatgtctccaaatactcttaacatgaaatgcatgtaatgaggagcaggcctgtcatagatcttgatttggggcaataaagatgtgtttttgtcacagaactttttgaggatgacactgtaaatccctaacttttattttctcagtgcatggtgacccccatagctgtttttcccaatagttctgtcagcaggcattttccaagaaggggccccagtattccttcctaaatggtgaggtggtcaagacgtcagaccagttggtggtgtgatattttttcaaggttctgaatgatggattatttgcttgtgcttagagattgcctactttttcttgctttcagttatgttaaagaaggcgagggaaatgttacttattggccgaaatcatctaatgtcttttttgtgaacaagaaattaatttgttaggacttttgtactataaattagaggtaatcttaagatttaaaaaaagaagaaaacacccttaaatgataactttattggctccctgtgtctttatttcctgtatttcctggtggaggtacttatatttggcttttactcatttaataattccagaccccaggagaaagcctggcttttgatgtctggtctggtctctgatgataacaaggaattcccctcccaagggagggaatcccatcacaataaaaaggacctctctctttcgtctctccagccctttcattttaaagcagctatggttggccacaacgtgtttctgtttctcccaactcagaatccactccccaaccctggcctccttcttacccaagtcccagccccctctgcagcttctccaatagaggccactacttgaagaaaaggaagaaagacatcccagaaaacatacattgtttaccaaggataaaaatagttttgtactcttgtaatttaatgactgtgcatgtgatcctaataatagacatggtgaattccatcttggagaagccaaggcagccaaagaggatttgaatgtggagttggcctaccaagaacgggaagtgtcagactagccttttcatgcctctgaaaagtagaaatatcatgaggtgctgtggattcacaaggaaaaacaagctcccctgggcaagtggggaattggggatagggaaagagccagggccctggagaggaaagtgtgtcagtgaggggactctacaggttatggcagtagaggtagaaaagctaaatccagcactgccaggtccaagtgaggtgacttttacactaaatacaaccacattaagggccacagtgcagtttacaggccagaaaacgggcccaggtttctaatttccaataagctgagtagcattgggttctttgttatcccagtggcatcctgatgtagcaatgtccctacaccttagctaaaccttcagtaaaattaggtaagatttgcccatatttctggaattgtggaaagatttttaatagcctggaaatgaaggacttcaatgcaaattcatattaacctgttgctccatctagatctgttcctcactttgttgcctgctgcatgtaattgcatggtcttgccttttttttttttatcacaactttcaggctttagaaagaaaatgtaattttgatacagtagatgaataatttaatggtaaatgaagcagactttttaatgttgatgctattaaggcgaaggttcatcatagaattcaaggaggtgggaagacaaggttcttctttgtttggaggccagagccgtactttatggtatccactgggccaacagatcagccctcttatcctacccatcgcagtctacctgagctgggaaagaaggctgatgcagacctaatttcccagctcctgggtctgtgccctcctttgtggctgagttgacttggcttggttttccctctgaggtcatcacttacttatccttcccttataaaatctactttctagagctgacagccacttgtttgtttcatctttcctgagaactaagagaggttcacccagctcagttcttctcaaagacaccccgtctgtgcattgtgcttgtttgctcatccatgaaaagaggaagagagaacagccgtggatgtgatgtcagtatcaaaacttccttgaggacaggcgggataaattgggcaaacggctgagttctcccgcagcctttgggagattggccctgagaacccagaatagatgcccattatacatca

SEQ ID NO: 8674 - DNA, 297 bp, Homo sapiens
tgtagttctttcagtttctcttctcatattgatatataaagccttgggaatagcagcaaactgttactgctcattattcttcactgccttcttttggcaaattggtactggagtaactgacagggttctcctaataggatctttcttgtggcaccctgtaccttttcatatattagcgtttttactgtctgagaaaggagatgcaaggaagtttacctgttggtactaatttttaagttgcttccttttccattgctaagaaagaagagggctttcttagttactggccaactctct

SEQ ID NO: 8675 - DNA, 297 bp, Homo sapiens; identical to SEQ ID NO: 8674

SEQ ID NO: 8676 - DNA, 297 bp, Homo sapiens; identical to SEQ ID NO: 8674

SEQ ID NO: 8677 - DNA, 495 bp, Homo sapiens
ttttctgctgggtgccattgaagaaagtcctcttagatttcagtggctaaaagtgcttcccttttgatgggaaactggatcatagtagaacttcaaagtgaataacccaaatccagtgattttaagggcgaagggaaatgttttctataataacctactttctctggactctcagttcgtttaaatatgttctagtaaacaaaataaaaaataataagggatgttcttagatttacttaaaatctgttcatctgaccatgggcatgattggtttaaatttccttaggactttggaggagaaagattttcagaaagctttcacaattgccagattattttactttcatttttgaaccccaggtgacttctgtaaaggaagtcactttctaaatatttgataaatgccctcagcagcaccttctacaacaagatgtatatatgcccttctaggctgttggcatcagctctcgcatgtgccttcccatcatccttctg

SEQ ID NO: 8678 - DNA, 495 bp, Homo sapiens
ttttctgctgggtgccattgaagaaagtcctcttagatttcagtggctaaaagtgcttcccttttgatgggaaactggatcatagtagaacttcaaagtgaataacccaaatccagtgattttaagggcgaagggaaatgttttctataataacctactttctctggactctcagttcgtttaaatatgttctagtaaacaaaataaaaaataataagggatgttcttagatttacttaaaatgtgttcatctgaccatgggcatgattggtttaaatttccttaggactttggaggagaaagattttcagaaagctttcacaattgccagattattttactttcatttttgaaccccaggtgacttctgtaaaggaagtcactttctaaatatttgataaatgccctcagcagcaccttctacaacaagatgtatatatgcccttctaggctgttggcatcagctctcgcatgtgccttcccatcatccttctg

SEQ ID NO: 8679 - DNA, 2373 bp, Homo sapiens
ttctcagcaaagaagttctatttatttttgccaatccttttctgcctaagaaccttaaagaaaaaaatacttatttctaaatgaaccctgtatttctaaggctcagttttggttgatcacccatgacttattgtccacaagctttgtcagcagcatctcggtacaaagatgtaaagtctctgttcttttttaccaaggtggtcttcattctcaatggatgccatctcactcttcttgagcctctcagtgagtataggattgatttgatggctagaatatagatatacaggaacaacaggggttctcagggatgtgatattagagtaggtggagttgtatggggagtgtagaaatattatcaaatggaaatttaaaaaccgggtagtcctgatagttctggagatgaacctgtttgctaagggagggatatcaactgtttcttttggtttccctctgtttttctctttactttctctgttactttcttttactttctctgttgaaagtaaaaagagaaaaaggtcagttattgtaagtgaagccaagtgccaggcttcctgtccttcccagaccatttcatggtaggagggtattggccagtttccaacagggtatagactgcaccccatgaggtgcccatcctctgccctggcctcgtactttctctcactcttgctctctcccctctgcccttcatttaagtagtattaactataggaaccaaaggcttcttcacaggaattttccagtaacatcttatctgtgtcccaggtatccattctcttttttgccataagttctggagttatagaaaggaaaatggatttaaattttggacaaagatttaggggtagttatctaaaaaaacacttcctcttctaccacttccttccgctctactctctgctctcatcctcaccccttgtccccagagcagtgtctgtctccttgttagtggcccaggccaagtccaagcccctccatgtaggtgtgacaacccaaagctccaaggtagccagggatataaaaggccatgtccctttcagagctgagatgacattataatattgacagttgacaatcttggagactgaggtgctaaggaatactgagaatgagtggccagtaactacagcctttaagccctcatagcttatttttgtattgggagaagtgatatctgcttattataaaaaaagaaaatgtcttttttttttttttttgagatggagtcccgctctgttgccaggctggagtgcagtggcgctatctcggctcactgcaaactccgcctcctgggttcaagcgattctcctgcctcagcctccccagtagctgggaatacaggcgtccgccaccatgcccgactaatttttgtatttttagtagagaccgggtttcaccatgttggccaggatggtcttgatctcttgacctcatgatccgcccgcctcagcctcccaaagtgctgggattacaggtgtgagccactacgcctggccaaaaagagaaaatttctaataaaacaaaaatccaaaggaaaggcaccttggccttttacatctcacaaccacctagtatctttcagtgatattcctccaggtatttctatatctgtatatgtatcgtgctatacgtgctgtattctaacttgctattttccctaacaaaaatgccaggttgtggaaaactttccatgtcagtaaatataagtccacattagcctttttaatgtatgcatagtattccatggcatagatgcatcctaatttatttagccattctccattgttggacatataggatgtttcctacttttacttattgtacacagtgctgtgattaaacatccttgagcatcgttttttgggtacttgcgtaattatccttggagacagctcaagaattgagattactggttcatagtgtattcatgtttttaaattcttgatatatatatatatatatatatatatatatgagatatattatctcatatatatataaagttcttgtactttcaccactggaataataaactttaagataaccctatagccatctaaagatcttatgtcaaccagtgctggggcatcatgctggactaccagaagatggtacccaagcacccttcctacaggaaggtgcttttctcctaatcaccaaccatagagtgaggaaagaaattcaggctcaaaattggaatactattgtagaaattgttagggaaggcctatgtaaattttcttctctaaccactgatccagcattaccttcaaaaatattgtcatcagcatatggagctggagtctataagccactccttcaattgtagcaaagcttcgtagtattctgagctctcattctcctaga

SEQ ID NO: 8680 - DNA, 264 bp, Homo sapiens
ccgggcgcggtggctcatgcctgtaatcccagcactttgggaggccgaggcgggcggatcacgaggtcaggagatcgagaccatcctggctaacacggtgaaaccccgtctctactaaaaatacaaaaagctggccgtggtggtgggcgccagtagtcccagctacttgggaggctgaggcaggagaatggcgtgaacccaggaggtggagcttgcagtgagtcgagatcacgccgctgcactccagcctgggagacagtgaga

SEQ ID NO: 8681 - DNA, 6434 bp, Homo sapiens
gatgtagaagagaattctagctctgaaagtgtctgttctggtcggaagctgcctcaccgcaatgcttctgctgtagctagaaaaaagttattacataattctgaagatgaacagagcttaaagtcagaaattgaagaagaggagctaaaagatgaaaatcaaccattaccagtgtccagttctcacactgcccagagcaatgttgatgaatctgaaaacagagactcagagtcagaaagtgatttgcgggtagcccggaaaaattggcatgctaatggttacaagtcccatactccagcaccttcaaagacaaaatttcttaaaatagagtcttctgaggaagactctaaaagtcatgattcagatcatgcatgtaacagaactgctggcccatcaacgtctgtgcagaaacttaaggcagagagcatctcagaggaagcagattctgaaccaggaagatctggtggtaggaaatacaatacatttcacaagaatgcgagtttctttaaaaaaaccaagattctgagtgactcagaagactctgaatctgaagagcaagatagagaagatgggaaatgtcataaaatggaaatgaacccaatttcaggaaatctgaactgtgaccctattgctatgtcccagtgttcctcagatcatggatgtgaaactgatttagattcagatgatgacaaaatagaaaaaccaaacaattttatgaaaggtaattcaaaacatttatctttgttcactgattgactctcaccatccttttctcttacacacattggttttttccccccgaaaaagtttcccttgaaacttttttctctttgctgtttctctccctcccatgcattctgtgttagccttctctgttcatcctttatattcttatgtgcatgcgtaactttttattgagtataattttattcacctaacaggcaatcttggccttaagaactatgcctattgaagatttcacttcttgtattgatgatggggatatattatattagagatgggcttgaataaagcagagaggggcacatttataagctgtgatgttgatagcttaagtagtagacaaaaagggtaggactatttaataaaaagagatgttagtaatagcaaataaaacagttactgagctgtttctattaggaagtttttctaaatgttttccattaataagcagtttagtcttcatttcttttatgaagtaggtactagcattattgttcattttacaggtaataactggagcacaaagtggtgaaataacttgttgaattaagattgtacccctggtacatggggattgataaaatactgtagagcagaagacagctaaaactaagatgaaaagtaattgtgtgattggagcttggggagttacggggagtttcagagaggctgagtgttaagtgattactttgcatatgctagtgctatggtaaacagtttagttgtattcatgttaatattatagtgtcaagatcatgggatgttattgagaatgtgttgaatttgtgaatggtgctgaggatgaaaaagttactgctttaaagtacagtcatgtgctgcataacagtggtggtctcataagattataatgaaggttaaaaatttctattgcttagtgaagtaatcatagctgtcctcaagtcctagtgcagtgcattaccttttctgtttggatacacagacacagacttaccattgtgtgacaactgcctgcaggattcagaacagtagcatgtcatacaggtttgtagcctaggagtaataggctataccatataacctagatgtgtagtagggtgtactgtaaggtttgtgtaagcacactctgtgatgtttgcttaagacgaaatagcctaacgatgcatttctcagaatgtatccttgctgttgagcaacatatgactatactaataggtgtgtaccattccattcactgcaatacccccttcaaattaatacgaattctgaacttgtttttaatattgaacatataattcctttagacttacaaaagattaatagaaatctgctctttaacttttagattctgcatcacaagacaatggactaagcagaaaaatttccaggaaaagggtctgttccagtgactcagacagtagtttacaggtggttaagaaatcatcaaaagccagaacaggtctcctgaggattactcgaagatgtgcagctacggctgccaataagatcaagctcatgagtgatgtagaagatgtcagtttagaaaatgtgcacactagaagcaaaaatggaaggaaaaaacctctccatcttgcttgtactacagctaagaagaaattgagtgattgtgaaggaagtgtacattgtgaagtaccaagtgaacagtatgcctgtgaaggcaagccacctgatcctgactccgaaggtagtacaaaagtgcttagtcaggctctaaatggagactcagactctgaagatatgttgaattcagaacacaagcacaggcataccaatattcacaaaatagatgcaccttctaaaagaaaaagttcctctgttacatcttcaggagaagattcaaaaagtcatattccagggagtgagactgataggacattttcttcagagtcaaccttggcacaaaaagctactgcagagaataattttgaagtggaactgaattatgggctgcgcaggtggaatggcagaagactcaggacctatggaaaggctccttttagtaagacaaaagtgattcatgattcacaggaaacagcagagaaggaagtaaaaaggaagagatcgcatcctgaattggaaaatgtgaaaatctctgaaacaactgggaattcaaagtttagacctgatactagttccaaatcatcagatttgggatctgtaactgaatcagatattgactgtactgataatacaaaaaccaaaaggaggaaaacgaaaggaaaagcaaaagtagttagaaaaggtaaaacttttacagctaacatatctaaaactgtgagacgtcaaagacaaagcaaacgccctaggttaagtgtggatgataatgactgggaggatttggactatgcaaaatctaaaagagttcttcgacgttcaaaaataaaaacgagaaatcagggtagaaggactgtgagataccatgatggggatgatgacagaagtttagaaaatgtgttagatttcaatggttgcaccttatgaccttgagggaaagccagttcatttaagaggaaatggactggcatttatggtgaaagctggctgttaaaattatttttttgtcttacaattcagggaatatatttatatttttctatgaaaagttatgaatgtgactaaatcatgactgttatttttatttgcacttgctggtctttgtagcagcattcagcacaggtgccaaaatatgcttcattttgggggcagatctattttgacagtatttgactacatatagcaagagtttgaaatatgttaaacactagacatcctggttatcaaaaccaatgagcattactttcatggcagcaagtgtcatgcagttattttctgaatttgtcaaagaggcagtagtttctaacccctgttctatagtagttacaacaatttcacaacctatgtttacagattcttcataaatacatgcatactgacactataatcatgggacgtgtaaccatgattagtaggcgaggtacctaccacttttttttttttcttcccctggctacttgagtagaatgcattataccagatctggtcactttcattgaaatggtttctaattttcttcccaagtgctgttgggtttttttcttcttaaggaaaacgttgtcacttttatgttataaacttgaatttataaagtgctggtaaattatttttaatgatttgagtgcatgttttaaacctctaggaccagagcatagtcagagcattttcttttaaattgtgcactaacaaaatgctatataatctgtcttctgtccaagatctcctggtttccattgtaagggatttaaccaaaatcttgctcttccataatcttactctgtgaaatagaggaattcgtgtgccttagatttagaagtgtgttctttaatagagtgtacagggctaaaagagtatttaagttaatatgtaggtttcccccatctgtattccaattgtagaggtgagttttgttaagagtacaattgcaaatcttatctatataggaaaatagctaaatgtcattctccatctctttgttttagtttactgcttccatgtgcaatcctaagcattctttgctggggcaactaaatgtatctttattagtgacttctagtccaaatataagaaactgtcatgttttgtgggaaaataattttataatccatttaaagtgaaagtttatcacacaaatagtacacttattttctaaccaaatacttgataggttatgctactccagtgtagatggccattcctaacttgtttgtgcctgaagatggacttgattcaaatggtttacatatttagtgggtaagggatatgttacagtaccccacctgtaagttatttattagccctaattgtgtttgatttcagacaaaattaacccttttctcctgtgtatctttgaagtggcagataaggtgaagcatcagactggtatcaatattagacaatgttatttattagccctaattgtgtttggtttcagacaaaaccttttctcctgtgtatctttgaagtggcagacaaggcgaagcatcagactggtattaatgttagagaatgttctgaagtgttcctattttgtagttatctattccatttgacatagtagaaggtacattttctttctactctgatgcatggggaaggatgtttttggacattatcaactgagataggtgggaaacctcctctcatttgtggcttagagagctatcaccatttcagaactatgatgcttttcttctcagaacttgtgttaagtagatagtaaacagattgattcatgataattgtccttgactaagactgaaaagactaatgggatgccttttactttgctaattttaaaaactggtgatagatgtcaaatccattaatttatttaaactcttcttaaccttctcttttataatctgttctcaggttttaactccatgtttaccatcatttgcaaaaaggtaccaaaaaaatccataaataaatatggaatacattcataagtacatacattcttttggtataaaacaatattttgacagtttaggcttcattaatagaactattctgattatttggactgcattaattggtcattgactggccatccaattaccattttttctttcagtccaaaatagttagacccttgcatacagaagtggtattttggtttttaatcagatttggtttcatcagaagcagcaagaatggacctgatgtctttaaaagcatagccgacaatggtagcttctcaagttatgaaataaaactgagagataatggagaaaataatttttatgggtttttttggttatggtgctattcctaaggttaactttgaatatgtgacacacacactcctaagtacctttaaggaaaattaataaatcattaatagttaaaatgtttacattgagcactagaacatgtttggccttttttttctacgttatgcaaaatgcccagggatttaatgcacaggtgtactttaatgtttagggtcagtttgtagtattcttgagaaaaagataaagggttataatttgaatgtgaactgatccagaaataagtgctgtacctttccactgcacttgaagttcaacttaatggtgtatgtgaaaaacaaaaactactttggttgtgtatgtccaaagtcctatggttttattcatttatggttttacaggctttgaagtactcagatttgatttttgctttcttggaaagactcactttaccaagcatataaaggaaaaatgatttcaaacattgacaagatagatgagtgttaacaaagctttcttttttcgtgtcctccttatttaaaaaggtatacttacaatgtgaagtaacttatgaataaaaggaaaagtttatcccatattcaaataattcctaaggtcagcctccctttttgtaagtggcaaatatctgattaaatcatttctcagtttattaatccttggaaacaatgatatagcagttactcacagcttgtaaattacaacagaaaggttcctttcaaatagtagagctgcacctaaagaggaaattgggtttataagaaaatggaggcaaagaacttaagttttaagaaaaagcacttcaaaacagaagggcaaatggaaaaggggaatataaaacaaaccaataaaaataccatctgagggtgttactgtccaaaa

SEQ ID NO: 8682 - DNA, 7065 bp, Homo sapiens
gatgtagaagagaattctagctctgaaagtgtctgttctggtcggaagctgcctcaccgcaatgcttctgctgtagctagaaaaaagttattacataattctgaagatgaacagagcttaaagtcagaaattgaagaagaggagctaaaagatgaaaatcaactattaccagtgtccagttctcacactgcccagagcaatgttgatgaatctgaaaacagagactcagagtcagaaagtgatttgcgggtagcccggaaaaattggcatgctaatggttacaagtcccatactccagcaccttcaaagacaaaatttcttaaaatagagtcttctgaggaagactctaaaagtcatgattcagatcatgcatgtaacagaactgctggcccatcaacgtctgtgcagaaacttaaggcagagagcatctcagaggaagcagattctgaaccaggaagatctggtggtaggaaatacaatacatttcacaagaatgcgagtttctttaaaaaaaccaagattctgagtgactcagaagactctgaatctgaagagcaagatagagaagatgggaaatgtcataaaatggaaatgaacccaatttcaggaaatctgaactgtgaccctattgctatgtcccagtgttcctcagatcatggatgtgaaactgatttagattcagatgatgacaaaatagaaaaaccaaacaattttatgaaaggtaattcaaaacatttatctttgttcactgattgactctcaccatccttttctcttacacacattggttttttccccccgaaaaagtttcccttgaaacttttttctctttgctgtttctctccctcccatgcattctgtgttagccttctctgttcatcctttatattcttatgtgcatgcgtaactttttattgagtataattttattcacctaacaggcaatcttggccttaagaactatgcctattgaagatttcacttcttgtattgatgatggggatatattatattagagatgggcttgaataaagcagagaggggcacatttataagctgtgatgttgatagcttaagtagtagacaaaaagggtaggactgtttaataaaaagagatgttagtaatagcaaataaaacagttactgagctgtttctattaggaagtttttctaaatgttttccattaataagcagtttagtcttcatttcttttatgaagtaggtactagcattattgttcattttacaggtaataactggagcacaaagtggtgaaataacttgttgaattaagattgtacccctggtacatggggattgataaaatactgtagagcagaagacagctaaaactaagatgaaaagtaattgtgtgattggagcttggggagttacggggagtttcagagaggctgagtgttaagtgattactttgcatatgctagtgctatggtaaacagtttagttgtattcatgttaatattatagtgtcaagatcatgggatgttattgagaatgtgttgaatttgtgaatggtgctgaggatgaaaaagttactgctttaaagtacagtcatgtgctgcataacagtggtggtctcataagattataatgaaggttaaaaatttccattgcttagtgaagtaatcatagctgtcctcaagtcctagtgcagtgcattaccttttctgtttggatacacagacacagacttaccattgtgtgacaactgcctgcaggattcagaacagtagcatgtcatacaggtttgtagcctaggagtaataggctataccatataacctagatgtgtagtagggtgtactgtaaggtttgtgtaagcacactctgtgatgtttgcttaagacgaaatagcctaacgatgcatttctcagaacgtatccttgctgttgagcaacatatgactatactaataggtgtgtaccattccattcactgcaatacccccttcaaattaatacgaattctgaacttgtttttaatattgaacatataattcctttagacttacaaaagattaatagaaatctgctctttaacttttagattctgcatcacaagacaatggactaagcagaaaaatttccaggaaaagggtctgttccagtgactcagacagtagtttacaggtggttaagaaatcatcaaaagccagaacaggtctcctgaggattactcgaagatgtgcagctacggctgccaataagatcaagctcatgagtgatgtagaagatgtcagtttagaaaatgtgcacactagaagcaaaaatggaaggaaaaaacctctccatcttgcttgtactacagctaagaagaaattgagtgattgtgaaggaagtgtacattgtgaagtaccaagtgaacagtatgcctgtgaaggcaagccacctgatcctgactccgaaggtagtacaaaagtgcttagtcaggctctaaatggagactcagactctgaagatatgttgaattcagaacacaagcacaggcataccaatattcacaaaatagatgcaccttctaaaagaaaaagttcctctgttacatcttcaggagaagattcaaaaagtcatattccagggagtgagactgataggacattttcttcagagtcaaccttggcacaaaaagctactgcagagaataattttgaagtggaactgaattatgggctgcgcaggtggaatggcagaagactcaggacctatggaaaggctccttttagtaagacaaaagtgattcatgattcacaggaaacagcagagaaggaagtaaaaaggaagagatcgcatcctgaattggaaaatgtgaaaatctctgaaacaactgggaattcaaagtttagacctgatactagttccaaatcatcagatttgggatctgtaactgaatcagatattgactgtactgataatacaaaaaccaaaaggaggaaaacgaaaggaaaagcaaaagtagttagaaaaggtaaaacttttacagctaacatatctaaaactgtgagacgtcaaagacaaagcaaacgccctaggttaagtgtggatgataatgactgggaggatttggactatgcaaaatctaaaagagttcttcgacgttcaaaaataaaaacgagaaatcagggtagaaggactgtgagataccatgatggggatgatgacagaagtttagaaaatgtgttagatttcaatggttgcaccttatgaccttgagggaaagccagttcatttaagaggaaatggactggcatttatggtgaaagctggctgttaaaattatttttttgtcttacaattcagggaatatatttatatttttctatgaaaagttatgaatgtgactaaatcatgactgttatttttatttgcacttgctggtctttgtagcagcattcagcacaggtgccaaaatatgcttcattttgggggcagatctattttgacagtatttgactacatatagcaagagtttgaaatatgttaaacactagacatcctggttatcaaaaccaatgagcattactttcatggcagcaagtgtcatgcagttattttctgaatttgtcaaagaggcagtagtttctaacccctgttctatagtagttacaacaatttcacaacctatgtttacagattcttcataaatacatgcatactgacactataatcatgggaggtgtaaccatgattagtaggcgaggtacctaccacttttttttttttcttcccctggctacttgagtagaatgcattataccagatctggtcactttcattgaaatggtttctaattttcttcccaagtgctgttgggtttttttcttcttaaggaaaacgttgtcacttttatgttataaacttgaatttataaagtgctggtaaattatttttaatgatttgagtgcatgttttaaacctctaggaccagagcatagtcagagcattttcttttaaattgtgcactaacaaaatgctatataatctgtcttctgtccaagatctcctggtttccattgtaagggatttaaccaaaatcttgctcttccataatcttactctgtgaaatagaggaattcgtgtgccttagatttagaagtgtgttctttaatagagtgtacagggctaaaagagtatttaagttaatatgtaggtttcccccatctgtattccaattgtagaggtgagttttgttaagagtacaattgcaaatcttatctatataggaaaatagctaaatgtcattctccatctctttgttttagtttactgcttccatgtgcaatcctaagcattctttgctggggcaactaaatgtatctttattagtgacttctagtccaaatataagaaactgtcatgttttgtgggaaaataattttataatccatttaaagtgaaagtttatcacacaaatagtacacttattttctaaccaaatacttgataggttatgctactccagtgtagatggccattcctaacttgtttgtgcctgaagatggacttgattcaaatggtttacatatttagtgggtaagggatatgttacagtaccccacctgtaagttatttattagccctaattgtgtttgatttcagacaaaattaacccttttctcctgtgtatctttgaagtggcagataaggtgaagcatcagactggtatcaatattagacaatgttatttattagccctaattgtgtttggtttcagacaaaaccttttctcctgtgtatctttgaagtggcagacaaggcgaagcatcagactggtattaatgttagagaatgttctgaagtgttcctattttgtagttatctattccatttgacatagtagaaggtacattttctttctactctgatgcatggggaaggatgtttttggacattatcaactgagataggtgggaaacctcctctcatttgtggcttagagagctatcaccatttcagaactatgatgcttttcttctcagaacttgtgttaagtagatagtaaacagattgattcatgataattgtccttgactaagactgaaaagactaatgggatgccttttactttgctaattttaaaaactggtgatagatgtcaaatccattaatttatttaaactcttcttaaccttctcttttataatctgttctcaggttttaactccatgtttaccatcatttgcaaaaaggtaccaaaaaaatccataaataaatatggaatacattcataagtacatacattcttttggtataaaacaatattttgacagtttaggcttcattaatagaactattctgattatttggactgcattaattggtcattgactggccatccaattaccattttttctttcagtccaaaatagttagacccttgcatacagaagtggtattttggtttttaatcagatttggtttcatcagaagcagcaagaatggacctgatgtctttaaaagcatagccgacaatggtagcttctcaagttatgaaataaaactgagagataatggagaaaataatttttatgggtttttttggttatggtgctattcctaaggttaactttgaatatgtgacacacacactcctaagtacctttaaggaaaattaataaatcattaatagttaaaatgtttacattgagcactagaacatgtttggccttttttttctacgttatgcaaaatgcccagggatttaatgcacaggtgtactttaatgtttagggtcagtttgtagtattcttgagaaaaagataaagggttataatttgaatgtgaactgatccagaaataagtgctgtacctttccactgcacttgaagttcaacttaatggtgtatgtgaaaaacaaaaactactttggttgtgtatgtccaaagtcctatggttttattcatttatggttttacaggctttgaagtactcagatttgatttttgctttcttggaaagactcactttaccaagcatataaaggaaaaatgatttcaaacattgacaagatagatgagtgttaacaaagctttcttttttcgtgtcctccttatttaaaaaggtatacttacaatgtgaagtaacttatgaataaaaggaaaagtttatcccatattcaaataattcctaaggtcagcctccctttttgtaagtggcaaatatctgattaaatcatttctcagtttattaatccttggaaacaatgatatagcagttactcacagcttgtaaattacaacagaaaggttcctttcaaatagtagagctgcacctaaagaggaaattgggtttataagaaaatggaggcaaagaacttaagttttaagaaaaagcacttcaaaacagaagggcaaatggaaaaggggaatataaaacaaaccaataaaaataccatctgagggtgttactgtccaaaagtaaagaataagatgcatcactaagccctttgcactcgttatgacctcgtaagtaaaaattatcacttagaataaggggtgcacactacattccctctgtcttctagacttttttttttgtagaagaatcagaaaacaatttactaacctccctgtttgatattaaaaataggaagaattttaatattttctgttagtacaagttgaacttgattgtgccaactgaaaccccagaggtttgtatatcagtagaatgcaagaacattgttaaaggtgcttacgatcttttttgttttcctttccactccattgtatcaattttttgagtaacttttaaatggctagaaaatggtctttttgctttgcccttttaaagctgaaataaccagctccattcttttcatgaatagtaagttgatatatttatttatcaggtatcttgcagttgtcaccaaatactgtagttttcttatgttgtatggaaattatagttcaattattttaatgtgatagagtgcaacaagtcattgtagaacttttcacctgttaatgttgaagttatacctctgaatttctgctgtggatatcaaggaaataataaagcagaaaccccaagaaatttgcaacttaa

SEQ ID NO: 8683 - DNA, 579 bp, Homo sapiens
aattatcacttagaataaggggtgcacactacattccctctgtcttctagacttttttttttgtagaagaatcagaaaacaatttactaacctccctgtttgatattaaaaactaaataggaagaattttaatattttctgttagtacaagttgaacttgattgtgccaactgaaaccccagaggtttgtatatcagtagaatgcaagaacattgttaaaggtgcttacgatcttttttgttttcctttccactccattgtatcaattttttgagtaacttttaaatggctagaaaatggtctttttgctttgcccttttaaagctgaaataaccagctccattcttttcatgaatagtaagttgatatatttatttatcaggtatcttgcagttgtcaccaaatactgtagttttcttatgttgtatggaaattatagttcaattattttaatgtgatggagtgcaacaagtcattgtagaacttttcacctgttaatgttgaagttatacctctgaatttctgctgtggatatcaaggaaataataaagcagaaaccccaagaaatttgcaacttaa

SEQ ID NO: 8684 - DNA, 756 bp, Homo sapiens
atagtaaggattgaaaagtaaagtatgtaatgctaagggctgtgttgtcttttcttacgattttaagttttaaaggctgttaaattacagagatgttgcccaaggatacatggggattctcaaaagtaagagatttttacctttttcataatctgccaagctggttcctaatatattgttaaattggtagaaaaatatctttaaattggtgtctgctcaagaattgcttttctagatttgatggagggagggggagagtcacatcatttggattctaccaatctgcaggctctatctttggcaacatgtaaataattagactatacatctgtttctcaagtatggcaagaccaatagtttgaatttaattatcaatgctatggtatactttctggtcatattttagttatgtcagttttaaggtaagttttttcatttattaaagcccttaaatgagattttagactgccaaagagaagaggcagtccaattgacctaactgaaatgagatgaccagtatatagagcctagatggactgtagcagctctacccctttgttttacaaggtaaatcattttaaaaattaccttttttgatcagtgggtaaaagttaaagggatctttaatttttgatatattcaagttaattttctaaatgtgaatcagtccttggactgcaactatatattcacctacaaaatcccaatcaaaaaattacatgagcctgtcaagcagatctttagttttccacttca

SEQ ID NO: 8685 - DNA, 1796 bp, Homo sapiens
attcaacatttccgtgtcgcccttattcccttttttgcggcattttgccttcctgtttttgctcacccagaaacgctggtgaaagtaaaagatgctgaagatcagttgggtgcacgagtgggttacatcgaactggatctcaacagcggtaagatccttgagagttttcgccccgaagaacgttttccaatgatgagcacttttaaagttctgctatgtggcgcggtattatcccgtattgacgccgggcaagagcaactcggtcgccgcatacactattctcagaatgacttggttgagtactcaccagtcacagaaaagcatcttacggatggcatgacagtaagagaattatgcagtgctgccataaccatgagtgataacactgcggccaacttacttctgacaacgatcggaggaccgaaggagctaaccgcttttttgcacaacatgggggatcatgtaactcgccttgatcgttgggaaccggagctgaatgaagccataccaaacgacgagcgtgacaccacgatgcctgtagcaatggcaacaacgttgcgcaaactattaactggcgaactacttactctagcttcccggcaacaattaatagactggatggaggcggataaagttgcaggaccacttctgcgctcggcccttccggctggctggtttattgctgataaatctggagccggtgagcgtgggtctcgcggtatcattgcagcactggggccagatggtaagccctcccgtatcgtagttatctacacgacggggagtcaggcaactatggatgaacgaaatagacagatcgctgagataggtgcctcactgattaagcattggtaactgtcagaccaagtttactcatatatactttagattgatttaaaacttcatttttaatttaaaaggatctaggtgaagatcctttttgataatctcatgaccaaaatcccttaacgtgagttttcgttccactgagcgtcagaccccgtagaaaagatcaaaggatcttcttgagatcctttttttctgcgcgtaatctgctgcttgcaaacaaaaaaaccaccgctaccagcggtggtttgtttgccggatcaagagctaccaactctttttccgaaggtaactggcttcagcagagcgcagataccaaatactgtccttctagtgtagccgtagttaggccaccacttcaagaactctgtagcaccgcctacatacctcgctctgctaatcctgttaccagtggctgctgccagtggcgataagtcgtgtcttaccgggttggactcaagacgatagttaccggataaggcgcagcggtcgggctgaacggggggttcgtgcacacagcccagcttggagcgaacgacctacaccgaactgagatacctacagcgtgagctatgagaaagcgccacgcttcccgaagggagaaaggcggacaggtatccggtaagcggcagggtcggaacaggagagcgcacgagggagcttccagggggaaacgcctggtatctttatagtcctgtcgggtttcgccacctctgacttgagcgtcgatttttgtgatgctcgtcaggggggcggagcctatggaaaaacgccagcaacgcggcctttttacggttcctggccttttgctggccttttgctcacatgttctttcctgcgttatcccctgattctgtggataaccgtattaccgcctttgagtgagctgataccgctcgccgcagccgaacgaccgagcgcagcgagtcagtgagcgaggaagcggaaga

SEQ ID NO: 8686 - DNA, 631 bp, Homo sapiens
ccccacttcaagaactttgaagcgccgcctacatactcgctttgatatcttgtaccagtgctgctgcaggtggccaattaagtcgtgtctttaccgggttggactcaagcgaatagtttccggataaggcgcagcggtcgggctgaacggggggttcgtgcacacagcccagtttggagcgaacgacctacaccgaactgagatacctacagcgtgagctatgagaaagcgccacgcttcccgaagggagaaaggcggacaggtatccggtaagcggcagggtcggaacaggagagcgcacgagggagcttccagggggaaacgcctggtatctttatagtcctgtcgggtttcgccacctctgacttgagcgtcgatttttgtgatgctcgtcaggggggcggagcctatggaaaaacgccagcaacgcggcctttttacggttcctggccttttgctggccttttgctcacatgttctttcctgcgttatcccctgattctgtggataaccgtattaccgcctttgagtgagctgataccgctcgccgcagccgaacgaccgagcgcagcgagtcagtgagcgaggaagcggaagagcgcccaatacgcaaacagcctctcgccgcgcg

SEQ ID NO: 8687 - DNA, 686 bp, Homo sapiens
  SITE (95): n equals a,t,g, or c
caccaaggccagtttggaagcgaacggctaccccgaaattaagatactacagcgtgagttatgagaaagcgccacgcttcccgagggaagaaagncgggacagttatccggtagccggcagggtcgaaccagaagagcgcacgaggagcttccaaggggaaaacgcctggtatctttatagtcctgtcgggtttcgccacctctgacttgagcgtcgatttttgtgatgctcgtcaggggggcggagcctatggaaaaacgccagcaacgcggcctttttacggttcttggccttttgctggccttttgctcacatgttctttcctgcgttatcccctgattctgtggataaccgtattaccgcctttgagtgagctgataccgctcgccgcagccgaacgaccgagcgcagcgagtcagtgagcgaggaagcggaagagcgcccaatacgcaaaccgcctctccccgcgcgttggccgattcattaatgcagctggcacgacaggtttcccgactggaaagcgggcagtgagcgcaacgcaattaatgtgagttagctcactcattaggcaccccaggctttacactttatgcttccggctcgtatgttgtgtggaattgtgagcggataacaatttcacacaggaaacagctatgaccatgattacgaattcgagctcggtacc

SEQ ID NO: 8688 - DNA, 706 bp, Homo sapiens
cagcggtggtttgtttgccggatcaagaactaccaactctttttccgaaggtaactggcttcagcagagcgcagataccaaatactgttcttctagtgtagccgtagttaggccaccacttcaagaactctgtagcaccgcctacatacctcgctctgctaatcctgttaccagtggctgctgccagtggcgataagtcgtgtcttaccgggttggactcaagacgatagttaccggataaggcgcagcggtcgggctgaacggggggttcgtgcacacagcccagcttggagcgaacgacctacaccgaactgagatacctacagcgtgagctatgagaaagcgccacgcttcccgaagggagaaaggcggacaggtatccggtaagcggcagggtcggaacaggagagcgcacgagggagcttccagggggaaacgcctggtatctttatagtcctgtcgggtttcgccacctctgacttgagcgtcgatttttgtgatgctcgtcaggggggcggagcctatggaaaaacgccagcaacgcggcctttttacggttcctggccttttgctggccttttgctcacatgttctttcctgcgttatcccctgattctgtggataaccgtattaccgcctttgagtgagctgataccgctcgccgcagccgaacgaccgagcgcagcgagtcagtgagcgaggaagc

SEQ ID NO: 8689 - DNA, 912 bp, Homo sapiens
tactcatatatactttagattgatttaaaacttcatttttaatttaaaaggatctaggtgaagatcctttttgataatctcatgaccaaaatcccttaacgtgagtttcgttccactgagcgtcagaccccgtagaaaagatcaaaggatcttcttgagatcctttttttctgcgcgtaatctgctgcttgcaaacaaaaaaaccaccgctaccagcggtggtttgtttgccggatcaagagctaccaactctttttccgaaggtaactggcttcagcagagcgcagataccaaatactgtccttctagtgtagccgtagttaggccaccacttcaagaactctgtagcaccgcctacatacctcgctctgctaatcctgttgccagtggctgctgccagtggcgataagtcgtgtcttaccgggttggactcaagacgatagttaccggataatgcgcagcggtcgggctgaacggtgggttcttgcacacagcccagcttggagcgaacgacgtacaccgaactgagaatacatacagcgtgagctatgagaaagcgccacgcttcccgaagggagaaaggcggacaggtatccggtaagcggcagggtcggaacaggagagcgcacgagggagcttccagggggatacgcctggtatttttatagtcctgtcgggtttcgccacctctgacttgagcgtcgatttttgtgatgctcgtcaggggggcggagcctatggaaaaacgccagctacgcggcctttttacggttcctggccttttgctggccttttgctcacatgttctttcctgcgttatcccctgattctgtggataaccgtattaccgcctttgagtgagctgataccgctcgccgcagccgaacgaccgagcgcagcgagtcagtgagc

SEQ ID NO: 8690 - DNA, 87 bp, Homo sapiens
ctggggccagatggtaagccctcccgtatcgtagttatctacacgacggggagtcaggcaactatggatgaacgaaatagacagatc

SEQ ID NO: 8691 - DNA, 4307 bp, Homo sapiens
tttttatctgcatatatcagaatgtttctctcctttgaacttattaacaaaaaaggaacatgcttttcatacctagagtcctaatttcttcatcatgaaggttgctattcaaattgatcaatcattttaattttacaaatggctcaaaaattctgttcagtaaatgtctttgtgactggcaaatggcataaattatgtttaagattatgaacttttctgacagttgcagccaatgttttccctacgataccagatttccatcttggggcatattggattgttgtatttaagacagtcagaataatgatagtgtgtggtctccagaggtagtcagaatcctgctattgagttctttttatatcttccttttcaattttttattaccattttgtttgtttagactacactttgtagggattgaggggcaaattatctcttggagtggaattcctgtgttttgagccttacaaccaggaaatatgagctatactagatagcctcatgatagcatttacgataagaacttatctcgtgtgttcatgtaattttttgagtaggaactgttttatcttgaatattgtagctaactatatatagcagaactgcctcagtctttttaagaaggaaataaataatatatgtgtatgaatttatatatacatatacactcatagacaaacttaacagttggggtcattctaacagttaaaacaattgttccattgtttaaatctcagatcctggtaaaatgttcttaatttgtctgtgtacattttcctttcatggacagaccattggagtacattaattttcttaatctgccatttggcagttcatttaatataccattttttggcaacttggtaactaagaatcacagccaaaatttgttaacatcaaagaaagctctgccatataccccgttactaaattattatacatccagcagattctgggatgtactaacttagggttaactttgttgttgttgataatactagattgctccctctttaattcttcttctggtgcaaggttgctgcttaagttaccctgggaaatactactacaaggtcaaattttctagtatcttacagcctgattgaaggtgattcagatctttgctcaatataaatggattttccaagattctctgggccatccttgacccacaggtgatctcgctggagtatattaacttaacttcagtgccagttggtttggtgccatgagatccataatgaatccagaacttcaccattgcttagatataagagtcccttggaagaataatgccactgatgatgggggtcagaaggtgtattaactcaacatagagggcttttagatttttcttcaaaaaaatttcgagaaaagtattcttttaccctccaaacagttaacagctcttagtttctccaaatatgctctttgatttacttatttttaattaaagatggtaatttattgaacaatgaaatccgtaatatattgatttaaggacaaaagtgaagttttagaattataaaagtacttaaatattatatattttccatttcataattgttttcctttctctgtggctttaaagtttttgactattttacaatgttaatcactaggtaacttgccatatttctggttctatattaagttctatcctttataatgctgttattataaagctggtttttagcatttgtctgtagcaatagaaattttactaagtctctgttctcccagtaagttttttcttttctcagtaagtccctaagaaaacatttgtttgccactcttactattcccaatcttggattgttcgagctgaaaaaaaatttgatgagaaacaggaggatccttttctggtgaatataggttcctgctttaagaatgtggaaatccattgctttatataactaatatacacacagattaattaaaattgtgagaaataattcacacatgacaagtaggtaacatgcatgagttttgaatttttttaaaaacccaactgtttgacaaaatatagaacccaaattggtactttcttagaccagtgtaacctcacacctcagttttgcttttccaaccctgacttgaaaggcatatttgtatctttttattagtgatagtgaagctgtgacactaaccttttatacaaaagagtaaagaaagaaaaactacagcgattaagatgagaacagttctgcagttgttgaactagatcacagcattgtaggcagaataaaaaatgttcatatctgagaatattcctttcgccatcttttcccaaggccagacctcctggtggagcacagttaaaagtaacattctgggcctttgtaatcggagggctgtgtctccagctggcagcctttgttttaatatataatgcaggactgtggaaaacagttggcatagaatattttcacctaaaaaagaaagaaaagacatacaaaactggattaattgcaaaaagagaatacagtaaaataccatataactggacaaagctagaagaacctttagaagatttgtctgaaaacagatttcaagagtgagcttttatacactgctcactaatttgcttgattactaccaactcttcttaaagttaacacgtttaaggtatttctggacttcctagccttttagcaagcttagaggaactagccattagctagtgatgtaaaaatattttggggactgatgcccttaaaggttatgcccttgaaagttcttaccttttctctagtgatattaaggaacgagtgggtagtgttctcagggtgaccagctgccctaaagtgcctgggattgagggtttccctggatgcgggactttccctggatacaaaacttttagcagagttttgtatatatgtggatttttctgataagtagcacatcagaggccttaaccactgcccaaaagcgattctccattgagagtacatatcttgaacttaagaaattcatttgctctgatttttaatcttgtaaagtttttgctaaactcaaaacaagtcccaggcacaccagaaggagctgaccaccttaggtgttcttgtgatttatccttacttccctatgttgtcatagttgcttctaaactcagctgcactatggctgtcaacatttctgatacttattgggatatgtgccatccagtcatttagtactttgaatggaacatgagatttataacacaggtaatagctgaaggtaccagtatggtggtgagactcacacttagtgatccagctaaggtaactgatgttataatggaacagagaagaggccaactagatagctaagttcttctgaacctatgtgtatatgtaagtacaaatcatgcgtccttatggggttaaacttaatctgaaatttacatttttcatagtaaaaggaaaccaattgttgcagatttcttttcttgtgaggaaatacatggcctttgatgctctggcgtctactgcatttcccagtctgttctgctcgagaagccagaatgtgttgttaacatttttccgtgaatgttgtgttaaaatgattaaatgcatcagccaatggcaagtgaaggaattgggtgtcctgatgcagactgagcagtttctctcaattgtagcctcatactcataaggtgcttaccagctagaacattgagcacgtgaggtgagattttttttctctgatggcattaactttgtaatgcaatatgatggatgcagaccctgttcttgtttccctctggaagtccttagtggctgcatccttggtgcactgtgatggagatattaaatgtgttctttgtgagctttcgttctatgattgtcaaaagtacgatgtggttccttttttatttttattaaacaatgagctgaggctttattacagctggttttcaagttaaaattgttgaatactgatgtctttctcccacctacaccaaatattttagtctatttaaagtacaaaaaaagttctgcttaagaaaacattgcttacatgtcctgtgatttctggtcaatttttatatatatttgtgtgcatcatctgtatgtgctttcactttttaccttgtttgctcttacctgtgttaacagccctgtcaccgttgaaaggtggacagttttcctagcattaaaagaaagccatttgagttgtttaccatgttactatgggactaatttttaattgttttaatttttatttaaactgatctttttttatatgggattacattttggtgttcactccctaaattatatggaaaccaaaaaaagtgattgtatttcacatatgga

SEQ ID NO: 8692 - DNA, 4311 bp, Homo sapiens
tttttatctgcatatatcagaatgtttctctcctttgaacttattaacaaaaaaggaacatgcttttcatacctagagtcctaatttcttcatcatgaaggttgctattcaaattgatcaatcattttaattttacaaatggctcaaaaattctgttcagtaaatgtctttgtgactggcaaatggcataaattatgtttaagattatgaacttttctgacagttgcagccaatgttttccctacgataccagatttccatcttggggcatattggattgttgtatttaagacagtcagaataatgatagtgtgtggtctccagaggtagtcagaatcctgctattgagttctttttatatcttccttttcaattttttattaccattttgtttgtttagactacactttgtagggattgaggggcaaaatatctcttggagtggaattcctgtgttttgagccttacaaccaggaaatatgagctatactagatagcctcatgatagcatttacgataagaacttatctcgtgtgttcatgtaattttttgagtaggaactgttttatcttgaatattgtagctaactatatatagcagaactgcctcagtctttttaagaaggaaataaataatatatgtgtatgaatttatatatacatatacactcatagacaaacttaacagttggggtcattctaacagttaaaacaattgttccattgtttaaatctcagatcctggtaaaatgttcttaatttgtctgtgtacattttcctttcatggacagaccattggagtacattaattttcttaatctgccatttggcagttcatttaatataccattttttggcaacttggtaactaagaatcacagccaaaatttgttaacatcaaagaaagctctgccatataccccgttactaaattattatacatccagcagattctgggatgtactaacttagggttaactttgttgttgttgataatactagattgctccctctttaattcttcttctggtgcaaggttgctgcttaagttaccctgggaaatactactacaaggtcaaattttctagtatcttacagcctgattgaaggtgattcagatctttgctcaatataaatggattttccaagattctctgggccatccttgacccacaggtgatctcgctggagtatattaacttaacttcagtgccagttggtttggtgccatgagatccataatgaatccagaacttcaccattgcttagatataagagtcccttggaagaataatgccactgatgatgggggtcagaaggtgtattaactcaacatagagggcttttagatttttcttcaaaaaaatttcgagaaaagtattcttttaccctccaaacagttaacagctcttagtttctccaaatatgctctttgatttacttatttttagttaaagatggtaatttattgaacaatgaaatccgtaatatattgatttaaggacaaaagtgaagttttagaattataaaagtacttaaatattatatattttccatttcataattgttttcctttctctgtggctttaaagtttttgactattttacaatgttaatcactaggtaacttgccatatttctggttctatattaagttctatcctttataatgctgttattataaagctggtttttagcatttgtctgtagcaatagaaattttactaagtctctgttctcccagtaagttttttcttttctcagtaagtccctaagaaaacatttgtttgccactcttactattcccaatcttggattgttcgagctgaaaaaaaatttgatgagaaacaggaggatccttttctggtgaatataggttcctgctttaagaatgtggaaatccattgctttatataactaatatacacacagattaattaaaattgtgagaaataattcacacatgacaagtaggtaacatgcatgagttttgaatttttttaaaaacccaactgtttgacaaaatatagaacccaaattggtactttcttagaccagtgtaacctcacacctcagttttgcttttccaaccctgacttgaaaggcatatttgtatctttttattagtgatagtgaagctgtgacactaaccttttatacaaaagagtaaagaaagaaaaactacagcgattaagatgagaacagttctgcagttgttgaactagatcacagcattgtaggcagaataaaaaatgttcatatctgagaatattcctttcgccatcttttcccaaggccagacctcctggtggagcacagttaaaagtaacattctgggcctttgtaatcggagggctgtgtctccagctggcagcctttgttttaatatataatgcaggactgtggaaaacagttggcatagaatattttcacctaaaaaagaaagaaaagacatacaaaactggattaattgcaaaaagagaatacagtaaaataccatataactggacaaagctagaagaacctttagaagatttgtctgaaaacagatttcaagagtgagcttttatacactgctcactaatttgcttgattactaccaactcttcttaaagttaacacgtttaaataaggtatttctggacttcctagcctttcagcaagcttagaggaactagccattagctagtgatgtaaaaatattttggggactgatgcccttaaaggttatgcccttgaaagttcttaccttttctctagtgatattaaggaacgagtgggtagtgttctcagggtgaccagctgccctaaagtgcctgggattgagggtttccctggatgcgggactttccctggatacaaaacttttagcagagttttgtatatatgtggatttttctgataagtagcacatcagaggccttaaccactgcccaaaagcgattctccattgagagtacatatcttgaacttaagaaattcatttgctctgatttttaatcttgtaaagtttttgctaaactcaaaacaagtcccaggcacaccagaaggagctgaccaccttaggtgttcttgtgatttatccttacttccctatgttgtcatagttgcttctaaactcagctgcactatggctgtcaacatttctgatacttattgggatatgtgccatccagtcatttagtactttgaatggaacatgagatttataacacaggtaatagctgaaggtaccagtatggtggtgagactcacacttagtgatccagctaaggtaactgatgttataatggaacagagaagaggccaactagatagctaagttcttctgaacctatgtgtatatgtaagtacaaatcatgcgtccttatggggttaaacttaatctgaaatttacatttttcatagtaaaaggaaaccaattgttgcagatttcttttcttgtgaggaaatacatggcctttgatgctctggcgtctactgcatttcccagtctgttctgctcgagaagccagaatgtgttgttaacatttttccgtgaatgttgtgttaaaatgattaaatgcatcagccaatggcaagtgaaggaattgggtgtcctgatgcagactgagcagtttctctcaattgtagcctcatactcataaggtgcttaccagctagaacattgagcacgtgaggtgagattttttttctctgatggcattaactttgtaatgcaatatgatggatgcagaccctgttcttgtttccctctggaagtccttagtggctgcatccttggtgcactgtgatggagatattaaatgtgttctttgtgagctttcgttctatgattgtcaaaagtacgatgtggttccttttttatttttattaaacaatgagctgaggctttattacagctggttttcaagttaaaattgttgaatactgatgtctttctcccacctacaccaaatattttagtctatttaaagtacaaaataagttctgcttaagaaaacattgcttacatgtcctgtgatttctggtcaatttttatatatatttgtgtgcatcatctgtatgtgctttcactttttaccttgtttgctcttacctgtgttaacagccctgtcaccgttgaaaggtggacagttttcctagcattaaaagaaagccatttgagttgtttaccatgttactatgggactaatttttaattgttttaatttttatttaaactgatctttttttatatgggattacattttggtgttcactccctaaattatatggaaaccaaaaaaagtgattgtatttcacatatgga

SEQ ID NO: 8693 - DNA, 300 bp, Homo sapiens
cctgttttttgttttttttttttttttttgagagggagtctcgctctgttgcccaacctggagtgcagtggtgcgatcttggttcactgcaagctccgcctcccgggttcacgccatgcttctgcctcagcctcccaagtagctgggactacaggcgcccaccaccacactcggctaattttttgtatttttagtagagacggggtttcaccgtgttggccaggatggtctcgatctcctgacctcgtgatctgtccacctcggcttcccaaagtgctgggattacaggcatgagccacc

SEQ ID NO: 8694 - DNA, 236 bp, Homo sapiens
ctggagtgcagtggtgcgatcttggttcactgcaagctccgcctcccgggttcacgccatgcttctgcctcagcctcccaagtagctgggactacaggcgcccaccaccacactcggctaattttttgtatttttagtagagacggggtttcaccgtgttggccaggatggtctcgatctcctgacctcgtgatctgtccacctcggcttcccaaagtgctgggattacaggcatg

SEQ ID NO: 8695 - DNA, 4007 bp, Homo sapiens
aggatagagaaacaactgtagaggagcaagagatgatggtgactcagaccaaagtggaagcagtggaggtgaggagagctggtcaaattccaggtatatattcaaagtagggccatttgtggtgatgcagctatatggaatcaaaagaaaatcgaagacaactccggggttttcttttaatctaagcagaaattagaccccatttgtcactccatacaaaaatcaactcaaaatggatcaaagacctaaatgtaagaccaggaactatgaaataattaaaaagaaaacatagggaaagtgttttaggacattggtctgggaagagatttttatgaataagacctcaaaagcacaggctacaaaagcaaaacaaacagaaagaaatgagattatataaaactacaaaacatctgcacatcaaagaaaacaaccaacaaagtgaaaagacaacctacggaatggaagcaaatatttgcaaactattcattcaacaggggattaacatccagaatatacaaggaactcaaacatctcaacagcaaaaaaaacaaaaaatccaattaaaacatggacaaatggtctgaacagacgtttctcaaaagaagacatacaaatggccaacagatatcatttcaccctagttaggatggttattatcaaaaagacaaacaataacaaatgctggtaaggatgtggataaaagggaactcatacactgttggtgggaatgtaagctagtacaaccaatatcaagaacggtatagaggttcttcaaaaaaactaccaatagaactagcatatgatccagcaatcctactgcagggtatatatatctaaagaaaaggaaattagtatatcaaagagatatctgtacctccatgtttatcgcagccctattcacaatagccaagctatggaatcaacttaggtgtccaacaagagatgaatggataaagaaaatgctgtgtatatgcacaatggaataccattcagccataaaaaattaataaatactgtcattcacagcaatatggatggagctaggtgacattatgctaagtgaaattaaccacaaaaggaaagttaaacactgcatattctcactcatatgtagatgctgaaaacagctgttaaaagtagaacagaggatagcagatactgaaaagagtagagaaaatgggggaatagggagagatttgttaaaggatacaaaattacaactaaataggagaaataattgctactgttctataccactgtaggatgactatagttattgaatgttctcaacaaaaagaattaatatgctaattacccccatctgatcactatacattgtatgtatcaaaacagcactatgtactacataaatatgtacaattattgaatgtcaatttttaaaaattaaattaagctttagaaaaagtacttggtgataccacttcacactaagaaggctcttttctaaaaagcagtgggaagtaacaagtgctagtaagtatatggagaaattagaactctcatacattgctaatgggaatgtagaatggtactgttactttgaaaagcagttcagcagttcctcaataagttaaaaacaaaactaccatatgaccttgcaactctacacctaggtatatacctgaaagaacttaaaacaggtgttcaaacaggaacttgtacatgaatgtttatagcagcattattcacaggaaccaaaaggtggaaataatccaaacatccacaaaacaataaatggccaaacaaaatatccatacaatggaatattatttagttataaaaaagaaatgaagtactgacacatgctccatagatgaacctgtaaacattatgtgaagtgaaagaaaccagacacagaagttcatgtcgtatgattccatttatataaaatgtccagaataggcaaatacacagagaaggaaaagattagtgattgccagtgacttggggaagggaaaaatgaggagtcattgattaatgggtatggggtttccatttgtggtgatgaaaatgctctaaaactagatagtggtaatgtttgtacaacaattgtgaatgcattaaatgtcaatgaattatacactttaaaaaggctaaaaagatgagttttaccttatataaatgttaccacaatttttaaaaaaccatttgtcgtcaaaacaaaaacaaaccaaaagaaacgttctgctcaacaggaatcatggtaattgtcttgcgcaaagtatcttcctttaatatggcagaaatattagtgtgaaagacagaggactctgaaaagcaggagcaggaaatttaagaaaaacagcaaaagcagacatgaagctgaagaaccacagaggagccaaattacaagtaagcagaaactttgagtcaacaaaaagtataccatagagtaaatctgtgagtagaggatgatagttaagcagaagtcacaaaatcagagggaacccagcagagaattgaaggcctgagcaggccccataaagcctggttccacagagaagccttgaatcttgaatgactcttccttctagtgtagcctctaaattgtgtctgtaagcatggcccctgttcctttggaatgacctagctcttcacagactttgtaaaaccccatctccattactgccacatcagtaacttaataataaatccccattatttgagataccatcatggtcttacagccaaatatcctgaatattcactcactctatttttcaatggctttcactttgccatcaacaattaatcagcaactgcaattaataggataattaattgcaactgcaactgcaattgtaggataattttctattttgtggggtttggaagcacagaaatgaaggaaaggtttataagaggagggaaataatggtaaggagcctgactgatgaggctccagggtttggggttgcaggggtctcatggtctttattttcacagccaattaatgcctagatgttggtgcaagttgccccaaacagggagagagtagtccaggttttaagcggatcccgtgttcccaaactagagttctgacaaccaatgagacagcaacaatcatcctgatatctttcagaccagcagatttgcttggaatcccagcttacataaatcagtgatcgttttctcaatctatttccattggcattatgagtaaaagtcttcacagatttactcttcacagagtctagcagtaaattgcttgacagttctagttttctgtgtggtgaaattaaatattttattaaaatgtttttgtatagattcacatgtgaactatgcaagtctctttctctgcttctttgttccttattttttcttccttcttctctttctttctttccttggattgggtagagtagggtgggttgcaggtagtgaaggcagcagacagtcaaatgagtcttaatatttagtgtttataataatcccgtcacttggcagaagatgagctgtagatctcttcattcttattacaggcagtacctgaaacacattcatcacagtcaaaaggaagtgaagagacacagaagggaagcaagatactgagatgctgccaagtatcccagagtccatgatggagtagagatgaaacaatagacccaggtcattcctctgctggaggttctgaggcaagcagtagtgctctgcagatgaacattcatgacaacttgcctttcaactggaggtgtgtgacagccagaaaaataccatcgaggtaaagcttttttctcctagaggagcaactgactcaccgcagcatgttgttatgtggacctcgagtctgtggactagtgaccttcacctccttcagtgtgtgggtctgtccagggcttccatccctccagtaagaaccctaacccacattcctgcatttgataactttgagttaaatcaagaaaagcttggaaatttggacatagttgtttataagtcactcatattatctattaaagtctaaaaatgttgtagtccctgaa

SEQ ID NO: 8696 - DNA, 643 bp, Homo sapiens
gaagaccccagctggatcacacgcatccatgagcgctcgcagcagatggagcgctacctgtccaccacccccgagaccacgcactgccgcaagcagccccggcctgtgcgcatccagaccctagtgggcaacatccacatcaagcaggagatggaggacgattacgactactacgggcagcaaagggtgcagatcctggaacgcaacgaatccgaggagtgcacggaagacacagaccaggccgagggcaccgagagtgagcccaaaggtgaaagcttcgactcgggcgtcagctcctccataggcaccgagcctgactcggtggagcagcagtttgggcctggggcggcgcgggacagccaggctgaacccacccaacccgagcaggctgcagaagcccccgctgagggtggtccgcagacaaaccagctagaaacaggtgcttcctctccggagagaagcaatgaagtggagatggacagcactgttatcactgtcagcaacagctccgacaagagcgtcctacaacagccttcggtcaacacgtccatcgggcagccattgccaagtacccagctctacttacgccagacagaaaccctcaccagcaacctgaggatgcctctgaccttgaccagcaaca

SEQ ID NO: 8697 - DNA, 14410 bp, Homo sapiens
caaagaatctgggcttaggcctgtctaaagtgaaggcaaagtaaataaatacataaataaaaataaagtggaggtttagtgttccataagaacaagtcttccatttgcctttcagttctttgctgaagctgtaggaatagcaggcaaacaaatcatctggttattaggccactctacctcagccgaagctctggggagttaatatggatacccaaaatggctgcggcactaaaggccggaattggagcaaaattcaaggtccttttccctcaggtcatcgtacctacagcttgtatgccgcagcctgtccatctccccacttgcgtatgtaagggcagtgcttctaggagccatgagcattactcacctgaaacctaggtgttaggaatgcaaccagctagatctgacccatgccctgttttgtgtctgcgttgacatgctgcaggtgacatcagttgcaaggggatgaccgagcgcattcacagcatcaaccttcacaacttcagcaattccgtgctcgagaccctcaacgagcagcgcaaccgtggccacttctgtgacgtaacggtgcgcatccacgggagcatgctgcgcgcacaccgctgcgtgctggcagccggcagccccttcttccaggacaaactgctgcttggctacagcgacatcgagatcccgtcggtggtgtcagtgcagtcagtgcaaaagctcattgacttcatgtacagcggcgtgctacgggtctcgcagtcggaagctctgcagatcctcacggccgccagcatcctgcagatcaaaacagtcatcgacgagtgcacgcgcatcgtgtcacagaacgtgggcgatgtgttcccggggatccaggactcgggccaggacacgccgcggggcactcccgagtcaggcacgtcaggccagagcagcgacacggagtcgggctacctgcagagccacccacagcacagcgtggacaggatctactcggcactctacgcgtgctccatgcagaatggcagcggcgagcgctctttttacagcggcgcagtggtcagccaccacgagactgcgctcggcctgccccgcgaccaccacatggaagaccccagctggatcacacgcatccatgagcgctcgcagcagatggagcgctacctgtccaccacccccgagaccacgcactgccgcaagcagccccggcctgtgcgcatccagaccctagtgggcaacatccacatcaagcaggagatggaggacgattacgactactacgggcagcaaagggtgcagatcctggaacgcaacgaatccgaggagtgcacggaagacacagaccaggccgagggcaccgagagtgagcccaaaggtgaaagcttcgactcgggcgtcagctcctccataggcaccgagcctgactcggtggagcagcagtttgggcctggggcggcgcgggacagccaggctgaacccacccaacccgagcaggctgcagaagcccccgctgagggtggtccgcagacaaaccagctagaaacaggtgcttcctctccggagagaagcaatgaagtggagatggacagcactgttatcactgtcagcaacagctccgacaagagcgtcctacaacagccttcggtcaacacgtccatcgggcagccattgccaagtacccagctctacttacgccagacagaaaccctcaccagcaacctgaggatgcctctgaccttgaccagcaacacgcaggtcattggcacagctggcaacacctacctgccagccctcttcactacccagcccgcgggcagtggccccaagcctttcctcttcagcctgccacagcccctggcaggccagcagacccagtttgtgacagtgtcccagcccggtctgtcgacctttactgcacagctgccagcgccacagcccctggcctcatccgcaggccacagcacagccagtgggcaaggcgaaaaaaagccttatgagtgcactctctgcaacaagactttcaccgccaaacagaactacgtcaagcacatgttcgtacacacaggtgagtgtcaccccacctggaggcctggcagcaggggctgagggggctgtgggaaggcaaggtaagagagcaggtagaagggaaggtttgggatcatctttcagattttaaacagaccccaccacaagcctcttctagaaaccccaactgtgttcctcccatcataagaacaaagcaccctgccaccaagagacaccgtcacaggaaccctttatggagaagggatgtcctagggatgtccagactgcagaagagaagactcaggtcattatataagccatattcaagtatttgtgtttcagaggcagcatactgtagtcaggaagagcttgagctcttacacccagccagatggcctgggtgtaaattcaggcttagctactactaaaccttgtcgccttggaaaaattacttaacttgtctatacttcagtttccttgtgtataaaatgagaataatcgtgatacgccttccttatagtgctgttttgagaataaattaatacatgtgaagtctttagagtacttccaagcatataataagtgctctataagtggtagctattattaagatggttaagaggaggagacattcagtttgtatagtttggctccaaaaggtggaactagaccaatgattggatgctatcaggagatcctttccacaaaataaaagaaaaattttgttaacaatcagatctgctctaatatcagatagactgcctttaaatggagtgagtttctgtaattagacgcattcaaggagagaatggatgaacatttttagggattttgtacacaggattcagtcatcaagatgggcaagatcatgtttcatccctggattctatgattccagagctaagatcttctgatctctcagccaatcctttttcatagctccatagtggtacagagatatggaattcccatagaattgggcattccatggatgtgcctccatataagtgagcacataagcgattgtgatgtcacctagattctcttggacctaagaatacctataacagtgatgatcattatatttgaaattcttttttttttttttttttttgagacagggtctcactctgtcgcccaggctggagtgcagtagcatgatctcggctcactgcagcctcaacctcccggactgaagcaatcctcccacttcagcctcccaagtagctgggtctacaggcacatgccaccacgctcatttaacttttttattttttgtagagacagggtcttaccatgttgcctaagatggtctcaaactcctgagctcaagccatctgcctgcctcagcctcccaaagttatgagattacaggcatgagccactgtgcctggcctcagaatacccttattaaatgacaaataatttaccagggaaaagttacatactcgaattctgatacatgaaaacaaattagtttctcaaaacaaccttgtttctcagatcagctagtaggaatccaagagagaagacataaaacagtgaagtttagattggggactgaagggaaggaaagcaacagagatagaggcaaggcatcaaacatggaattgtacaactgaaacagaacgttgcttaagatgaactttgccttctttgcagggtaatgtaagtcaggacattatgtaaattaatgtatgtacttttatgagaatcagtttttaaagatcacagtattcacacttccaaataaacagagtgactcactactgaatttatgaagaaacttgggtagtggtgagttgctttgtttacttgggataaatgtgaatgtactaataaccagaggtaaatcacaagaaattttccatatggtatggatatcaccattattaggtgaattaatcaaatagtaatgtttttattttgtagcatcttatgatttatagagtgctgtcacatagtttatatcctttcctcccctggatagctgatttataagccattaaattaaggaacatgggggaggggtgcaggaaggaccatctgtgaaagtatctccttaaccaaagttgactttgctggtcttggatccataaacatatctgctctcccctctgtacatctcttcaagtagacctatcagatgtaaaattcacacattctgttagatcacataataaaataagtctttaaatttgcaacataaaattttcaatgtactaccaaaaagtatcttcgtgatgtataaatacatttctccaatggattcactgaaggattctgtggttaaccgagataactagatttggacataagaaaaccagcaaaggatttgtgcactcagacacagatgcaaaagctataggtagagtcattttataaatctgagttatgcttaaaatgtggacttcagttttctagtaaattatgaacatcctcagtaaattatgaatgttattgtaatggtgtgtataatatagccccatctgaaaataataatgtgcatatatcaatcaggcacctaatttaaaagaagtaatgctcttccctttcattccagaattatttggcagtggcagtttggaaatcctatcagtctttcaagactattgtctaactgaaggatcccctaacctaacaaagttttagaacaattggtctagatttcaaaaagcaagacagccggaacatgtggaaataattcaagacctgggttcattgtagctcgcatttccaaacaaagttcttttcaatttctagggaaaacataaaaaaatggagcctcaaaactttccaagagcccagtggaagtgataaaaattcaaagcaaaaagtccaaatgttagtataaaaagattctagaaagcacggggatacttgtaagagtagagttggactctgtgttcccacccatactctaaccaaaaagagtcctaaaaaaaaagaatagcttgacaaagttaaaaagaaatttgagttctctccattacagctgctatgcaaaccaatagacctgcagagtaactgtcttagcaattcagtaactccaaagtttaatatagatggtagttgctttcaacaactgcagatataaattgtgtgtgatggtacacaccaatagtcccagatactcaggaggctgaggcgggaagatcacttgagcccaggagtttcgaggccaacctgggtacctatctcttaaaaaaaaaaaaaaaaaaaaaaaaaaaaaaaaccctgaaaaaaataatttttaaaattcattttccaattaaaatcttgacctgctctatgttaatgatccacattcataaaaaaaagtgtttggggccaggcatggtggctcacgcctgtaatcccaggactttgggaggtaaaggggggtggatcacttgagccgaggagtttgagaccagcctggacaacttggcaagaccccagctctacaaaaactataaaaattaaccaggcatggtgctgcatgcctatagttccagctacttgggacgctgaaatgggaagatcacttgagcccagaaggcagaggttacagtgagcggagatcacaccactgcactccaccccgggcaacatagcaggactctgtatcaaaaaaaaaaaaaaaaaaaatctgtttgagacaaagaagtagtccatcatattggctttggagctaagctctacctttaagaatcaaggaagctttagttgtaaagcatatttcatagtgattataacccaaaaatttaaagtagaggcataaatgaaagacgattgtactgtaattagatgatttggatccagttttgtttcctctaaatgcctgtgtgtccttcaacaaatcagttaatttcacaactgtctatttctttgagtttaaaataaaaatgattttttctgccttttgatgtaaacgtatgatgcatgtgagagcttttcagaagaggcaaagtgttacttaattagaaaaattaaaaatcctcatcattattacttttcgcccctactacccaggagacacttagtttctttgctctatttcctgtctctgaataatacatgcttgacatgtgtccttcctctttggaatttaaactctgaaactcctttatactccttagattgctcttgaatattcttcataacaagaatttttttatttcttaacaatttttataacagtaaaagaaaattgctcacctaaccactctttatccactgctaaacaaaccacggaggacttccttatctctaggagtttctttcattcacttactgcagcttcataaaagttgtgagaaaggaaactaagagttaagggcatgtttgaaagcaacagaattagagagaaaaaaacaaagataatacaaaccatcctgtcagggaagaaagcagtgctcccctctacccccttcatcaagagaaaaaagcagaagtcaaataaaggaatggaaatgaaagggaaagacagagaatacaagaaggataagccttggtgtcaacatggatgtggaaggcaagcaatagggcaaattcaaagataaccctggagcagtgtgatccctacactagcagcatgcaaattatgttcccccacccttcacccccaccccagacatcctaaatcagaaactcaggcaatggagcctagaaatctgtgtaacaagccctggttcatgctgaagttgagaatcaattccctagagaggtgagcctgggtaattagaagaatggcatcaggttgcttttgttacataacattttttaaaattccactaataagaatctgtttagaaaaagtaaatcaaaattatggatcaaagcttgattttgtagtggataaattatatcacagaaactaatcactcacatatgaggtaagttgagtcttccaaattacataggtcacatggcaaatgtatcccttctggtatttagcaggactgacttgtattattcatatcatcatgtattatctttacaccttccctttagaatgtaaactctgtgagagcggaaacacacacacacagagacatacatttcacacacgtatatatacatgtatatcacactttcacatgcccattcatttggtcaatgtgcacattcaccgaaaaccacctgatctccaaaaactattgaaataaaataaataaaagaaaattttaaaatgtgaacacgctttccaggagaatttaattcaagggacttatacacagatacattcttttcacagcaagagttttaaatttctttgttttttctctttttttatttgctatagaatatattgtacacatatctgtgttcacactttcgtgttttttttttacccacaagagataaatattttggcgttttctgaatcatattatcaacagcccgttcactggtgactgtttttagcccattggtatcctctgcacatacggtaattttgcttattactttgagaagttcagctatttcagccatgaattcagtgtaaatagacatagtaacaatagtagcataacaatgttggtgattgggccataatagtcatatgaagataatgtgttaatcctcatatggagcttggactattaattatatcaagccagtgggtgtaaagtaacaagtataaggcttggagtgagaaggccatgatattaccactttctggctgagtcactttggctaagttctgtaactgacctaagcctcagtttttcagatctgtagtacttactttacatgattgctctttgaattgaataacataatttatgtgaaaacacttaattatgaatgctgtaaaactatcaaagccattaatatgtgttatagtagcatcatacattttgcagcataatccagagaacaaggagttgttaacaagggagaggaagataatctggttgggctagtattatactctcaggtgctactgacttcttagatgaccttcaagatgttagtacaactctctacttggagatgctattttctggggatgttaatatccactctattcacaaaattttaagaaaagtcaagtagcatggatgaaactctccaaagttctgcttaaaactaaaatatcttagttgtcactgaagccacagatattttgtgaatgcagcatgttcccaataggcagtccctcttagcctcacagtccaagctggcaacaggatcacatcccagggaatgaacagaaaggctggcaggcaatcacaccgctgatatctcaggtgtgtgggccccccattttttttttgagatggagtctcactctgttgcccaggctggagtgcagtggtgccatctctgctcacttcaacctccacctcccgggttcaagtgattctcctgcctcagcctcctgagtagctgggattacaggcgcccaccaccatgcccagctaattttttgtatttttagtagagatgtggtttcaccatgttggtcaggccggtctcggcctcctgacctcaggtgatccacctgcctcagcctcccaagttacagggattacaggcgtgagccacggtgcccagccgtgtgggcccccttttaaacagacgtctcttgacggagactagactctgcagccagtaaaagctccatatgattccatctgaatgtacttccattgttaatatggaaccttccccattttctggtcgtgtcttgatgttccccattcagaggacctggactttcaagtgttccttctgctttcctcaccagtggccaccttctgctacccaccttctcctctttctcctccttccttgctgcctgctgtctcatcaagcaccctgtcttggttttttgacccatcactgtactcacgaaagaggagggcattgtactagggcagatgatggggaggcagagagaacaggagagtcaggtaggaacagtgcttctgaaaaatctcctgataacagcattcattgtctttttcacagctcaggagaagccttggttaaaatgaggggaaaaaaatcagtagaataagtgggttcttgctgagcccccagtgcaagaggttcctattcaaaattggggtgtctttacccattaggatggcttttacttgaactttgtgagcttcaggcagaaccctctgcatcttctaacctaagcaggatctttcttcctttttttttttttttcacttttcagtcatggtagagttaagtgtcagagctggtccttgagaagaaggtgatgagcaggcattgaaaaattgagaaaaacgtatacttttaccacgcccaacacccttggcaaggcagtaaagggcactgcctccccctcagtttcttcccttgctgtttggtttctgtgcctccagtgctcagtcacgggtttcctaggaaatcctctgtctgtgctctgtgctgacattttatccatataccacttcttgccattcgcatatgtaattgagagagtagacgatacctttaactctgaattacatagctgcaatataatcacttgttttactgattatctgaaataattttttaaaaattcaggattgacttccatatgccatgcaagtcattttgcagttggtttcatttatccttggttcctttgtgatgaatggaacagtttaatttttcttaaaatgaccacatgctctgtactaagtgctttatctcttcaattttcaaaacgccttcacgagacaggtacttactatattattctcaagttatagataaggaaactgaggcttatagaggttaaatgacatgcccaagtcactcagccaaggaaatggaattcatatctgactcctacatctgtataggcccaaaatggatcatttaaagtgaaggaacttatatgaccttccccttgatgttataattcaattatccactttttactttgtgtccccttctgacaaatcagacttgccattcctgaccataggcttaaacctggaaaaccatctctgaccatttatcttcactttttgtttctttacttggagagcaacaatcgacagacctcatccattttatgcataatgtctaaaaccattttgggattgctgtaagtaatatgcaagaaaatagtgggaaaaaaaattttcttaaaacacaatcattcattcctgctgagtgactgcgtttcaaattcatacagaaatgaaagttgtgagcacctcactaatctgaaaatataccccatttagtaagacagtttctgaaatacctacacttcaccatcacagcaccttaataattatagagagcaccttcctttaaggagctcccaagttctttgcaaacatttctctttattaagtaacataccattgttctgtggcagggaagggaacaggatactttgtcttatttaaaatgtgagactgttaatgcattcagtgactaagtaggttgcccttgggtcattcactgacaaggccaggactagagtcctcaggggttgcagtccaccacggactcaggaccactaaatccacaaaggaccatgtgcaactgcctggtccaactcttcacatacagaaaatgaaataaacccagagaaatgaaaacacttaaaaagcccagggtcacatggataattaatggtagaaccaatactacatgcacacaaacaacatacctatatatgctatagagagaaacatgacaactatgaggaatcaatttatagacagattagaagagtgtgaaaataaagtcttcatcagtgaccttgcctcgaggaaaaacacacagaaggtgaaagtttcaaacagcagagcattttaacataggtgaagtttcaacttcttagcagccaaaataccatctggaatttaaggcacgcttcccataaaaggtgacaggtggacatgttttaaatgatagttggccagcctatcatagcctctataaatcgtctgaaagcatgaggatagcaaagaccagctgacttccaggcatgtttacagctgacagaaatgtttcagctaaaaacatgcatgactgtctctcttagggaatctcttacttcaaaaaaaaaaaaggtaccaatgtaaacactatgcatagactgaagtcttcagcaaattgagattattagcaatgaggcttccctaacctttcctgttttaatctaaaagtaaaattatcttctaaccatgtgatcttacgcagcatactgtctggtcagtgtgcttcaaaacatatctgtttatgtttgaaaacacaataacaacaaattcctgatgagagaaagtttaataaaatggatcatgaacatacagcacttaataccaaccctgctacatagtcagcacttaataccaaccttgcttcatagtaagcactcaatacatggtgattgttttcattgctgctattaccataatacatcaaagctctcctatttcataatgggaaaaaatgaaaaacagtcaaggcatatattttaagtggaagttagctcaaattttaaaagacttcttaccttgatgcatagtccaaatgttgaaatattatcctaaggagtttcagaggctttcagttttagtttggatcatggaaggacttttttctctgaggtgagggcctacactgggcagtcaggaatgaggtggtagagatggaccaaacacgcagttcatctcacctgtcaggagcagagctgagaacaaacagcacaaagaaaacaagtctttaagtaatcatcttaaagagatgtcacggacccatggactttaagaatacctcatgcactgagtattattatttaccttactgtttgtaacaaacttgatcatttggtttctaagccaaaccaaagcagtaaactgaggaaaaacaagggtttccgccaacaggctgagagcaaaggaggacgcaggaaaactattttaaaaattgacccaagagttcaaaaggcatatggaagcatttaatgggggtgggaggtatccttgtaataagaataccatgcatgtattcccacactgctcttggtggtctgcaaagtgatttcatatgtattttatgtcaacaccagcacaatgaggtaagtaggactgtatacctcagaggcatttggtgatttgtcagagtggagtgtagtgtgttggtgcccagatttgaataggatcatttgagtctgatatcatcatgttgcccaccgcctactcagcctctacacccgatgaggccaatctgcagctcactacagtcaatagagaacaggcaattaacccttaagttatattttagaaagatttctgtctaaaatagataaacttgaaagtatagctcttcaaaataacgtattcctgtgttggcaaatattttccaaactcacaatcaacacataggtgtatttcttagactactagaagtggggacttaccccaaggaaccaagctatagtgaccaatatccttagttctcaaggattctagagcaccccatgtctccaacgatctttcttctctcttatttcttctatttgtttgataatgttaatgggaaacactaaatcccctaatcaggacactgaaagtgacccccttcaaaagtagccctcccttttccacggagtgaccttgaagacttttagtggggaatatctggtagctttccaagaaagccgttttatggcacagggaaatggaaaacaaaactgtcctggcatcaccataaagcaaaatttctctgcacatgagaggctaggagggcctggatttttccaaacgaggatgatccattaagcaatcaaattttattttttaattgttttatttttcttttttgttgtcttgtttttcctgtccttcattctctatcccttgctatgtctcgctctgtcctgcttgctgtctcttcctacatcaacaggtgagaagccccaccaatgcagcatctgttggcgctccttctccttaaaggattaccttatcaagcacatggtgacacacacaggagtgagggcataccagtgtagtatctgcaacaagcgcttcacccagaagagctccctcaacgtgcacatgcgcctccaccggggagagaagtcctacgagtgctacatctgcaaaaagaagttctctcacaagaccctcctggagcgacacgtggccctgcacagtgccagcaatgggaccccccctgcaggcacacccccaggtgcccgcgctggccccccaggcgtggtggcctgcacggaggggaccacttacgtctgctccgtctgcccagcaaagtttgaccaaatcgagcagttcaacgaccacatgaggatgcatgtgtctgacggataagtagtatctttctctctttcttatgaacaaaacaaaacaacaacaaaaaacaaacaaacaaaaaagctatggcactagaatttaagaaatgttttggtttcatttttactttctgtttttgtttttgtttcgtttcattttgtactacatgaagaactgttttttgcctgctggtacattacatttccggaggcttgggtgaataatagttttcccagtctccctcggatggtggccttaaggcctggtagtgcttcaagaggtccactggttggatctctagctactggcctctaaatacaacccttctttacaaaaaaatcttttaaaaaaaagtaaaaaaaaaaaaaaaatttccacttgtgaagagcactacaaaaaatatataacaaaatctaaaaggcctactgtctttaagtacaccgcttgcagtgtttcagtggacattttcacaattctggccgcttggacttcacagtaaccagttaaaactgtggaatatcacttctggttgaaaacccagaggaaaggccctgctgttttccacctaccacgttgtctgatttcataaaagggctgtgggggtgggaagggcagtgggttcggtggtgtgggaaagaaagacgaatggcaggcttcttccccagattctgcccgggtccacacaccctggcccaccttctccatatccccctcttgcagcagaagccaggaagacttggacaagcaacaagcaacagtggctatcgtatttattcagtgtcttcgctgagccacagcctcagcacaatcaagagggactttcatgaaaggcaggaatgcagataaaacaaagatatcagaaatttgcacctatgtttctaggtacaagagaaggattatttccaacaatctttgcaaaaaaaaaaaaagtgtcaggatatattcttgtggaagagaaaaagaaaaagaaatggagggtggggggaacaataaaaagttcttgaggcttttttaattcaaaattttatagaggggcaaaagtgacgtttaccagatagaatgctgatttttttaatatatttacaacagtatttgtgtaaaaaaaaaaa

SEQ ID NO: 8698 - DNA, 350 bp, Homo sapiens
ttggtaagtcaagactgttaaggttagcgatactgcttccagatagaaagaataaaaggcaactaaagttatatttgaaagagaggaaggatattttcttcatattttttttaatttttcttaatttttattattttaagtattgcctgggttgatgagggcctctgtggccagcccatccctgctgtaatttgaattgctgctttgtattttgatatgtagttctttgactttagcaagcttaagttgccccactgaataattttttcaactgattcatctagaattctgttctttttcatggaagagactttatctttcagaaagagattgcttgcttctccaaaatt

SEQ ID NO: 8699 - DNA, 918 bp, Homo sapiens
ccgccggcgggcaccctgcggggaccacagccggacgccagaagtgacctgaccgtgaatgtgcgctttgcgtgcagtcattgcatcgtcgcaggcctaggagacagatgaagagatgggtgcttattttatataggggacacagtgtgcccaagagcacaagataaacggccgggtggggattcaaacccatgttccctgactcaagtgtgagtgcttcagagcggtgaggggcccctactaaaagtcccagtcgcgtttcctaggctgcccaatgataggtattctcggttatagttttagggtactaggccaggacccaccctgggaaggctgctgaacgccctgaagtggtattcccgcaggcagaggagggaaccgagggggtgcaggaggaggaggagggggagaacgtgctacagcagccagccaacctcacacaaaaccgggccagtaaagggttcgaactggtaccgatttttatttacagctcttaaggaaattctcggttatactgaaaaatccagaagctctgaagataccagtcaaataaaatcacaccctataactctacaccagacttgtggcatggtttctgtagctgccagcggtaaaaccaagagaaactttacaaaaaccttttgtgcatctgaaaaggaggaagtgtgagagacactggaaattcaatatgtcagacaaagccgtctcctgacactgcaggacagtagaccagtcaaacaatctttttaaagcccccatgtaagaagttgctatatgaggtggcagcttgggtcagacattatgtatggcctttggtattttagtagcactgcatgtaaaatttaactttctaaaatcgctgtattcgtggatagcttttatcattgcactagacaacaagttacaatttaaaaattg

SEQ ID NO: 8700 - DNA, 332 bp, Homo sapiens
ttctctgtgataagtaagctagcctccctaggccgggcgcagtggctcactcctgtaatcccagcactttgggaggccgaggcgggcggatcacgaggtcaggagatcgagaccatcctggctaacacggtgaaaccccgtctctactaaaaatccaaaaaattagccgggcttggtggtgggcacctgtagtcccagctactcaggaggctgaggcaggagaatggcctaaacccaggaggcggagcttgcagtgagctgagatccggccactgcactccaacctgggcgacagagcgagactctgtctcaaaaaaaaaaaaaaagaaaaa

SEQ ID NO: 8701 - DNA, 1336 bp, Homo sapiens
tccttgtcaccatcttcccttctcagcctcttttttcatgctaacaggcataaatgaaatgataaaagtttgagctcttctcgtggaattctcgtgatacagatatgtgctacatgttcatcatctcgttggtcttcaccatgataactgtggagtaagaattataagcaggtcacagattagggacttgagattgacagtttggcttccctgttctgggtggcaaagcctgtggagtactcacctacctgctgcatgaaggcagcatggagggactgtggtggattatctgcaaagatggccaaaattctctcatccctgcaggcacatacaaggtaagaacacctttaccagtggaatgtgatgaaaatgctgcccagacaattctagacagggccttaagaggtctagatgcttccacatttgctttcttgggagctctgagttatcatgtgagaaccaccagtctccccaacctgcaccctaagctcattatccacaaggctgtgcaaaataataaatcactgttgttaggacgcaaagtttggtagtggtttgttatgtagtcgtggataactgcagcagggatctcagcaacttttcttctctgaactaatgtttaaagtcaggatgtaacatattgtctccatgtgactttgttgaactaaataaagaatgctaataccagatgcggaccctgcctcttctgttctctaagactaggcattgctctctgatcagaagagtcaatcctggtgagtttaacttgagcctcagaatcctactcaacacaaagttccagagagaagcgattatcaatgccaataccttagagatggtactggctgtggaatctgtcatcccttgactaggtggtctctaagttcctttccaattttaatgttttctgttctgatttatcttttggcattgtgcaggtgtcaggagaaaaaaataatgccaatgtgtctctttaattcctttatcattaagtcataacctttcccaactcccaatccagttttcttacgtcaatactttggtttttgctttgtgaagatgccagaatcagtcaaaactaagctcactgtccttgctaatattctgccccagagaagaactgaagctcagctcttcaccctacagaaagcctgaattttgtaaatgttctgcttagaatgaggaagaaagatgaagaatgaggaggaagaaggaaggaacgagagagaggtaaagccaacaagcagaacagacctacatttgcagcatctccaagtttctgcaacagcattatgttgttgttatgttttgttttaataaaagcacataccatttt

SEQ ID NO: 8702 - DNA, 5780 bp, Homo sapiens
gccgcggtcgaggatcctggaggtttgtccccgccgccccgacgcttccgcccggtccgtcggcacgtcggccctgcctcccggaccaccctgcggggcgcaccagcgatctggggtgcggggctcggcctccctgcgctcctggctgacggtgtgaccttgggcaagtctggcctgctgggccttagtttccctctctgcagcagggacttgggggtggtgaacttaatgagccgtatactcccacccagcgctcacttcctgaggctttgtgactttctgggagggatggggacgtggaaggggccttaaagcagtcccccctcgtcactgccccccacaggtcttaaccatgaacttctctggaggagggaggcaggaagcagcagggtccaggggtagaagggctcccagaccccgagaacaggtgcgcgcctcctccccaccccctcccaccagtccaggctccctgggagttgctggggggcggagctgaagggtcctactattcctggagaccactggcactcctttctctctgggctctctctgcagtgggtcattgagggttcaggatgggcagtagggcagggtcaccatggagactaggggccaccgctgggttctttcaggaccgagacgtgcagctgtccaaggctctgtcctatgccctgcgccatggggccttgaagctggggcttcccatgggagctggtaagtaggggccttggaggctggggcttgagcccagagagaaacgtgagcctgtctgcgactcctccctgatggctgcctccaccgctccctgaggaaggcacagagtgcacttcctccccatgcacagaggagagcaaggcctagagcccctgtcatgtccacagcagactgaggagagttcttgtctgggccaggcctggtgaccgccccctccagccaagcagccagatcagcacttaccccgagggcgagccctggagggtacggtgcagctggtggtgtgagtgtgcactccgggccagcgctatgctgggcactcacctccctgcccctccgtgaggcagatcctctttttatgtaagttgaaaaaactgcggcccagaaaggggagactttctaaaggtcccacagaggatgcccaagcgatctccaagcccagactttgtttcggttgcctgtggctccctgttaaccctggcccagtccagagcaaggttagctcctgagcaccctgcctgcccacagatggcttcgtgcccctgggcaccctcctgcagttgccccagttccgcggcttctctgctgaagatgtgcagcgcgtggtggacaccaataggaagcagcggttcgccctgcagctgggggatcccagcactggccttctcatccgggccaaccagggccattccctgcaggtcggggtgaggggacaagtgcgagacgagatgggagggacccctgcctgcgaagggggtctcactgctacccgttcaaccaggtacctaagttggagctgatgcccctggagacaccgcaggccctgcccccgatgctagtccatggtacattctggaagcactggccatccatcctactcaaaggcctgtcctgccagggaaggacgcacattcacctggccccaggactgcctggagaccccggtatcatcagtggtcagtgccctcccctccacctagctactcccacccactctgtcctcccaggtccccttcaaaggttacaacacttgtctggggccaccccatgtccggcatggagcagcacccctgcatcccccagcccaggaccccagtctgcctaggttgctgactgcactccaggtgcccaggcctcagctccagctgtctctgcaggcatgcggtcccattgtgaaatagctgtgttcatcgatggacccctggctctggcaggtgagtctggacaaagcaggagctgcccttgccttcggggagggcatgagtcacatctctggctctgtcagcagatggaatacccttcttccgctctgccaatggggtgattctgactccagggaatactgatggcttcctccttcccaagtacttcaaggaggccctgcagctacgccctacccgtgagaaccaccaccccagcccctattccttgttcctgaaagctgtgcccttctgccctcacctctctcctagcttccaaccctagactgacttaggtgtccctttctctaaccaactcttgtctttatcaggaaagcccctttccttggctggtgatgaagagacagagtgtcagagtagccccaagcacagctccagagaaaggaggaggatccaacaataaaatattaatttataaaaaagaaattttaaaaagtaacaagaaagaactcgtttgaaaccatgtttcatcatcctgtagctacatctggtcttccttgtgtgctgggggactgcagataggtcaggggtatcagcctcagccactcagacaaggaaagggggcaccacatgagctcagggacccccacccccatccctggcctgggtgatggtacagcgtctggccctgccaggtccttggcctgcacaaagtcagtgacagcaggtgaaatgcccagctgggtgcctgcctggagcgggtgtggggcagtgagcccctgtgggtgtgggcttgggagtggctgtgacagggtggtgagcagggcaggggcaatcagacagccctcagaaggcctcatggcccccggtgagctgcaggaagaggtcttcatccagctcctccccacgggcccgctcccgcgtcgacaggaaaatgtagcccccgatatactcgtgtacaattcggcagctggcagacacgcagctgaaggccacattgatgtgttcatcaaactcgatggccacctgaagggcagacagaggggcaaatggtgggtgggataagggagcagcccctgccccaccctggctggatccagctccggcctgcacctgtcccccatccatataccctgggtctgggcccacctgccggatgtcccagttgacattccactggcgcatgttgctgaaacgccaggtcttgaccacgtcgcccacgggccaagtcgatgcggatcagtcggttgttgggcgatgcccaggatctcgtctttcctgctgcccttgaaccctggcccccagggagagagagtgagccagggctccaccctgcatggccagagcccgcccagacaatgtggcgccgtgctggagagccagcccttcccgactgcagctcaccagctgtgtaaccctgagcaagccatttgggttccctgggcctcaagttcctcatctggtaaatgggggttaattgataaaatccccacaacagcatttagcagcatcgggcaaacaggccaagcctttaaatggtaactttttttggtttttgttaccatcctcatcaactgctgtctccctcccttctttgcagtcttgggaaacaactaatcaaaggggcccactccccataacagcatccaccgctagccctgtcttgcggaccggcgaacccaggcccagacagtgaactgtccacagcagagctggagcaagaactggttcttctgctctcctgacctgaaatctcttttttttttttttttttttttgagacggagtgtcgctttgttgccaggctggagtacagtggctcgatctcggctcactgcaacctccgcctcccgggttcaagtgattctcctgtctcagcctcccgagtacatgggattacaggtacgtgccaccacttgtggctgatttttgtgtttttagtagagacggggtttcaccatgttggtcaggctggtctcgaactcctgacctcatgatctgcctgccttggcctcccaaagtgctgggattacaggcatgagccatcgcgcaggctcttttatttatttatttatttatttatttatttatttatttatttgagactgagtctcactcgttcgcacccaggctggagtgcagtggcacaatctcggctcactgcaacctccacctcccgagttcaagacattctcctgcctcagcctcccgagtagctgggattataggcgcctgccaccacactcggctaatttttgtatttttagtagatacagggtttcaccatgttggtcaggctggtctcacactcctgacctcaaataatctgcccgcctcggtctcccaaagtgcaaggattacagacgtgaaccaccgtgccccgcctatttgttttttgttttgttttgttttttggaggcagagtttcgctctgtcacccagcgtggagtgcagtggcatggtctcagttcactgcaacctctgcctcctgggttcaagggattctcctgcctcagtctcctgagtagctgggactacaggtgcgtgccaccacacctggctaatttttgtatttttagtagagacagggtttcactatgttggccaggctgctcttgaactcctgacctcgtgatctgcccgcctcggcctcccaaagtgctgagattacaggtgtgagccaccatgcttggcccagcctatttatttttgagacagagtctcgctttgtcacccaggctggagtgcagtagtgtgatcacggctcactgcagtcttgacctcccaggctcaagagatcctcccacctcagcctcctgagtagctggactacaggtgaccaccaccatgcccaggtaattttttacaattttttgtagagacgagggactttctgtgttgcccaggctggtctcaaactcctgggttcaagtgatcctcctatctctgcctcccaaagtgctgagattacaggcatgagccccagtacctggcgtgagctttgtctcttatgtttgttgtggagggacagcatgaggggcacacatggggccctcagtaaggcctgcttacaaagaacaagggaagggagtctttggggtgcctgtccagaacctactcttgggatgtgggcacacagcagccgggtggcaggtgagggcagagacggtgctgggcagggggctgggccaggggccatacctgaccatgacataggagatgccgaagtcgggcagggactgccaggcctggatgaagcgcagctgggcctctgccagcgacaactgggccacattctggtgggcttccaggatccgtggggtgagctgcgggaccatactggtgacgggctgccaggcactattcccctcctccagagtcaccgagcccccacctccccatcagggtgacagcatgtgagcctgggaaggggcagtgcccacgtggggccgccaaggtgcagatctgcactgcgccaggctgcaaggtggacatgggcacctggaccgtgactcctcccaaagggtgggtaccagccgcacaatctcagggacacagtgggagaagcccagtgagtacgtagctttcctgaggaaggctctgtggagacccaggggtcagaggtctctgggtaaacactatgctcattcccaccctgacgccttctggtacctgcttggccttgaactttcgctggaaacggggggcaacgaggccgtaggggttgaggccctcggcagaggcatcagggccgtgggggtggttgcccgggcccccactgcccgtgcgctgcaggctgaggaaggccaggatggcctgcacctcgctggtgtagctgctgtcggccatggtgcggcctttggaggccaggcggcagccagccatccagcgggcatactgctgctc

SEQ ID NO: 8703 - DNA, 8018 bp, Homo sapiens
cgagctctgcgaatcactttattgcgcgcgtttcggggagcgggccgtccagggaaggaagcaaagcgggaacgcactgcaggccccatccaggtgagcccctcaggggccggcgccccggggcacgatctcggggccttgggttggctcggatggtggcggctgccgctgccctagccgttgtcgctcctgctgaaggatgcctctgttggccctggaggagagggcacctgggtggttgggatagggatcccgaagtgtggttcctggacagggagcagggagcagaatagagcagggacagacctggcccgtgcccgggcttcgttgtagaaggctgtgatgatccgatccttttcatccatgaagttaaggtgcatctgcttcaccttcctgcaatgggtcacaattaaccctgggaatccaattcctgctgtccctgaagtcctgcccccttccaccccactctaggggcctcacagctttttacccttacacagggttaggaacctcagtctaacccttcctgtgatagatagggagggctcagagtggccctggcttgtctagggtccaatggcatccgaagtccctggtcactttgaggtgtgacagcagctgtggacatgggggtgctcctcccagaagactagaaagggtatgcgtctaactccatcactgaactaggcaggctgctagcagtgggcactggcctttaggtatctgctatagaaaatcggctttgtggccaggcgcggtagctctcacctgtaatcccagtactttgggaggctgaggcgggtggatcacctgaggtcaggagtttgagaccagcctggccaatatggtgaaaccccatctctactaaaaatacaaaacaactagccgggtgtggtggtggacgcctgtagtcccagctactcgggaggctgagacagaagaattgcttgaacctgggaggcacaagtggggttgcagtgagccgagattgcgccactgcactgcagcctgggcgacagagtgagactccatctcgcagaaaaaaaaaagaaaataagagaatagagagaatcagctccgtggcacgcgtgagagtggcagggagatgcctactgccaaatgaatgagctgtgctgcatttgctgcttgtgcttgattttgtttggctcaatcccttcctggcagccagcatgaaagatttacattcgaaatatgaaaaactgtaaatgacaacgttagctcttggtgcagcgctgcctttaataagtaaggagaggctccagagaccaacttcaagcagctcttagcttgagagacacaagagtacgggccacgaggtgctgtggaggactggctgaccacactggaattcacccaccctcctgccctctgcccatcaccccgggggagaacaggcatcacctgaaggcaatgtagtgcaggcccatgcccgccagcatgaggaggaggcagtaccccagcacttgtttgttttgtttgtgttgctgctgcctcaactggggcccctgtggcctcacgctgtgaaactgggaccagtactgtgcgttggggggtgtccaggagctgctgggaggcagaggaagggacattgtggaaatgagactacccaagagacctgggggtggggcaagctgagggcaggattactgtacctgtgtgtttggtgggcagacttgtcatggactgtggttcgtggagactttgggggactacctgagcggagctggtcatcatagctgcggcggctctgctcacggctgagcacacggtatgcctcgctcagctccacaaagcggctgtgcaggcttgggttcccagggtcccggtctgggtgcagctggggtggggcaggactccccttatctccctttgcctgtccctccccaggacccatgctgatgacatccacccaccagggctccagtcatacccagaggccctgcctggtcagtgaccctcactcaggcctgcccactcctcagaaggccagagagcatggactcctgcttcctcctgtgttcaagccctccccacctgccagccccctgcattcaccatatgccctggtccaggtttctcaagagcaggcaggcaggtcaagaaaaccaagccccagcccatcagacaggacccctggcctcctgcccacagcctttcccttaccattgagcacctgccactcccctatgagggctgaaaaaatgtggcacccgccagagatgctggtctactcctgggaatttgaagcacacccccactggctcaaagttccctgctccccttccccacttcaggggtacgggtacctctttggacttggagaagaaagctcgtttaacttcctcagtgctggcaccaggatgcacccccaacagttcataataagtactgggtctggacctgtggacagagtcccaaaccttgcaggggctgaaggaacccagaagctagctctgccctgccttctgggccacacccttcaactcagccaccaggagctgacagggctgaaacaggtcccaggacagatctgtctccagatcagcaccccctttggagtgtttcaggcatagtgcaggtcaggatttctcaaagtggagtccaaaaacttgttggaaaaaactgattcctggacaggcgcggtggctcacgcctgtaatccagcattttgggaggccgaggagggcggatcacctgaggtcgggagttcaagaccagcctgactaacatggagaaaccctgtctctcctaaaaatacaaaattagccgggcgtggtggtgcatgcccgtaatcccagctactcgggaggctgaggcaggagaatcgcttgaacccgggaggcggaggttgtggtgagccgagattgctccattgcactccagcctgggcaacgagcgaaactccatctcaaaaaaaaaaaaaaaaaaaggaaaaagagaaagaaactgattcctgacccccacccaattgattcctccagttcagaatctccagagcagagcccaggaatctggattttgtacccgacacctccccatctcccaccccccacagagggttatgcacagtgatacagcgatgcttggaaaccactagagctgtggtaagagcgttgggtttgacctggactcaaacttcctcctctgccgcttaaatcggtgtatgaccttgggggtcttctctatctctgatcctcagcagggaaggcgagggttacctgagacaaacctgggagcctcctgacacggagtagagaccacaactaactcagcacgtagggcaaacagaaacccattgaacaaccgggccggccccccgcgcccaactcaccgctgcccggcggccgctccgaggagccgggagggagggttgcggggccacagccggcacaggcgcaggggcagtaagggcggcatggcggcgggcgggcagctgggaaaggaggctaccaagagcgcattggaccaggatggggctagacttcaagcacccgggggcagagggaaggggcctggcccgttgttctgcaaaggaagactgaagcaggcccggagagggggcggttcttgcccaggaccagacccgcgtgtccttggacctgccccttcctctgacccgggcatccgcagcccttcccagcgctggcttcggggtctggccacccagccagggaccccaagaccccgttcccacccagggaacttggggacgggagaaggaggggccacaaccaggccccgcccccgctgctcacagacccgcggccgtcgccatttcctgcgtctattcaggccccgccctcacattctcattggcgtggatgccaagaccacgtccacctgtcaggaaaaaaaaaaaatcggtggagaccccgcccctacatgtctattggcctttggtgcctccggtcccccagcctgcggactcgctggacaggcgcgggcgcccacctggggagcgggcgggacagagcccgctctctgcggctttgtgacgttttcggcccggccaccgtgtctccgttccgctgttgctcccctctgcagcgaggtatatcttacggagctgcttccgccccggagcctctctggagccagcaaagaaagggaggcacagttcttatcccctgcttgcagagggggacacaggctgggcgggtttttttttttttttttcccaagtcacttgtcctgccttacacactcagggcccattgctcctctctgttacagaaatagcagatgccaacggaatccaagaataaagtcgtttattattttcagagcggcgggagtagggctggggaccctagggccgctccagtgggacttccctgaacccggttgtagaggatgatggcgcctttggccgaggggcagagttcagcccacatctccgtctcgggcaatctccgcacgttctgtggggagacaacgagacccaggcattcaagcttgccacttctcctgccagggctgtgcccagaattcctgagcctcagagacctctgcactgtccttagggaggcatgttaaggggctgaacatgtccctggacctttcccttgcactgagggcaaatcttgtgactctggagggaattgtgacccagccaacacctcccctacaagatatgcattgccaggcctctgcaggccccagccctggcctccaagcaagatggtttgtcactctgcacctgtgtctccacaaagaagattcctgtagactcgtgggcctcgggtcccccactcaggtagtgcttcctcacctgctcagaagtcaggctgcacctggacaagaacacaagggtggcttagtgggtgaccagcccctgcggggtacctgtggagccacagctgcctcagcccactcctcaccacccaccttcccaagacccaggatcatgtacccgagcctactcactggacatagaactcggcactggctcggccagcactggtctcatttcgggcgatgcccaacagcaggggctggctcagggtgagcagcggcaggttcacctgcggtggagggtggggtggggggaggtcccacctatcaatgccactgcccacatccctgcccgtctcaatgaaaaaccgcctgttacctgtgtacagcattttatagcttgtagatcaaggacccagcattacagaatgtcagatgatgggcatgtttgttttacaggtacaccaaaaccagagagattgaacacgttgcccaaggtcacccaagagaagtcaatttagtgactgggactcccacttactcctttttctttttttctttttttgagatggagtctcgctctgtcgcccaggctggagtacagtggcacgatctcagctcactgcaacctctgcctcccaggttaaagtgattctcctgcctcagcctcctgagtagctgggattacaggtgcacgccacaacgcctggctaattttttgtatttttagtagagatggggtttctccatgttggccaggctggtctcgaactcctgacctcaggtgatccgctggccttggcctcccaaagtgctgggattacaggtgtgagccaccacaccctgccacacttactcctttttcttttttttgagacggagtctcgctttgtcgcccaggctgaagtgcagtggcgcgatttcggctcactgcaacctccgcctcccgggttcacgccattctcctgcctcagcctcctgagtagctgggactacaggtgcccgccaccacgcccggctaacttttggtatttttagtaaagtcagggtttcaccgtgttagccaggatggtcttgatctcctgaccttgtgatctgcccacctcagcctcccaaagtgctgggattacaggcatgagccacggcgcccggccacttactcctttttcaacagacttggggagtaggcaagatatttatcattgtttccattgaaaagaagaatccttggcggggcaaggcatgagaatcacttgaacccaggaggcggagaatgcagtgagccgatatgccaccactgcaatagcctgggcaacagagcaagactctgtgtcaaaaagagaaaaggagaacagaagaagaatccggcctggtgcagtggctcacacctgtaatcccagcacttttggaggctgaggcaggcagatcacgaggtcaggagatcaagaccatcctggctaacaaggtgaaaccccatctctactaaaaatacaaaaaaaattagccaggcatggtggcggatgcctgtagtcccagctactcaggaggctgaggtaggagaatggcgtgaacccgggaggtggagcttgcagtgagcagagatcgtgccactgcattccagcctgggcaacagagcgagactctgtctaaaaaaaaaaaaagaaagaaaaaagaaaagaagaagaatccaaggcagagggtactgacggctagaattccactccaagtatgtatagctgcaaagccaacttcttccctcattgctggccagatgcctgcaggcctcctgccagcccagacctgtagaattctggcaagtcctaccccctcccttcatgtctaccaccctgtccaggtcaacctcactcacctcatcacagatctcctgaaggacactggaaaagagttcatgtaccaccagctgcccagcgaggtcctggtgctgggggctgccaccagggcacagggcctgtgagaggtcaggctcagcccctgctccccacctcttccccctgccccatctcaggaccagcaagcctatacctgctggccttgagggtctgatgtggcacagtgtaagagagttagtgatcctgagtctggtgtcctttccctgacagacaaccagaggtccagcttcaaaggagatacacagggggcaggggtggagtagggcatcttcttcctgtgcccaatctttcctcccgtgttttctagtttctcacaggactggggcaggggtcagtggggaggcaggtggactgccctgagcaaacttccagagaaataccaggccaattttccctttaagggatggggaaaccaaagctgggaggattgggagggtggagagctgcagctcccttgagctgtctgggtctttgtgcccagcctggaatctcacctgaggctcagggtgcccaccaggtacgtccaccagcccaggggcctcagccacctgccgggagcggcgcaggaagacaaggaagtcatcggctgtggctagtgcagcgcccacccccagtgggtccgccagataggcctgcgtgtcaccccagtcggtggcaccctgctgtcgcagccaggcagctgagctggaccagttggtgcccaggaagtctcggtaggaagtaaggcccaggcgcaggagcagctgtggcccccgagagccaataggcgccagggtggctgagtgcaggcggaacttgggggcgtcgaagagccagggttgggcctttagccgggtctcccagatggcagtgatggcctcgtccccacctggcagtgggcgacggtcatgggcggggctcagctcggcctgtatctgctcctggggcaggcccccgccagggcactgcagcagcaaggtcacctcaggatccatggtctgaacggggcagctctgggggaggatacggccaggcctgtcatccaggggggccactaccactcctgggctgcgcagctagccccctctgtcgcagacctcctgagggtatccgcagcgcttctccacccccctgaccactccttgggcagtaaaacgtgccatcttccccgcaggagccccgagtcccgcagggtatccaggacgcccgggcatccctaccatccagaggtcttgggttcaggcgccccaaatgcccatgtcccccaaacccaggggtctgcctccgacccggggcgcgcggggacccctttccagggcccggaagctccagcctccagcgggcgctcaccagccgccgggtccctcaggctcc

SEQ ID NO: 8704 - DNA, 1638 bp, Homo sapiens
ctgtccttcaaaactatttaagagcctctcattagtcattttttctcttatatgctctggttgagcttgaatagaccagttgttgcttaagaaagaaactgaaaagattttagcttttcagtcctatttggcagaggacttcagctaccttcttatggtctttggctgtgttggtgccctcatgtgctctgggctaagccacatactaaattgactttttggtttgtatacccttgctctcgccttctgatgaaaacaccttaccctcaccaccaccatctttgctctcctttcccaaaactctttccgccttgctgcactaagatagtgacacctccaccacacgtcaattccacacacatttattaggtacctgtgaagcaggatcttatcctcttaaacttccacttctcacactagagagaaagataaggaagatgagcaagtgcctggaatggggcaggctgagtggtcacacaggcacagaggcacactgagaacctacaggggagactgcagagtgccttccctgatgctgcagctggaagtcatccttccctccacctggcccctgagacactctactctgtagtgtgcagtctgatggcactgctagatttctttttcagctcagggccacagcttaaacagctttacctttcccctcagcacctgtcccactaccttgcacacaggtactctatccgtgtttattgaacaaaggagggaaactgatttcactttcacttgttcattatcattccaatttttatgtgaaaatggcacaacccatttggggtacactcatctcaaaagaaaagcccaagactacctctgactggtaccaccttttttgtgggttccttggtgagaaacctttatctttttcatacttttctattctccatcacttctccaaaagtgtctctttccagctctgatttattcaaaacacacaaacattcctgtttagagattctagcccatggattatccggctagttagtacctctcctgttcacttggttatactttattattgctcagaggttggggaggcagaatgactgtgtcccctcaccctggcagaatgactgtgtcaccactaggagccattagggcttcttcccaggaggactgcctgcttgctttctggggactagcccttatttcccttctgtggtccagtggggcaagtgatttgtattagacaaacatttataagaaacaaccccctccccaaaatagagccaccaagtaaagcacaagcctgaaagatgatgaactatgaattgtctctagtggatataaatttctgcaaatatatctcagtctttctctcttttctctggtgattaaaaagttggtttttggtaaggaaaaggatttttgaccatagagttatgcatcatggaaattcaaacccgatttcttaatacctggtcttctccgaagagaaataatgatagtaatagtggtgctgggaacaatatggaagattattgaatgaaatggattaacttgaataaaatgctgtgaattatctctagctgaatgcttttcttgtatttgtcagttttgatatattgatgcacatttgattctttatctcaaatagactttactagggaactgttt

SEQ ID NO: 8705 - DNA, 946 bp, Homo sapiens
gagtgtgtaaatctagcatttattgagtgtctgctttgtgctcagcactgctcaaacactgtgagcaaatacaaaagatttaagagactgggtacccacttcagagggtgaacatacagttggaatttccattcactccacagttagagaacagtagaaatgagtttctatcaggcatgctctgggagttcacggaggcccctggctctagttttgtgttgtcagggagatgttgatcaagcaccttggaagtgaaaaagcaatgtcctctacctgttccctggattcttctctctttagacctgtcaccttgaagaaagcatgatcgattccaaacatcactgtaggcaaatcaccatagtacttgaactgagttactgtgaagaaagcatgtcatccttgacaatggattaaatgaaagtgagctaatgcatgccattctcaatccttgcagctacaccagttcccaggcactgtccttacaagtgatccatccatattccatacaagatccaacacttgctccaatgatatatccttgttttcaacttcagaaattcaacagacatttacatttagattatccctgaacagcctgtgagaccaaatacacactttccctaatatactctaatacaaaatccttattaagaaacagaacagaagtcaaatccagagacagaaataaatactgaaagcaatgtcaatgaagatgctctctccttggccatgttgtctttggacaattttttttctgaacagagtcatagttttgacatttaatgatatctttatcatcttatattttctataccatgaaattaacatttacatacaacaaaatcacctcaagaggaaaaacatagatttttctaaaaggaggtctgaacatcatcagtgttttggaatcctggattattttctcctttgctaatatcgatggagg

SEQ ID NO: 8706 - DNA, 946 bp, Homo sapiens; identical to SEQ ID NO: 8705

SEQ ID NO: 8707 - DNA, 8575 bp, Homo sapiens
cagcaaaagaagatgtaacagaaaggcaaagcaccaaacgatctcctcagcaaactgtaccatatgttgttcctctctctcctaagctccccaaaacaaaggagtatgcgtctgaaggtaaatagcatttacacctcccaggactgggaagaaatgtttctctgctaccacttatgtatactcttggggtggtagtattggaggtagggaggtaaatttgcccaaacaagtttggcagttaggctactacttggacagctttgttgaacccttcattcccttcagaagtggacggctgtcatttctccatagattaaaaaaaaattgtaataacctttttccttcacttttgtattgctaaaaactggcagaaagaagaatagaaaaacctactgcctttctccagagaatgtaactgcccaagtagtaaacaaatgttagaaaccaactgtatgatcatattataacaaatagtaatgaagaactgcatttctaaaaacaaatgcttcagtgaggtgtttatagccttggtggcaagactggcaaatgatagtaagttactatgaaaaatataggtgatatggaatcactttggactgtaggacaatgtccattaatataaatgccaaggaacgccaagtcgggtggatcatctgaggtcaggagttcgagaccagcctggccaacatgatgaaaccctgtctctactaaaaaaaacccaaaagattagccaggcatggtggcaggcgcctgtactcccagctactcgggaggctgaggtaggagaattgcttgaacccaggaggcggaggttgcagtgaaccaagattgcaccactgcaccccagcctgggcaacaagagcaaaactttgtctcaatcaatcagtgtatgcatccataccaaggaggggatagccatgaactttgtgttagagcattgtggttcagtatagcacaagttaagtgaactattgctagggatgagatttttaaccttttagtagtatttgaattgtaagtctattgaagatagcctcctttgtctttttccctgtaggagaaccattgtttgctgggggaagtgccattcccaaagaggagaatctttcagaagattctaagagctcatcactaaattcaggaaattatttgaatcctgcctgtagaaatcctatgtatattcatacttcagtctcccaggatttttctcgaagtgtgccaggcaccacaagttcaccactagttggggacatatcccccaagagcagtccccatgaagttaaattccaaatgcagaggaaaagtgaaggtatgttcaaaaatagtgactctcaatgtgtttgtcttttgccttgagattttcatacctaacagcatcccctgagagtatcacattggagaaagtgctaaaatttgggaggctgagtcctctctttcacatcactgtcaggtcagaccattatggatcctccaatcctcttgacagcacagaactgtctctagggatctggatcaccaaccatgtctctgatagagacttctcagattagtagtgcttgaacagttgtaatttatcatttccttgggtaccgtctggactcacaaacctctcatgactctgaggcctggaaagacagtccctctcctttctgttgtacacttttcttcgtctctcttgagacattcctggcctcagcctgtgttgactcctggattcgggctggcatcttgttaccacagccacaccatttcctcactctccacatccttcctcagacccaccaggaagtcatgacatgtataagtagggcaatatcctgttgccatttagaaagagccagaacaggccaggcgcggggtggctcacacctgtaatcctagcactttgggaggccgaggcaggcagatcacccgaagtcgggagtttgagaccagcctgaccaacgtggagaaaccctgtctctactaaaaatacaaaattagctgagcatggtgatgcatgcctgtaatcccagctacttgggagcccgaggcaggagaatcacttgaacccgggaggcagaggttgcagtgagccgagattgcgccattgcattccagcctaggcaacaggagtgaaactccatctcaaaaagaaagaagaaagaaagaaaggagccaaaacggccttccatgtgcaaagagggctaataccctgtacctttgaaggattaagggtacaggagagtgagggtgggaataagtgttttgtcctttttctccaggtaggcatgcaggcgaggttgaggagtgaaggaagtgggaacccttgcctttgatcatgggtgttatctatgggcaaccacactgtgcacacaccatgacacatttaatgttgtcagccccatcccctctggagattgtctctgcctttagagtgacatagcttgcagagtctaacaatagatgcttactccataatggctagtataccttgcattttaaagtattttcacaaagtatgaccttttggcgataggctttctcagtataaggttacttctaatggtgaatatctcactttgaaatgtatgtcaaacactaaggtagccggtattggggcatcagacggctagcttctggtcttcttagcaatgtagagactaatagtaataacattgctttctagtaatttacttactggtaatagaaataatcatcatcttcatcactatctgatgtatgccagggatataatatttcatatggcctcctacattatattgttacaacaattccttgaaatgtaggtgctggtaagcattttcaggtaagaaatttgaagtcatttggctaaggttcctcagctagaaagtggctgggccagtccttgagctcaaacactctgactccagggttgtactcttaacttctgtactccttgcacctcccaagaatagatacgcatttccattagaaactgtctagaggtgtcattactattatttttaaggcatttgaactgttacctagagctaattccactcctgacagccagtgatgctcacacaatttcctgtcctgccttgtcccattatttgaatgaaaaatattgctgatctttattataggaaagaaatccaatgatgtcgagggggggggatcagatcactttcatactttcattatatttattctagaaatatttattgatatgccagtgtatataagacagagccgttcaggagaaaagcatgactggactttgattatttttcacatgattagtttgtttcatgtaattatttgaataacaataatgtaatgcttgcaaacttctctgattgttttgaagatgtaggcccaattaaattatattttcataatagactaaaaatagaaaatcttatggttttatttttaatataaaattttataccccaaatcatatctttttacatatagtttatttgcagtaaactgtaaaactagttacatgttattcaaaacataaatgtaccagattatgatgacagaaaccagaaattccacaaaaatgtacattaaattagagatatgattagctttgccaatgatttttttcatgttatgttgtgtctttgttaagttaaaggagatggtgtttctgtctaaattgtcagaatgctaacttaggcacagcatggtctacaccatcatcatttttacttgggttgatacagcctagcagaatttctctgtagatatgaccaacatttttttctctgagtggaggggagaatatattttggtatagagtttttatttcacatcatcgttgtgatgttggaaagaaataaaattcagagctacacacaaaaaattaaccactataagttcttttattttctgtttttctttatccttcccctaggtaaatatacttaaaatgcttctaaaatggccatagtccagaggataggaaagaaagggtactcctttggctaattcacacacaaaaaaacatcaaatttgtgttgacagtccttggttagcaaaacaaatcttcctagctaagtacaaaattcacttcagttatccacactaactttagggagttaagggctctggttgagtaaatgaatacttgtcaggacacagattttatcacaacttagtaaagagcacagctaagaccatttgaggtatgagcacttaaattgtttcatgtctcagttatgtatttttttaatgtataaaccttcaaccaaaatatctattactatgcaattaaacatgataaaggagttaaattaaatgttaaagttatttctgacctagcttagcagaaaataatcttgtcttcttcaaaattcagataagcatttaagccatgagagacaggaatctaaagagtaaagtgatgctaaaaatattcttattggatacatcagagagatttggtaaaaggactaatttgtttatcaaaaataatgggattattgaaattctttgattaaagtgaacacatttaagcaattagaaaactaaatttagccaggtatggtggctcatgcctgtaattccagcactttgggggcctgaggtgggcagattgcttgagtccaggagtttgagaccagcctgggcaacatggataaatcctgtctctacaaaaaatataaagattagctgcaagtggtggcatgtgtcagtagtcccagctacttgggaggcaaggtgggaggatcacttgagcctgggaggtcagcgctgcagtgagccatgattgtgccactgcactccagcctgggtaacagagcgagaccctgtctcaaaaaaaccaaaacaacaacaacaacaacaaaacaaaacaaaaactaactgtaaatttggggaatttccatcggatttagctagtaaaatatacctagtctagacagatagagagagattgaaattccttgaaagacttaaagtaagagagaagtcataggttagattagattaacctaattttacccgagtaacagatcttttgctgtatttgtctgtggccaaagaggcttggattgcttagtctgttttgtgatctttgaagctttaaggtaacgtctgaacctgcttttgttgtttgggggaggtcagatgggatgctcttatgtagccatcctcacatcatttttgtataagctttcacagttggagtcttgagaccttgttggggaacttaacaaaaggttccaggaatgagaccattattccctacctaacatctcttctttcaggataatgatcaggtcaagtatgatttgtcttttttcccccccattgaagctccaagttatatagctgtacctgatcccagtgtcctgaaacaaggcttctctaaggacccttcaacctggtctgtggatgaagtgatacagtttatgaaacatacagatcctcagatatcaggccccctcgccgacctcttcaggcaacatgtaatgtatcttttgatccggttttcctgccgtaatgcctttgaatgacctctgtgcaggcccttcatttggatgctgtgtggatggtgggggaaccctatcaactgatttttccatatgtgagagaggttatttttcccaagattagttccttaaatggtagattaatggtctgttctttaagtgagtatccaggtgcctaaaatacaaactgcttcaacttctcaagatacgatgattcagcattgcaactctcaggtgtaccttccctttgtgatgacagatacaaggatcctccccgacctgctcccagctcagtgccagaaccatgagtaggaggggttgaccacaagctattacagggtggccttcctccagtgaatccagcaactttataagattaagtacatccttttaaacaggaactcacaaataccaaataatatgcttccatgacataaattgattaaggtaataaagaattttaggaggatgccttgtgactattaagtaatattttcagtgttttctaacaaatcaaatgagtgatctattatctgaggtacccttttcactatcgcaagaaaatcagtagttttagcatctaaccagcttcagacaactaactgattagccttcaacataatgacaacactgtatagcacatttacagtttgcattgatattgacatattcctggcccttctcagaaagttattgatcatctgaaattcatttctaccattcataatttttgatcttttgtcatagatatatttagtattttatttaacacacagtatttaaagtcagattgtttgatacttgggacattttttgaagatacaagattaaattttcttaaagtttgaactaaattcataaattatcaaatgatgcttcactgtataaattatatttttaatagttttcaggaaataaagcatattcagagaatatatatccggagtatacagctgctgtattttacatgttcttatgtataaataatttgatatgaaagcattattaatgattatgatttccttctctctgtaggaaattgatgggaaggctctgttcctactcaagagtgatgtgatgatgaagtatatggggctgaagctggggccagcattaaagctgtgttactacattgaaaagcttaaagaaggaaaatacagttaaaaaaatgtgtaagtttagattggacataattctcaggtgtactgttaacattttaatttaaaagtatttctcttagcagtttttgttttgtagacagttcccataaaaatattttatcagaattgcagaactgtagtaacagttcagtcaactttgtttttttcctggagtcaccaaccagctttgggagacacagccgccactcccccagtctacttctttaaaaagcatttaacaggttagtattggcatattcaaattggcagttctttatgtctttttaaattttcattgtacagtttacaaatatacttaatgtagttaacagagaaaaacctttgattttggttaacctttatatctagaaccaaaacagctaaatcccaaaggggaaaatatcagggattgacaacttctataattaaatccatgagaatttttcctcactagagaatttaaaggtgcacctgtagatatcatcttttctcagatattttgtgtgatactctgtggtgttctgttcatgttctatcagtatatctagaaagggaatagccatataaattattttccttttattatttctctgtatgttgtatttgatcatatttaaaggaaaaaagcaagcttataagctttcatgaagtgttcttaccagtttttgataaattttttaaattataggatagaattgtcattttatgcaggagatatttatactacgagggttgtttggatggagtcagattaaattttttcagtgaaattcctattattttaaaactttccatattttcactacgcttggacatttaactaggcattcttttcttacatctctatatgaagatacctgtgtccaaaatttttgaagatatatattgtatgtgtttattcttcatatggtactttaccatatttatatattgttttatacctgtaggtttacacacaagtaaatcttttttttcttgaatttaatctggcactttgcactgccacagaggtgacgatgaactatgtatatagttagatgttttgatttcgtaaaaaatatatgtccatcgtttgctatcaccagtacctctcagcttactcttcaggggatatgaaacaatctgtagattggtttccatacagggaagttctctgtcctatgcaatgtttctaattaatttgcttagttctgagccatttattctgctacactttgaaagatatattagttctgacttattgtttggggctttattttatttttatttttttgagatggagtttcactcttgttgcccaggctggagtgcaatagctcgatctcggctcactgcaacctcgcctccctggttcaagcaattctcctgcctcagcgattacaggaatgcaccaccacgcccagctaattttgtagagatggggtttctccatgttggtcaggctggtctcaaactcctgacctcaggtgatccgcccacctcggccttgcaaaatgctgggattacaggcatgagccaccatgcccagccatgtttggggctttattttataagttagaactttgaagaggaaatggtgctatatgtttattgttattactttgtgtaactttgatgtaatgtttataagctatgagaatcagttataaaagtattagccatttgttgtaaatgccaataaaatattcaccaggggcaagaatgtacattttctttttagaaaaccaaatgtactttagacatgaatgcaactatttaaagaatagcttcatttatgttattccttacatgtcataagattcttacttaaacttggtcttctttcaagttgtttgtatgaagatgctgtacccacttgaacagtcctcaggtgtttacataaatactatgttttacagttttcatattttaaaatattaataaagttaatcgcaacgattcatt

SEQ ID NO: 8708 - DNA, 2084 bp, Homo sapiens
cgcacgcgcacgaacgcacggccgcgcagcatctgtcttgctggaagctttttcctagaggttgagcggtttgcacaatgtcggaaatggctgagttgtccgagctgtatgaagagagcagtgacctgcagatggatgtgatgcctggcgagggtgaccttccgcagatggaggtaggcagcgggagccgggagctatccctgcgtccctcccgcagcggggcccaacagctcgaggaggaaggcccaatggaggaggaggaggcccagccaatggcggcgccagaggggaaacggagccttgctaacgggcccaacgctggggagcagccaggccaggtggcgggcgcagacttcgagagcgaggacgagggcgaggaatttgatgactgggaggacgactacgactatcccgaagaggagcagctcagtggtgccggctacagagtatcagccgctcttgaagaagccgacaagatgtttctgagaacaagagaaccagccctggatggcgggtttcagatgcattatgagaagaccccgtttgatcagttagcttttatcgaagagcttttttcactgatggttgtcaatcgtctgaccgaagaactcggctgtgatgagattattgatagagagtagttagatgctgttaaaagaggaggaaactacttgaggagggacccaactttccgctatcttttgggttcattccaaatagttttgtgccattgaaaaacttgaccttcaaaaaaatttgtttttcagaatagaacacaataggacagtgactgcacagttgtgaaaaaggaagagaatcattaaagaaaaagaaaaaagattttaagaccgttgaaatcaattatcaagaacgtcctaaaacacctatggctttgactttgttattgatccagattattttccttgcattggggaaaatatctttcatatttgtttgctgtaaagatggttttgcaagaataagtcatgaccaagacaaactgccaatacaaaagcccactgatactaattatataatgagaaaaaaatgtatccaactaggacacatatcttttgagttatttggactgaaagcttaagaaaacttggaaaattctattttgtgatctagtcaagccacagttatcaaaggctacattttcagtgtaagataaatggatgagtaaactcaaatatgtatcacgtgtgctttgtatcttaagatgtgtttccaagagcatctgaaattttgtttgtacatgtatcttgatcatttataaagccactgtgatctataaatcaagaaaatccattgtcataaccatttttaaaagtcaaaaattaagacatccttaattaaaaagtttcaaatctagacactaaatgtgtgtgaatgtacaaagaaaacaaaccattgcttatgctgttatatactagagaaattttgttttgcttgctgttttaacttgacagatgaaggactttagttgaacttcatattgtaagaactgttaataaaagttgtcaagtaaaaagcgctatatctaaaaagactttatgaacagttattctatcaacttttaaaggttttaaacctgcccagaaattaccttggtatctgaagtttccctctgtctcctcctctaattaagcttgttatttgtcatgcaccagcattggagataataaaatttcttgttctgtgtattttgtttggctaatagtattgcatacatactttctctgtatactactttctattgtatgtgttaaccagtattaagggaaaatgatccagcttcagctatctaattcacaaattaatttctggaaattaaactttgtaaattaagtttttgcctataagaatttgctggtctgggaaaacctgccctatcaatgagtatgttgccgtggttaccttactaagatgctgaagttctaggagagtaatgattacatcagaaggctaggttcagcaaaataagtgtatcagcaggttttatcatgatcagtaaaaatgttccaaatgcttctgctccattatagcagtaaagaacgaatatccaatgcaacaggacaatt

SEQ ID NO: 8709 - DNA, 2084 bp, Homo sapiens; identical to SEQ ID NO: 8708

SEQ ID NO: 8710 - DNA, 142 bp, Homo sapiens
ggtttgcagcattacaagcagcagtagggttaagtaacacagaaactgttacgctcttgcatgcagggtccctagatacgaagttcgaatcgatggaaacgtagctcaaaaggcgacgccaacaccccggagaaaacactga

SEQ ID NO: 8711 - DNA, 719 bp, Homo sapiens
aattttaagagaccaacatctcagtacagagacagcagctaaaaatctagaggcttacctttttattattatttttttaaagtaaaagatctgggagcctttgacctatagacctatgtagccaacaaacaaacaaaaaaacaaagcaaaaaaaaaaaaaaaccatctgattcacctttagataaggaagattctgtttgccaagtccctcagtgttgtctccccaacacagaggccaggtagcacttgacatttatcattgggcctgcaccattgttttttcttgtgcttgcacagcttgcattacctacttggcctctaaatatctcaagttgcctctccttgtagagactaaaggatgtctcaatttttgcctgttttaccttaactctattacccttctgaattcagtacctgttagagttgtagaaatcagtaaagaattagtgggagtgtgagcaactgagactctgactttgcttgaggccctaaaatactatattaaagtatgtcaataaagtctgttgcttgaattttaaaacaaggaaatacctataacttacccttgcaaaaatgtattcccatcctgaaatatggtaatatttaaaaattgcaagcatcgcatgtttaatattttctgcctctggaggtttgtaaaatattttctgggaatgaattgttatattcttgatgttctcagtggccaaagataaatgtga

SEQ ID NO: 8712 - DNA, 719 bp, Homo sapiens
aattttaagagaccaacatctcagtacagagacagcagctaaaaatctagattcttacctttttattattatttttttaaagtaaaagatctgggagcctttgacctatagacctatgtagccaacaaacaaacaaaaaaacaaagcaaaaaaaaaaaaaaaccatctgattcacctttagataaggaagattctgtttgccaagtccctcagtgttgtctccccaacacagaggccaggtagcacttgacatttatcattgggcctgcaccattgttttttcttgtgcttgcacagcttgcattacctacttggcctctaaatatctcaagttgcctctccttgtagagactaaaggatgtctcaatttttgcctgttttaccttaactctattacccttctgaattcagtacctgttagagttgtagaaatcagtaaagaattagtgggagtgtgagcaactgagactctgactttgcttgaggccctaaaatactatattaaagtatgtcaataaagtctgttgcttgaattttaaaacaaggaaatacctataacttacccttgcaaaaatgtattcccatcctgaaatatggtaatatttaaaaattgcaagcatcgcatgtttaatattttctgcctctggaggtttgtaaaatattttctgggaatgaattgttatattcttgatgttctcagtggccaaagataaatgtga

SEQ ID NO: 8713 - DNA, 142 bp, Homo sapiens; identical to SEQ ID NO: 8710

SEQ ID NO: 8714 - DNA, 2532 bp, Homo sapiens
actgcatctcatgcatgtattcttccaaattaagaaccccagatctcgataaatgcagaactacttcttggaatgaaaacaaacgtttatggtatggaacttgggctgtactgacagaaggctttgatgagtctcggttagactcaaaatggctacaatgaagcaacatttattcctcatggtaagtggcaatgcttggctgtgatgacctccaagagtgttgtgtctcacatgtgtaattactgtcaggccaatgactcatgcaggtctgtggaccatcgagatccccatggatcgctattaacacatggagccactgagccactataacatgagccctaaccacaaccacaagcaggacactatcactgacatacagcgtgggtgcccatttgtctgatttataggtgacgtcgtggcaaatgtggcatcagtttcatttcggggcagtggcaagttacagatatttccttcacaacaagaagtgcagacctgaaagaaaggaagaaaaaaagataatgagaagccagcatgtcttggaaggaggcagggtttttgaaggcactgtcgcccacatggcaagatgcaagtaaaaattacctaatctataaaggagatgccaactctacgttcaggaaggctggggataatatttcttctagaagcaatctggtcaacatgaaaactccccaggccaaacttcaagagagctaggttttgtttttgacaccctccacccatacgattcttacaaaggtgtatagccttcctgggcctcagttctttcgcccttaaaatgggaataaagaaactcgtccgtgtttttccatgaggctctttctgactacttgaggaagagagggtaagccttcgtttgccaagttttcaagtgagagtcaagtggcaacaacccgggtggtttaaacttgagtactgactttcacagaactgtttgcataagtgtctccattctcattgggtgagttaatgtttgaagggttttcattcatgcagttactcctgctttacaccaccttactcgtggatcattagaaagaaataaacccacagagttagtgacaaaaactttcttggggcatggctacacaaagtacagaccagcagctccaacatcagctgggagtttgttacaagtgcagaatctcaaaccttgccccagacaaagaattaggactacattttaacaagattcccaggtgattcctagtcataggatggttattaataatattctatacagtcattctcctgcagggatttgagtctttagtcacagtgacacgtgccaggaagtcagtataatgttgcggaggtagactccaaaccagaggtgagttggaattctgtgcctgtcacttaccagctgtgtgaccgagcatatgacccaatttctctaatccttaactttctccttggtaaagaggccacagtaactcctcagaatcaagtccaatttgctggagaggtcagggaaagcctttggttttactcattttgaaccaggagcagaataggcagattatatttaaaattttaattattagtgtattcaagaggttgcttgaaaattaggtgtctgccttcttaagaaacagtgctgttcccaggtattgagaatggacattgcccaaaccaccaggaaggccacctgcagaagtgttcagctgctaaataaaggccaaagcatgctatgttaaggtcacacgtatagacagcatatagacatgtatagacacacgtatagagggcaaggctgcctttctgtgattgtccatatgccccttcaaggctgcctcccaagctcattttacactgagtgcttctgtatataggcaccatgtgtttccgtatacaggcttctacaggtaccaggtgaagcttaagcgaacacacaagatgggtctccatcacctatcaaatgactcaagagccaatggagaccctccccaaactaacatcccagtcacaacatgagccctactttacagaaagttatcaaagctgaattgcgtcggtcctcctgtgatgaatgaactgggtacatctgcaaagcttcactgtgatggacataactggtctcttgctcctcttttttctggtagctttattactttcctctgagtgaagaaagttattacaataacactgaacaccctcttcatgtgtgtttacacaatttatatcagttgtcctatgctctggtataaatgtgtattcttttagagtaaacaggaaaggaagcgtcttttcacagagcataaagacaatcaaaagacagccttcacgggggagtaagaatctgctcatgagtactggcagatgtctgaagagaaggcagctggctatgtagtactggtcacttgctctgttgcccagaccttgtggccttcatgctcggagtctctgcagccagtggataagcactcttccagtgggacacagcgtttggtgactgagatactgtttcctgtgacttccattgtgtgctgagtgtagcagtatctggtctct

SEQ ID NO: 8715 - DNA, 430 bp, Homo sapiens
ttcttggaatgaaaacaaacgtttatggtatggaacttgggctgtactgacagaaggctttgatgagtctcggttagactcaaaatggctacaatgaagcaacatttattcctcatggtaagtggcaatgcttggctgtgatgacctccaagagtgttgtgtctcacatgtgtaattactgtcaggccaatgactcatgcaggtctgtggaccatcgagatccccatggatcgctattaacacatggagccactgagccactataacatgagccctaaccacaaccacaagcaggacactatcactgacatacagcgtgggtgcccatttgtctgatttataggtgacgtcgtggcaaatgtggcatcagtttcatttcggggcagtggcaagttacagatatttccttcacaacaagaagtgcagacct

SEQ ID NO: 8716 - DNA, 2677 bp, Homo sapiens
tttttcaagcttgctttcaatgtctatcactttactaagaaaaacataataaattcattgtatagataaaaatgacatgtacactattccaatatctgtttcctgttgaagaaaccatcaagagaaaatcttttctggttcatcatcattaacacaacccccaaaatagaatacgattttaaaatagttaatagggtggtatatatatatacatacacatacacacataatttttatatttcctgatttaacaaagacatgctcttgggaagctgtagaccttattgaaaagtctggtagcctttccttcttttattttctgcagtacttaaacagcctgtatgaatcatttggcatgggtgaattgtcttgtatcttctcatgcatgtattcttgtctacacaactagaaagcgagcctctggaaggaagttccctgtggtgctaagcccagtgccttgtacataacctgggtgcattaatcattgattgacatgtgcatttgcagggaggagcctggtaagatacactcaaaacctttattcattgatttacaaactgtacaatatttacaaagtttaggcattaatcccatattgacatgaatgctgtggagagtctaaaaataaatatgtggcacatagcttaatatacacatcatggctctttacacttaagccattaccaatagtgagatgtaatggagaatttaatgtggtagaaaagtcagagtggctgaccagtcccggaccttccatgtgaatgactcttccttggctccttgaggctggggatagtgagcaaataactttctttcaagagaattaaacactgccattctgacaggcacatgggacgcatgcagcaacatctatgcagagtctgcaagcactccctgggtggtggttgaatctgcaccactgtggacctgatccctgtacaccagccagggaggctttggtgtggtcactttcttgtttcttattcaatcacatgcagtacttggaagatgtcagtggagtgtaatcatgcacaaaaatggtacttgtaggtatgtacaacatcaaactttcattgtcttatagcatctttagatgcaacatcaactatctcctcttttagcaagagggatgaatgaggaagccaaacccctactccccaaagaaaaaacatcacctggggacacatgcaaatagcatcctgcaacagcagggtgagataaactccacatgataagatggatgaattcctatgaagtcaggcctgaaagtcttcctagggggataatcccacctttctttcctcttcaatcccacatcatcccacataacctaaatctgaaggaaacagcttcacaacattgcgtttgagctttggtaccttcatttgggaagtgtaaatgctagtaacattctttataggattcttgcagggattaatcctaacttatgtaaagtgcttagcatagtgcctggcacatacgaggtgcttaataaatgtcttgctttctctccctctactttcccaccccaattaaaagcaacatactgataagcctaacaaactctgaattaaggccatttgatgcaatttagattattctgtatcagagttactgctgtcagttcatatttagtccctgagggagtctcattttatgagccagagacatttttctatggagggcagatggaccctgacaacactgtcctctttattagccatggttctaccaagtttcacaaaaacacgtctgaaaaccctgcacacaaacttagaccagtgatggtcaccacctgaataattccaggacaccatcactgaggaaaccatggaaaaatccttgagacaaacatattgctcttgcctacatgttaacttttttcaacactggtgcaagtattatagataactttcaataaacatatattaaaagctctaccactgttgaaaaatatgtattctaatttgatcactttgttcagaataatgaattttttagaatatattttagtttctagttatgccttacaaaaataaatactgtttaaattatttacaaggaagaagaaaaattgtaacttggggtacaaaaaatacaagaaggatgacaaaaattttaccatctacttcaaaagcaatatctaaaagaaagaaaaacttcccattgagtctccttgttagtcttgcaatcacctcactggtctactttctcctcatcatcgcatattatgccttgcttccccatcattcgaaagacaatttaatgcagaatcttctccataaagtcactggggatttggaagtgggagctctttggcagtatgaactgcagatggagtaagaagctggctgagccacttagtcggccctcagaatgaactaggactaatctccacacatttttcctttcattctgaaatcctctgtctagattatctatggctgaatagaaccccatatctggggaaaacaactccatcctggtttggggctctggacacaattgactcaggtggaatctaggatctcatgaagcataattaggtgccaagtcaaggagaaggctgatctcaccaattatatgaagggataacagccactttatggacagtggctccattaagttgaggaaaatcctcctccaggcacccccacaaatataacaaacttttatg

SEQ ID NO: 8717 - DNA, 2677 bp, Homo sapiens
tttttcaagcttgctttcaatgtctatcactttactaagaaaaatataataaattcattgtatagataaaaatgacatgtacactattccaatatctgtttcctgttgaagaaaccatcaagagaaaatcttttctggttcatcatcattaacacaacccccaaaatagaatacgattttaaaatagttaatagggtggtatatatatatacatacacatacacacataatttttatatttcctgatttaacaaagacatgctcttgggaagctgtagaccttattgaaaagtctggtagcctttccttcttttattttctgcagtacttaaacagcctgtatgaatcatttggcatgggtgaattgtcttgtatcttctcatgcatgtattcttgtctacacaactagaaagcaagcctctggaaggaagttccctgtggtgctaagcccagtgccttgtacataacctgggtgcattaatcattgattgacatgtgcatttgcagggaggagcctggtaagatacactcaaaacctttattcattgatttacaaactgtacaatatttacaaagtttaggcattaatcccatattgacatgaatgctgtggagagtctaaaaataaatatgtggcacatagcttaatatacacatcatggctctttacacttaagccattaccaatattgagatgtaatggagaatttaatgtggtagaaaagtcagagtggctgaccagtcccggaccttccatgtgaatgactcttccttggctccttgaggctggggatagtgagcaaataactttctttcaagagaattaaacactgccattctgacaggcacatgggacacatgcagcaacatctatgcagagtctgcaagcactccctgggtggtggttgaatctgcaccactgtggacctgatccctctacaccagccagggaggctttggtgtggtcactttcttgtttcttattcaatcacatgcagtacttggaagatgtcagtggagtgtaatcatgcacaaaaatggtacttgtaggtatgtacaacatcaaactttcattgtcttatagcatctttagatgcaacatcaactatctcctcttttagcaagagggatgaatgaggaagccaaacccctactccccaaagaaaaaacatcacctggggacacatgcaaatagcatcctgcaacagcagggtgagataaactccacatgataagatggatgaattcctatgaagtcaggcctgaaagtcttcctagggggataatcccacctttctttcctcttcaatcccacatcatcccacataacctaaatctgaaggaaacagcttcacaacattgcgtttgagctttggtaccttcatttgggaagtgtaaatgctagtaacattctttataggattcttgcagggattaatcctaacttatgtaaagtgcttagcatagtgcctggcacatacgaggtgcttaataaatgtcttgctttctctccctctactttcccaccccaattaaaagcaacatactgataagcctaacaaactctgaattaaggccatttgatgcaatttagattattctgtatcagagttactgctgtcagttcatatttagtccctgagggagtctcattttatgagccagagacatttttctatggagggcagatggaccctgacaacactgtcctctttattagccatggttctaccaagtttcacaaaaacacatctgaaaaccctgcacacaaacttagaccagtgatggtcaccacctgaataattccaggacaccatcactgaggaaaccatggaaaaatccttgagacaaacatattgctcttgcctacatgttaacttttttcaacactggtgcaagtattatagataactttcaataaacatatattaaaagctctaccactgttgaaaaatatgtattctaatttgatcactttgttcagaataatgaattttttagaatatattttagtttctagttatgccttacaaaaataaatactgtttaaattatttacaaggaagaagaaaaattgtaacttggggtacaaaaaatacaagaaggatgacaaaaattttaccatctacttcaaaagcaatatctaaaagaaagaaaaacttcccattgagtctccttgttagtcttgcaatcacctcactggtctactttctcctcatcatcgcatattatgccttgcttccccatcattcgaaagacaatttaatgcagaatcttctccataaagtcactggggatttggaagtgggagctctttggcagtatgaactgcagatggagtaagaagctggctgagccacttagtcggccctcagaatgaactaggactaatctccacacatttttcctttcattctgaaatcctctgtctagattatctatggctgaatagaaccccatatctggggaaaacaactccatcctggtttggggctctggacacaattgactcaggtggaatctaggatctcatgaagcataattaggtgccaagtcaaggagaaggctgatctcaccaattatatgaagggataacagccactttatggacagtggctccattaagttgaggaaaatcctcctccaggcacccccacaaatataacaaacttttatg

SEQ ID NO: 8718 - DNA, 4045 bp, Homo sapiens
ccctggctggaggatattttatggactataaattcctaaacaattataataacttagttatttatcctatccatggatcacctggaagtttacaatgtgatttaaaatgcattctatcattccaccgacctgcagtgaattttgttgtcattattactccagggatacctaaaggggaagtttgtttataattcgtacccactccttgtagaaaggattcaagacagccgatgatgaaaacacccatgcttgcaagtgaaggttctgcctgtcacttctcgcagaggctgcagaaaaggcccaggaggctgttgatgacatgaacgaccaccaggagaagctggagcaggctgatgcacagaagggcggagaagagggacacgtgccagacaacagctgcagagggctccaggcagacggagttccagagcgaacggtcatacagataattcctatcccaaaaaataaggagaccaggggtcaggcgataagtaaggaaagccaaacaggcaaccccagtagaaaactggggtctcccctgaccgggtcatgggactgggctcatgagggtgaccgttactgctccatttgcaattttctgagtatcagaggagcaagatgctaggatgtgtgacccaaaggagcttgtagttcgtctgtgtgtctttttgtctctctctctctctctgtctgaaaagaccaagcccaagcctccacccatttacctactatgcaggtctttgaatgggtaaccatatttccaagcttgtgtctgattgaaggatgaaacatcaaacatgcaaaaaggaccatctttcagagcaactccagaagtgacaaagcaaatcagggctccaagtaaagccaggccacctgacaacagagcagtaagcacctgcggagggaggagaaacactgagctaagacggggtcgcagctggggagcctgcggagggaggagaaacgctgagctaagacggggtcgcagctggggagtctgtggggcggtctgcacaggtctgacttctctggtctcagtgttcttccgtcctgtcatgggggagaattctgtccatggcaccccctttgaagcataacccatggtggggaggccgtgaggggtttctaggagagaaaggaccaagaagcagaatcgcaggccccggatctccctgaccgtgagttcgcctgagctgctcagcagcttggcatcacaaaccttttgcacattacagccattcagcctctgagctaaagaagaagctaccacaggcccaccactgactcttctaaggaaaagctgcattttcaaaagttccaggttcccaactctgattcttctctatttcaaatcaaggataaaaaaaaggaagggagggaaggaaggaaagaaagaagcaggaaagaagggaaggagagaagtgggagggagggaaagaagggagagaaacagcgagagagaagctgcagccaagctctgaaatgactccacttctgtcgctgtgtttctccagctgagagctttcttggccatcagtctgtgctcccactgccctcccagaaaataactgggtttccttccttgacaggtttctagcctgcttctacattggcttctttctcgttccttccttccttcccttccttccttctttctctctctctctttctttttgagacagagtctcactctgtcgcccaggctggagtgcagtggcacgatctcagctcactgcaacctctgcctctgagttcaagcgattctcctgcctcagcctcccaagtagctgggactacaagcatgcgccaccacacccagctaatttttgtatttttagtagaaatggggtttcactgtgttggtcatgccggtctcaatctcctgaccttgtgatccacctgcttcagcctcccaaagtgctgggattacaggcatgagccaccgtgcccggcccatattggattctttcttagggttctagatttttttctccctcccccaaaaatgcctattttaaaaatgtgaataacacctacatagcgtttttctgcagagtcatggagtcattctcccactgaggtcaagctggtttggagttggggagggatcagacaaaggtgcatagtaagttttgactctgagttaaaggagtcaagatgaatcagtaagcctagggcagtggttcccaaaatggggtccctgcccagccgcatcacatcacctgagaacctgttagaaatgcaaaacttccccgccatcctgaatcagaaactctggggagggagcccagcaatccgtgttccggcaaaagccctccaggtgattctcatgcacattcaagtgtcagaactacgtgccacggggaaaaccagaatgagaacagacagtgaatgaaatgtgcaagtgtttatttatttatctatgtacttatttatttatttattttgaaacggagtctcgctctgtcgcccaggctggagtgcagtggcgccatctcggctcactgcaagctccgcctcccgggttcaagagattttcctgcctcagcctcctgagttgctgggattacaggcgcccaccaccacgcccagctaatttttgtatttttggtagagacggggtttcaccatgttggccaggctggtctcaaactcctgacctcaggtgatccgcccatcttggcctcccaaagtgctgggattacaggcgtgagccaccgcgcctggcctatatttgattttttaacatgtaactgagtcagtgggcttcccaacatgtgggctgcagatatcagagcaggctgtggagttaccataaggccacagattcatgtctgagaacgagtgtgtgtgtgtgtgtgtgtgtgtgtttgttacacacacatatactgagatctttcaagtttatacagttgctgctgtaattaataaggtagaaatttattctgggcctcagtttatctgtaaaatggaggggttagattagaatctagtgattagatgatctctggaaaactttcctgttctaagaaaatattagttaaaataactaggaaaatttccatcaatgacacatgattacagtgtcataactcatgtccatattgtccaacaccctaagagagtaacagtttctcacactggtacagacgtctgggtcctcacactggtacagacgtctgggcttcactaagcactactcccttgacttgatcagctcccattttacagatgaaagcctgaaactggaaagatgaagcaacttgcccaagaacttagcgttactgagggtcacagtgaggacctgacttcaggccccaagaccaaaattgcctctttaccgccctgcctctagagtaatagaggtggagacattctgggtgttagaagagtggaatctggtgcttacgcttcgacagagcccactcttactgaagcagccgtatctccagcccatcaaggagatgaggatagctgcagtgagtacctgcaggagagagaagaatgttgagatggggaaatcgactttgccggctgtttctaggtgctgcccacagctgttagagtggctggcagctcacatgaacgcagtcctgttgactctgactctggggacccacatttgtatgacgagcctgatctaacgctgtggatgttaactttcacacccgacctgcctggtcccaagctaggcttcctgtctcttagagcttctacagacccaagatcagcttgttagaataaacttttctgcaaggaatcaaaacactcttcccatgccaccttcctgctccccgccggggtctctttgagagttcacgttcagggaaccccggacacttaccatgaggcctcctccccagagcccagttcccagcatggcatgcctgccaaggaggcccctcaacaggtaggtgacatcccagttaggaaggaggagtgccacgttggccccagcagcaaacagggctgcagtcccaaggctcagtcccaggatacgggagcaagtccgtgagcttgcctgcgtgcagggagaggacaccat

SEQ ID NO: 8719 - DNA, 4045 bp, Homo sapiens; identical to SEQ ID NO: 8718

SEQ ID NO: 8720 - DNA, 165 bp, Homo sapiens
cgtctctactaaaaatacaaaaattagctgggtgtggtggcacatgcctgtaatcccagctactcaggaggctgaggcaggagaatcacttgaacctgggaggtggaggttgcagtgagccgagatcacgccactgcactccagcctgggtgacagagcgagact

SEQ ID NO: 8721 - DNA, 380 bp, Homo sapiens
ggaacagatagaaagggagtcgcagcagctctgctgtggggggatggggaagggaactccagcagcatatcatgggtgagggaaacagactacagaaaccgccaccttccagggtcagaccaatgagagccaagcaccctgcttaaaaactctgctccttagaatcttccccagtgactaggatttaattgtttccttttctgctaacccctgttcacacatacatagtttgcattccatcatattttgtttatgcctctattacagccagtgattatttctgacaaaaagaaatgtttaaaggtgtcttcatgatgtccattgtctccacttctattcaacgttgtactggtcctggccagtgcaatacgaaaataaaa

SEQ ID NO: 8722 - DNA, 381 bp, Homo sapiens
ggaacagatagaaagggagtcgcagcagctctgctgtggggggatggggaagggaactccagcagcatatcatgggtgagggaaacagactacagaaaccgccaccttccagggtcagaccaatgagagccaagcaacctgcttaaaaactctgctccttaggaatcttccccagtgactaggatttaattgtttccttttctgctaacccctgttcacacatacatagtttgcattccatcatattttgtttatgcctctattacagccagtgattatttctgacaaaaagaaatgtttaaaggtgtcttcatgatgtccattgtctccacttctattcaacgttgtactggtcctggccagtgcaatacgaaaataaaa

SEQ ID NO: 8723 - DNA, 486 bp, Homo sapiens
  SITE (11): n equals a,t,g, or c
  SITE (12): n equals a,t,g, or c
  SITE (53): n equals a,t,g, or c
gggctcacggnnagctagcaccccatcactcagcttctggggaggcctcaganagcttttactcatggcagcaggtgaagagggagcaggcgagtcacatagtgagagcaggagcaggcgagagagaggccagaggtgccacacgcttctaaatgaccagatctcgcgggaacccactatcacaaagacagctctgattcttgagggatccgcctcatgatccacacaccttctgccaggccccacctctagcactggggatcacaattcaacatgagatttgggtgaggacagatatccaaactgtgtggacagaggtgatgctcctctacttgttgaactcttgaacactagtgaagagaatgctggtgtattagtctgccaggctgctgttgcagaataccatgaactgggcacttaagcaactgaaatagattttctcacagtgctggaggctagaagtccaagatccaggtgccagcaggt

SEQ ID NO: 8724 - DNA, 994 bp, Homo sapiens
cctgtgccatggggccatctcggcttgtccgtggccctcggccccagggcatgcgttccccctaccgcaggccaggtatgggctggcccaggccccgatttcccaggatgttcaagtgtagccgcagaagatatcaacagggtctccgaggtcgaactgccagcagtgcagccatcaatcctgccaccagggccatgggtatcaacaacacccacactgacaccaccatagtgtggatcttcccacctcaaggttagccagggggcctgtgagccagggtggggttttaaaaaacagagccactaggctgggtgcggtggctcatgcctgtaatcccggcactttgggaggccaaggcgggcagatcacaaggtcaggagatcgagaccatcctggctaacacggtgaaatcccatctctactaaaaatacaaaaaaaaattagccgggcgtggtggcacacgcctttagtcccagctacttgggaggctgaggcaggagaattgcttgaacccgggaggcagaggttgcagtgagccaagatcgcgccactgcactccagcctgggtgacagagctagactctgtctcaagaaaaaaaaaaaaaaaccagagccagtgaagatttccctacctggttctgtttaggcacgccaaaggatgatctctgtgaaatagcacccctacatatatgggggactcctgatggcaggcaccccaaagtgctgacagccttaatggaggatggattggctggaagcagagggtttggggaggggctgaatccaagaggcagggaacttccagaactgcttccttcctcaaactcttccctctccttcctctcctcagttctcagacatctcaggcaacctgggatttttctgatcctctagaagtgcccagaagctagcccagaagcttggtttgccctggacctgcatctcctaggggccgtgtgggtggtgaacaacaaatacagtcattctgctcaaa

SEQ ID NO: 8725 - DNA, 995 bp, Homo sapiens
cctgtgcccatggggccatctcggcttgtccgtggccctcggccccagggcatgcgttccccctaccgcaggccaggtatgggctggcccaggccccgatttcccaggatgttcaagtgtagccgcagaagatatcaacagggtctccgaggtcgaactgccagcagtgcagccatcaatcctgccaccagggccatgggtatcaacaacacccacactgacaccaccatagtgtggatcttcccacctcaaggttagccagggggcctgtgagccagggtggggttttaaaaaacagagccactaggctgggtgcggtggctcatgcctgtaatcccggcactttgggaggccaaggcgggcagatcacaaggtcaggagatcgagaccatcctggctaacacggtgaaatcccatctctactaaaaatacaaaaaaaaattagccgggcgtggtggcacacgcctttagtcccagctacttgggaggctgaggcaggagaattgcttgaacccgggaggcagaggttgcagtgagccaagatcgcgccactgcactccagcctgggtgacagagctagactctgtctcaagaaaaaaaaaaaaaaaccagagccagtgaagatttccctacctggttctgtttaggcacgccaaaggatgatctctgtgaaatagcacccctacatatatgggggactcctgatggcaggcaccccaaagtgctgacagccttaatggaggatggattggctggaagcagagggtttggggaggggctgaatccaagaggcagggaacttccagaactgcttccttcctcaaactcttccctctccttcctctcctcagttctcagacatctcaggcaacctgggatttttctgatcctctagaagtgcccagaagctagcccagaagcttggtttgccctggacctgcatctcctaggggccgtgtgggtggtgaacaacaaatacagtcattctgctcaaa

SEQ ID NO: 8726 - DNA, 6396 bp, Homo sapiens
gctacggagagagctcgctggaggcccacatctggcaagaggaggaggaggtggtgcaggccaacagaaggtgtcaggacatggaatacacgtaagggacgactatgtgtgacgtgtggggcctgctgcattcacactccaggccttccagaacagattgcttctctgtcctgttctgaaaggctgtgagcatgaggtctccaaaaactctcctcccccatgctgtgccatggagagaaggaaaaggttccaacctaagcacgtggttccactcagcaatggatctggtgccggagttctctgggggaaattgcgtgtcacctgccggttttaagatgcaggctgagtctagtgacagaagaatttagatgtctgtgttatttcttggtgtctatctctatgacattatgagctgaaagggggaaacattatatcccaaagattcagagtttttgagccagaatttatatattccagtccaaaataaagaacatatttagctaatgcactcttctgatgggctacacaaaatttccagcagactttttgacataataaaactagcctgtcccccttcactacctaagggcttgtggaaccctgggagccctaggcctcttattttgcagatgtgaaaatagggctgagtagttgagccattgatagataggctcagtgagttactatcaaagttgtgaaaataactcagcattcttccagaaaaatcatcttctaccagagaacctgttcatcttggttcttttttcttagaaaatagagaaattgactttagctgaaagctcaccctgtttgaggctttagagtttttatgcttccctatcccctacctacccccggcccccaccgccaatgctagaccctctaaatatggtccccagccgacttcggtccaggaatgtggccacggtcattctaactgtacctcgctgaagtcccagtctcccaaggtgccagagaaggtgtactcttttgacatatgacaaaagacctgtcttaacaatttggagattatcaacatttgaagactcgtactgtgcttcatcctgtatccctaaattacaattaaagtctttgggacagcctgagataaatgtttcaagtttttctagccaagtggctttttatggagactgttttgttttgttttacagtattaaaaatctccatgccaaaatcatagagaaagatgctatgattaaggtcctgcagcagcgatctcgtaaagatgccgggaagacagactcctccagcctacgtcctgcccgctccgttccatccatagcagcagctactgggacacactctcgccagacctctcttaccagcagccagctggctgaggaaaagaaggaagagaagacctggaaggggagcataggtgagccccacacctctgtcagaccatgattggaaaagcaagaccagacagcttctctgccactcatgggacacggaaatgtccctgaatagttcctggtctcagtttactcatctgtgaagtggggagggaaatcagtcatacttcagttatagatatgtggaagcattgtgtaaattctaaagactgcaccactggagtagctcttagccatgggttgactcagatcagaattatctattattgttgtaagttgaggtgacccttataacacaaaaggctctcatagaaaagcctagagacatcacgcctctgaacttggctctgctctagaccagttgtatgacggctccacctctgcttccacgtctggaaagggaggacagtgtctgcctgctttaccccatggggcgtgggagggaataatgggataatggggggaggagagtgtctgcctgctttaccccatggggcgtgggagggaagaatgggataatggtgggaggagagtgtctgcctgctttaccccatggggcgtgggagggaagaatgggataatggggggaggacagtgtctgcctgctttaccccatggggcgtgggagggaagaatgggataatggggagagcacattggaagaagtgctctctcgcataaggtaggggtggtaagtttttgctgtattgttgttgcatgggcagaattccctaagtgtggtcttagccaggagtaggtttcttgggggcaggcaggcttgttggctggctgggctagccaagctggaggggaagcaggcagcgtgctcagacacaggtcctccacatccttcccctgcactctggcctctccaggggtctggcccttctttgatgcatttccccacatcagatcgtgtttttgtttctctgtgcagctgagagccagtggtcctcagcataagaccccaaaggagactggctgctctgggccagaggggataagagcttccatatgaacccgacagagttggggggatcaaaggctcccaaccagaatctgtgtttgaagtccctccactggtggcttcagcagcccctgcccccaaaggaaatgcacttcaaagaagacgtgtgtggacagcagctgagatcatcaaagactgtcccaaggacatttagctcccaccccagctagagagctgggaggcagtgctgagccaggcctggtcaaggagtttgaaaatttgctcagctctggtagaaacctccctgggagtcccctgtttgtgacgtgcagccaggcaggcatctctggtgtctgtgcccgtatgccccaggacctggcatgtctaaaccaggcctgggagccggaggacttgtttgaaggaagagctgctgtgttccctgcactgatattcctcctcattgttgtcattggtgtccacgtgtcacaaacacagggactctccaaggggctgaggcaggttcatgggtgactgcacagttccccacatgttgtcaccattgcttgcctgataggctctggaaggaggtggaggtgacagcatataccttcccaattgcccagggtatcccaggagctatggctggctagtgacttattcagcctgtcactccctacgaggacatcctgcagactctggagtttccacaggctgggcgatgaagtggaaagaacataggttggactccaagtcaggcacagttgggtttgagtcccatttctgctgcttcttagctgtgagatgttagtttttgtgagcttccatttccttctccgtaagacaggataaggcctgtctcgcaggaatgacatgcagtatgaagtgagatgatgtgggaagcgcaggtgaaggcctttgctgctcagcgtggtctgtggaccagtggcaccagcaccatctgggagcttcttagaaatacagaatcccaggccctgcctgctggatcaggtcttccttttaacggtatagccaagtcattgttatgcacattgcattttgaaaagcactgctctcgacaaactgaactgccctgagttctaaatgggcaccttaaaacagctctggcgaggatactttatgaattgctggctatctaaccagataagagaacaaatacttgattgcgcttaccggccttttctataggctagcattctagggtgctggcactttcccgcgtgtgtgctgtatttaaaaataaaaagttatcctcccacccagctttccaggaaggctctgaggaaaatggacacctctgcacaccacgcctcccatttccatagccagcatcccctcttccccaccccagcctcactactcttgaggaagggggtaaggagagggctaagtggcctttcctaggaggctggctggctttctgcttctgggaggctacagttccaccgcagaaatgtgcaggtagcatgtttatctttgaatccaagcctgtgggggaccatcatccattacaaggagtggggtggaattgtgaactattcagaagagcagcaagccaatgggaacatgtctaggaccggggaagccttgtagtttttcttaagcacactgccacgcttcaggccagcccttctgggccacgttggtaacagcaagcatggtctctggaaagccttgtgggaacctccctacccctcctgctggcaattaggcacttctctgttcgtccataccaccctgtgaataatttatttgtatcctacagtttatatattaagttataatcagtttacttgacaactacttctccactccaaaaaaaaaaaacaaaaaaaacacacaaaaaaaacctacaattttttaggaaggggactaggtcttccattttttattctctcagtgtttgttattttatcagccttgtaataagtgtttattaaatgcttggggaatgaatcaatgaatgaatgaagcaatcatcaatcaacaaggaacagatctgcaagactagatttaaaaaaaaaaaaaggaaaaaaagaatgttgaaaaatctgttctctgccctcaggattgctgctggggaaggagcaccatgagcatgcctctgccccactgctgccacccccacccacctcagcactgtcctccatagcctccactacggcagccagcagtgcccacgccaagacaggcagcaaggacagcagcacacagactgacaagagtgccgagctcttctggcccagcatggcctcccttcccagccgcggccggctgagcacgacccctgctcacagccccgtcctgaaacacccagcggccaaagggaccgcagagaaactgggtatgtgggctaccccaccttgatgcccctgaaaactgtggaactgtctggcctaagagaatcttttgttgagctagagaggaagcaggggcacccatcagctcttactctatggggatgctattctaatgcacttaggatatgtgtgccctttcttattacgggaataaatatgcatatagacacatctagtttattactatttgaaatgagtgcacggcttgagactaccctggcaatgcatactttttaactaacctttccccggatggagtgacaacagaccctctaaggggctgaatgccctctggtatgtttgggagccagaattaggcaccaggtacatcaaaggcacaagttcactgttgccttcagggctctaacttaccagggattctggcctcagtggaggacattgtgatggaaggagaaggtagattgacctgcagagtcggttaacgtgtggcacagcacttgggccaggactaacgagctgtttaaaatatttacgggaagacaacttgggagaggtgatctttgcagtgagtccctaagtgtcctgggtaagaatagacctggcctcttaaggcactcctcttaagcaaaggagtaccatggccatggtcagtgggatcccacaaatgttcttaaatgggtaaggctttaagtagccagagagtacccagcctaccattggcttctccacatcctaaaacctgagactaatcatggtcatggggacctcccttttcaggaattcttttgaggaggtgcaggctctgtgggccctaagttaactgtttcctccaagggggttgtttatttcatttttcaaagtagacaagtaaatacaatgttgtcactttttaaagatgtgattcttttccaagtaagccagagaacctgtcaaaagtgcctagctcagaatatgcacctgatagttttgagtagagggtgtgaggggctcctgtacagagtcccactgtcatcctcaccttctgaatcctctcccttcaccatcctggtttgtatttgtgtctgaatcctggcccagtcattctgcatgttcccactgtgggctggatcatctcacatgccctgtggtgagaatcctgggtgtgcagtggtatcggacgtgggtccattttagagaacctggaaagcctatgcccctcctgaggaatgggcagctgatgtttcccctctatttggcagagaactctcctggccatgggaagtcgcctgaccacagaggccgggtcagcagcttgctgcacaagcccgagttccctgatggagagatgatggaagtcctcatctaactgccatccctgtggaatttcagtacagaacactgacaaacaaggaaagcggcagagaaagaagaaagacctagaaggttgtagatgggaaatcaggaatgatttgaactgataaagatttcagactcataagaacacattttataaatgttaaacacaaaaactacatgactgaagatagaagagaatgcgatggattttattacacatggtggaagagagaagaggcgtgtaggtttgcaaacaaagttaagaaataggaaactgaatttttcattgtacagaaaatgtatctcttggggagggcctgtgtacccccattctctgattataaacagataaacccaaatgtggatcatccttggaata

SEQ ID NO: 8727 - DNA, 20987 bp, Homo sapiens
  SITE (11074): n equals a,t,g, or c
gaggaccatcggagacacatcgagatcctggaccaggctttgagcaacgcccaggccagggtcatcaagctggaagaggaggtgagaccaggctgtggggatttggtggggaagagggcaagcagagcccagagggcttccactttcttttcctaacccacctactttaaccagagccaattccaaggagttgagacaggggagggatatgggaaacttctcaaataaaagtgaataaaaacagagtctatgcattctagagccaggcaaagtatgaaaagcacatgggaatcccatcagcaaagcactcacactcggtgtgaagcccagcctacagcccatcggttgacacgtgtcctactcagtcatcatgcattgcatttagtagtttctgatgaaatcaacccgttagcttaagtgttatgaggtagccttttccttaaagcctgactgaggaattaaaatgaccatttccgaggtccaagccaaggaatccaggctatagatgaagaagaagaaaaggagcagaggcctagccaggcagccaggggccagctgcctcacaccttccagcaccctgtggtggtggcggcaggtgcctctgtgttacacaggcttacctgagcaggatccgttccaggaagtagaagcccaaagtctataagagtcttaactgagaaagtctgcctgaagtgcttagcttgttgctgggcacaaaggaaacagtattgttactaacccaactgttgttgaatttaaaaaaactgtctcttcagaaaacctcccccgatgctaagtaacagggatgtttcatcagatttcaaacacaaggataaagcagctgaagaggaagatgatggagtaaacgagggtcttgcccattggaagcctttaaaaccccataagtcttgcatagaaactaccattttaatactagcataaggctccggggcaacagccttccatgttgccactaaggaacgtattaaatatgaaaacacttgccacagaaagtgacctcaaccccttaaagacaggagatctgttatgcctaagggaggctggggcttctcattattgtcatcactgaaatgacatctccatctccatgagtggagctaaggaaaatcatggtttttaaaatcttttagttttaatatttctattaaagtaaaaattagttgtgagcttcttgaagacaagttataacaaccaatatgggtcttttttttaaatcattatatttatgtgaaatctttggttggttgaatgtagcctctccagaatgtctcataggtctgcttccagcatcactcctttctaattagagtttcctttaagggtcttaattcagttcagatactgagagcctactgtaatttaccatgatgggtaagagtgaactctagagcagacagctgtaaatgagaatcctggctctatggcctgtcagctgtgtgaccttaagcaagtcacgtaaccttgaagacttttctcatctctaatggagataataaaggactttacctcctcttcctgttgttacttggaggattaaatgagatactacatataaagcacaatgcttggcatggtagtgttccaacagtgttggctgatgtaattactgttactaatcatcctcatcgggatatatgccttgctagaattaaggttgatacaaaggtgaaggagacagattcctgccttcaagcttcttgcaattgcttaaggatagtatttattcatttaacaaatacttattgggtgcctactaaatgctgagcgctattccaggcattgggtacgccctgttcactctgcccagtggagaccaaaataggcaaatctcttggtgcttatattctagtagctgcacattcagaaaagtatactcagtggaagatatggtaagtggtgtatgaatcacacacacaaaatattttgtcagatgaggctgcaggaaccttcacttagtaggtcttcagaagccagtggaattgagcaatcaaaatcacaaggaatgaaagggccagatgaaaatcaatcccaagaacaggtgtaaaaagtctaaagttgctctctcctccttgaaaggtcaaagcatctccattttattccagtggcttcagctaggacaggatataggtataactcacagcaatgctgcctgctgagtcagaaagctcacctagcagctaaatcactagcatgttccagcttgccagtgtcatcactgaacttaagattgaatacacccaggtgcggaatgacaggaaatagcatctggtgtcttctcacccaggaccaaatcaagttgatgcctaagcctgatttttggcactagccagttctcagaatgctgtcagtatgcccaggatttatgaacatgggccaaactcctaattggaagaaaacaaagtgtgagagtaagagttggaagttgttggtcataattctaaatccatagctgatgtgacatttccataaattattttaaccttaatttccatctcctcagttattgtgttgttgaatattcactgtgcacttcccatctcttcaaggccccaactacctatctataaaggactctgaaatctttaggacaaagttactccatagataactgtaataagaaaaattttttatttatgcacacatacataaatgggtacacatacatatataaatacatacctaatttctctattataaatgtaatttatgcttatagaaaacttgaaaaaatatagaaaagaataaagaattgccattctgtcatatagataagcatgcttaatgctaagtatttcattcctgcctttttttcatggatagacattgttatgataatgttgtatataatttttgattctggatttttcacttgacattatagaataagcatttcttcatgatgtcaaaaactctttttttaattctatctattttatgctatttttagttttactttaagttccaggatacaagtgcagaacgtgtagatttgttacataggtctacatgtgccatggtggtttgctgcacctaccaacccatcatccaggttttaagccccacatgtattagctatttgtcctaatcctctccctcccctcacccccggcccccaacttgccctggtatgttttgttcccctccctgtgcctatatgttctcattgttcagctcccacttacgagtgagaacatgtggtgtttagttttctgttcctgtgttagtttgctgagaatgatggcttccagcttcatccatgtccctacagaggacgtgatctcattcctttttatggctgcatagtattccatggtgtatatgtaccacattgtcttggacatttgggttgcttccatgtctttgctattgtaaatagtcctgcaataaacatacgtgcaaaaactctttatttacctcacttccaatgcctgaaaatgcagaaattattaagcaataaatgagtattgagctcaaagctgcacaaattaccaaaagcaggtaccccagtagagtcttcaatttcatacatcctagccattgtaggtataactggcagtctatgtgtaaatcttttctgttccagtgcacttgaaggataggagtagggcggtgggaggtacgtgcacctgtagtttaaataggatctccaggtaatctgaccccacctcctccaccccagctttgagaatcagtggtctaaattctgtgctcttttttactcttctccactcagttacgagagaagcaagcatatgttgagaaagttgagaagctgcagcaggccctgacccagctgcagtctgcatgtgagaagcgagaacagatggagcggagactgcggacttggctggagagagagctggatgcactgagaacccagcaggtaaggaactgggcatggactggtgaaagaattagatatgttcactcagcaaacgtatggatgttctaccatgggccagatcctgcaccttgctcccaggattcagagggaaacaagaactccctgtcctcagtgaacccatacaacaaccaggagagaaggcgagcagtccgctcactggagtgacagatgtcctcacagagagaaagtggtcgccagcttggggctggggagagcggaatgcagcattagatgacttcagagaggaagacatttgagctggacattgacagatgagtttttgggcattcaagggcaagaacatcataggtagagggagaatatggtaaaggacagggccctgaaacgacatagcacgtccagggtagcagggtgcaggtagctaggggaaagtgcccagtgcagtggctggtgaggagactaaggccacttgtggaggacatttggtcaagctgagatactgggctttttcttatagtcaacagagtaccaacaactgggaagtttttaagctggagagaaacatgatgcaagagatcagggagagagccctctgatgtcagaggaccatccagagggtggatgttaaagttgcagaggccagcctgaaggttgtcggtgcagcctagggtgtagtgacagtgagaacccatggaggagttgaagggaagagccaataagggggtgacattagtagcccatgatgatcagtgagttttcagaagtaaaggagaggaagggatgtaagaccatccctagaaaataatgttggccataattccctattcctgctgcctgtccttctctgctggtaacaactgagcatgtaactcagctatgagtaagcacagagtgaaaagcccagcctggggttcacctgcaccacggcaagcaggaagaagactggtcaaaggctcctggccccagatgagcctgtccaccatcacccagcatgatgagcagaggcctttatgtagctggtgaagggtgtgttctaaattgggataccagggaaatgcaaggcagggccccatggaattatctactggatagggcatagtggttgtggttgaaacacttgaaaacacttgagcgcatgcactcaggccagctcagccctctcacagggcaggcccatgcagttccctctgggtatgtgcatttggctggagaaggaggtgttagtgagattgcccagaaaagtaagaaacccacctccgcctcccactgtcttggcttggtggatagctcgtaagaaaaggcaggtctgtctgtggacttctaatactgataaactgtgccacatactttggcacagagttacaccgttcagctgttctctgtcactcagttgctgagatcttcgcttccccatctggggacaggggttctccctggttccaggtacagcactggcccacagtagacactgattagtctttctttggctaaccaaatgggcacatctcggttcttagagcacataaagaatgttccttcctggttaatatgccgtccacaccctaaagttagattacttctccttggctcttctgagtgctgtgaaaccagactcacctccgttatccttgttgtttatcaagaagaaataaaatgttagaattatttgaaaaatatcttaattgccacagaggatagttggctgtatgcacactcagacccatgcacgctcacccacacagtttcctcaggcaggcaaaaacaacattcctgctgtgcatgaaggctgctgacaggctgaggagtgccagtaggggacagaaatttcagaattgaggctctcccgggaaattactctgctttcattttggatttgtgttcgggagctgatggcagacccccagctgtgtatggctgacatgagaccgaagaggaggagacagtctctaaacagaattgtgatgctcagcatctctttaaaaataacattacagtttgttgttgttgttgttgttttaatgagagcattaatctgcctcctatgatatgaaatacattcagggattatgtccctgttgctcttgatactcattaaaaagataagtagaggttgagtatcccttatctgaaatgcttgggaccagaagtgttttagattttgtattttcaggtttaggatgctcaatcttattatttttttttcctgtaatatttctttattttctaatgttcccagtaagcatacattatcttataaccaaaaaaaggttaaaatgttattacaaaaaaatccactggaaacatcttgagttttttactggttccatgtggcagatactgtgtaaagggcaaagtgtatctaaactcatttttggggcctgtgggctggtctggggggcagctctgctggtctcaccagagatgactcggaatccacttgagaacatggggtcatctgaggaactcagcctgtccgggaaaggggatccagggcctctctgatcccctcctcctcattcaccctcacgcaactcatgaatatgcctgccagttcttgggcagcagcctcgggaaagacttctgccgtccacaccacaccctgttccttcatccctgtgtccaaggcagttatctgacagctttagaaagcatgctggggtcacactgtcacaaagctcctggtcatctccaccctcaacagaacaacagaccaaccgcatggactcaccacttcccatagggcatgattctgaagagacttttgagagcacagcttagagttcttgttgaatcaacagcccagacaagggctctgccctttgacttatgccgggacacagctgagcccatctacttggccccctctaacaacacagagcccttgagcagctccaattatttcaattatttcttctggacctttccagaagggctggtacgctgaggatgagcagagaggcatggaatcgtgtgttgattctgagcgtgggccccagggttaaaccagccacggttgaatcctgcctcccaccagaaaagtagcctagagtaagtcatctttctgagcctcaacttccttgtctataaagtgaggcaaataaattatacttacctcacacttgtaactacaaataaaatctgaacaaagtactttttggaatgccttgcacttagcaactgattaaaaacaaatcactctcactgctgttctcattgccatcattaccttcagaatcatttgaagttttagggcattcgtaggtaccctctcccaaattccacccttatcccggattttctagcctcattgaaaacaaggtcaacagaagtgtggcttattgaaggggggtggagagagaaagataggttgggacaataggactagcagaaagaaaagctcttaatcaacagttcctgttttataagtaattgcccctctaccatgggaggtcaaatagtacttcagcatcattagaaactgggagggaagtgaaagagaaaaaagataaaagagagaggggaatttgcatttttaagaactcacaattttatcacttttacaaagagctcaaattaattttcgtgtcttacttccacagtagtcctatgagaaagaagagagaaggttcttgaagaatgttctttgaaaggaaaatgaggcacagggaagttaaaggtcatgtagctaatgaggacattcctcccatgtgaacacactgagggtgaagacttaatctgtagtgttcactgttgcaaccctggtacatggtacatgctcagtcaatacttgtcgtctagatggctgaatgggcggcagtagctggcacacctgaccatcaatctgtttttctcggtagcacacttacccattagaccatgctagctctgtacccttgaatgttgacattcatgcatttatgtaaataactcttaatgacctgaattagggggggctatgaagagttgtcatgatctcacgtgaggttaagaggattctgcaaaaataagccagctgagatggtaacaaaagggatttagatagaaactgacaagcatagatggcagcttagtgaatatgggagacttttcttggaaagtttctaaaaataagggagcgtctcatctcgctggactggttcatttgttctcctgcctgaggctaggtgcctggccagatggagtcagtgccctttatgcacaggtcaggtgaggacaggtatgcccttctgctctgttcctacttataatgttggtcactggcaagataacacttcctagaataatttatatttgtagctttaaaaaactgaataaaaacaaaatttggtttacaaaaaacccatacacccatttcttttttcctctctgataggattagtttccgtcagtacagcttgaatgcccagctgttgctctgggtaattccccagtccttttcttaatctaggggattatgtggttctgggtaaagcattcatgtgcctctcaccttgcacccagctctgcatttaaaatttgcaaccactggaaaacaggaggggaatgggtaccccaggacatagactaactgggatgaaatcattctccctggagtactaaggagcctggtccacactctgactgggcccctaaccctgagactccaagataacttatctctgctgctgctctgaaggcagaactttctcagagcgccatcttcttctgtgtcatgctctttagaggaaatagtgtacctaattaaaggaaaaagattctgaagtatgaacatcctcagtttgtgagcaatccagaaaatggctttattttctcttattgacacagatgaaaaggccgaaaaatgagcttgccttatgctagaggtcttctgctttcatatgcattatctagtttgattctcattctcaggcctctgagtggggcaggtgtgaatacctcctttcccagcattgcagctagggaggatgcaatttggggcatctcccacttcctttgccttccatttcccccaccagccttagcggaaacaaacaactggaatcactttgtggaattctggagaaagtaccctagaccaggaggccaagacttaattcctattcttgcttttggtgtaattaactgcatgccattagacaagccacttcttgtcatgcaaagaccttgacctgtggagatagacccaggtttgaatcctgaccctactactgataagctgagagacattgcatcattaatttaatccatcagaaacttcatttctcatctgtaaaactgggataatattgtcgttttgcagagcgccatgagaattaactacaacagaggaatttggaggtgaagtagcatggtgtgtgaattgctgcaggatctggggaacctcatgtgttctgtatgggcagttgtgtagacagcattgatgtggttttgagcatcaagattttttttctactccttcagaaacatggaaatggccagccagccaacatgccggaatacaatgccccagccctcctggaacttgtgcgggagaaggaggagcggatcctggccctggaggccgacatgacaaagtgggagcagaagtacctggaggagagcaccatccgacactttgccatgaatgccgcagccactgcagcagctgagaggtgagaccagtggaactctggtggtcataaaagcacagttaaaaaaatcaaaacaaaacaaacaggctatccagagaggtccaaggcccatcctagggagtgaagtcagctaaaaattatttttaagtagttacagtgctagttggagagcaaagtggtataacatttctagaggatgatttggcaacatatatctttcctttgagtccacaattcaagttctagatatttatcttaaaaaaatcatagacatgccagaaggtgaatatctaaagagttaatctcagtgttgttgaaaatatcaatacatttaacatagcctagatttcaacaagaggaggttcatttaataatttaaagtacataacacagtggaatactgtgcaatcaccaagaatgatgttgtgaaagtatatttaaggcactttttaatgctgcgtttatatcatgggccaaactagaagaatagataatccccatagcagccctgagggcaggtatattattatcatcttcattttacaagcaaagaaaatgaggcttagagaggtacagtggttgattcctaatcacaatggtagtgagtgatggggctgtgtgtcaaatggagatctgcctggcttgaaaacatttcatttagtttgaaattcttttctgctgctgtcagtttttacctctgttgccttaccttctttttgtaggtgtatggcttattctgtctttataaactagctcaaagtgtgcagtaattcacaaaaaaagctcccaaatgttctgttaaaacatactgttgtcagagtgagcaaggcactcttgacctttggccactggatctcagctgcatgcaaagtcgctgcacacacgtggggtggctgtgcaggggacccatccagcccctcactgcctcccacccagtttgctttctgcccataagttatattggacatttaacttaaagttgtttggaattcacaattcaggataaatttatgtggaaaggatcctcaaatttcaaaggagcacccagaaaatgggacttcttaataaataagggctatggtactatttggatgacaggacatgaaccgagagaggagtaaaagccacattgccttgggatgggttactatatttttaatgactacgagaaggcctgttggggtgcagaggggatactcttgaagttattcacggactctcaggctcattatcgacgtaggggagaatccccagtggtatgctcagatgttagcaccaggaattggagaaagcattgccaccattcgggcgttggtgtctgcagtgggtgccacagcacacttgcaccgagaaagacctacagacccatgtggaaaatgaccgtttgggaatcatttttctgtgcttccacgttgtttatgtgggtctacactttgatgggaagcagcccgcagtatccatgagagtgaggctttgggagtggggatagacacttgagatggtgcggtgaagttccggggtcctgggttgagagttggagggaagtggcgggcggcanttcagtccctgcagtatatggatgggcacagggaagccttttgaaacattggttgatttttacataattgaaatggttttttttttcagctttttgttttctaagctaataactaaatttcctctctattccgaggaagagaacaggtcatcataaagtcacagagggacctggtcttcttggacatatgtggtctagtgcactgctgtccacggttgccctgggagtttccttcctccctgcaattttaatggaaagaatgctttaatggaaagaacgttgcacagggaggcaggacacctgcgctcagggcttctccctcccttcctgactgtgcgtgtgtgatctgggacaagcccttctgagtgtcgcttacatcacatgtgaaatataaatgatgagagcagggaacctgaccacattgctttggctgaggacactaaagccccagtagcagtgtaaatgtgtgaccttggaggaatgacacaggggcttccacgtgtcattgttgtttcagcgtctgtgggtttatcacgttagatgtctgtttgggatcctgggccctgagggtatgaatgggactagaaagtaaaattcagaagtcgggaaatgaatgagtccaaagcatacaccctgtagtgggcagaggagggagggtagggagcgaggagaaccagacccagtcacaatcacccactcacaggattctaggcccagccttgttcttatcctccgtgcaaggggaaatgactcttaccccagagaacaggagttctgtgggatttacccagtcccactgttccccttctctgccttatttggagtcttggatgggcagagggagcccctttccatccccgtcacccctccttctttgcttttacacatatttattgagcatctaataattctgtgagcaactaccctccccattacagactaccccttctgggtgggggaataggttcagagaacctcagatagctccaatcttaatgttcttttcaaagaaaacctctgtcatttcagaattgcttttttcttttcagtaagagaaaaaaggaaaatgaaacatttttgagaaaggtacacattttgagctcttattgactaggtgctaaatggccacagtcaaattggtaaaaatgactatttccagccattagttttgtgacttttcaaccacagatgcatgctttatatttataatcaatgatttttaaacaaagaaaataacttctgtaaaccaactggttttcccatctttatgcatcttgatggtgttggtcagaatttttagagagtcagcttatcttttatgtgtgcagaaggttttgaaaatttttaaaaatttcaaagcaatgtaatatttctttcagagttttatatatttactatctaagttgctttcctctaattgtgtttgctctccttacttggcaatgtaaacatgaattttcagatttgtttccagctccatgtaaagtctccaaaagtaaatttgttgaaaatgtttctagccactaatttctatattgatgattttgtgcaccatagtgtgaatttataattttgcaaatatgtttaaagcattttgtttgctttctacatcatttggcctttagtgtattttcaatgacactttgcacttttctgagccacattctcacatatgccctctggtttgtttttatctttactcatctttgctgagaccttcttcttaaagacatatgaaacttgcaggagtatagagcgatggttaggggcatggactttggagtcataaatacctgagttagaatccattttcactattcactaactgagtattcttggaaatgtcacctaaccctggtttcttcatctagaaattgaggataataataccttgtgcacaagttgtgagaactaaatgagagaccatgtgtaccgtgccctacccagtccctgtatgaagtaaatgctcattaatgttgatagctgtcattaaaggggcctctatttttctgttttgggctattctgtaaaaaaaaaaaaaaaagctttaaagttttcaggcggggcgcggtggctcacgtctgtaatcccagcactctgggaggctgaggcgggtgaatcacctgaggtcaggagtttgagaccagcctgaccaacgtggtgaaacaccatttctactaaaaatacaaaattagccagatgtggtgacgcatgtctgtaatcccagctacttggaaggctgagacaagagaatcgcttgaactcaggaggtggaggttgcagtgagctgagatcacgccactgcactccagtctgggcaacaagaatgaaactccatctcaaaaaaaaaaaagtttttcagtatgattgtacattggaatatgaagttaaaagatgtgaaatacttggctacatcatgtcttactaattaaatactcatgtagtcagagccattattgtgcctttcatcttgagctatatcacttagatgatgcagtgatcttatttttactaatcattgttagttagtagtaattaaattgtcaaaaccagtggcaggaatagttatctgtgactggttgtttatagtcagacagatgcttgcagtgaaactgcttcttgatcttctcgtgtctgcccttgccctcactgcacccacctcacctgaacttgtcaaggacagtgtctgccttcttctttctgtcctggaccctggcatgcctattacattgtcctgacctgcatcccaggcagggcccataaaacaagaagtgagacagaatacaacatgaaggaagacttcagcttggagcctcactctctgagaggaccagtctcagttttaagtatttactgagcccccattttactgtaaaatactgaagtaggcattctatgctgtatggatgataaacagaaataaaacctaaactctgattggaaaagtgaggtataggacaagcatgaaaaagtacaagcatggaaacaccaacaaatacaataataataataataataataataatagtgtccataagtcagtagattaaatctctaggtgcccattttacatattcataacatgccatgtagctacatacataatgtagtcagaagggggaggggacttgatttttgaattttattttgttttccttagatgctgcttaattctatctagttaaggaagagaattggacagaattcaggagaggaaaagtgggtgaaggagtttgtggagttttagcacggcaccctgtgatcacctctccacaagcatttacacctttctctgtatgggcatcagatgagattgataactgagctggggaaattgggagggaaaggcttcatgagccaatgcgagatgcagagctgatctctgttccagcatgaacaccagcctctccattctgtgtctgtttgcattgagacaaagcaagaaggtttcctatgatcaaacgcatatccttgtgttgccagggacaccacgatcatcaaccactcacggaatggcagctacggagagagctcgctggaggcccacatctggcaagaggaggaggaggtggtgcaggccaacagaaggtgtcaggacatggaatacacgtaagggacgactatgtgtgacgtgtggggcccgctgcattcacactccaggccttccagaacagattgcttctctgtcctgttctgaaaggctgtgagcatgaggtctccaaaaactctcctcccccatgctgtgccatggagagaaggaaaaggttccaacctaagcacgtggttccactcagcaatggatctggtgccggagttctctgggggaaattgcgtgtcacctgccggttttaagatgcaggctgagtctagtgacagaagaatttagatgtctgtgttatttcttggtgtctatctctatgacattatgagctgaaagggggaaacattatatcccaaagattcagagtttttgagccagaatttatatattccagtccaaaataaagaacatatttagctaatgcactcttctgatgggctacacaaaatttccagcagactttttgacataataaaactagcctgtcccccttcactacctaagggcttgtggaaccctgggagccctaggcctcttattttgcagatgtgaaaatagggctgagtagttgagccattgatagataggctcagtgagttactatcaaagttgtgaaaataactcagcattcttccagaaaaatcatcttctaccagagaacctgttcatcttggttcttttttcttagaaaatagagaaattgactttagctgaaagctcaccctgtttgaggctttagagtttttatgcttccctatcccctacctacccccggcccccaccgccaatgctagaccctctaaatatggtccccagccgacttcggtccaggaatgtggccacggtcattctaactgtacctcgctgaagtcccagtctcccaaggtgccagagaaggtgtactcttttgacatatgacaaaagacctgtcttaacaatttggagattatcaacatttgaagactcgtactgtgcttcatcctgtatccctaaattacaattaaagtctttgggacagcctgagataaatgtttcaagtttttctagccaagtggctttttatggagactgttttgttttgttttacagtattaaaaatctccatgccaaaatcatagagaaagatgctatgattaaggtcctgcagcagcgatctcgtaaagatgccgggaagacagactcctccagcctacgtcctgcccgctccgttccatccatagcagcagctactgggacacactctcgccagacctctcttaccagcagccagctggctgaggaaaagaaggaagagaagacctggaaggggagcataggtgagccccacacctctgtcagaccatgattggaaaagcaagaccagacagcttctctgccactcatgggacacggaaatgtccctgaatagttcctggtctcagtttactcatctgtgaagtggggagggaaatcagtcatacttcagttatagatatgtggaagcattgtgtaaattctaaagactgcaccactggagtagctcttagccatgggttgactcagatcagaattatctattattgttgtaagttgaggtgacccttataacacaaaaggctctcatagaaaagcctagagacatcacgcctctgaacttggctctgctctagaccagttgtatgacggctccacctctgcttccacgtctggaaagggaggacagtgtctgcctgctttaccccatggggagtgggagggaataatgggataatggggggaggagagtgtctgcctgctttaccccatggggcgtgggagggaagaatgggataatggtgggaggagagtgtctgcctgctttaccccatggggcgtgggagggaagaatgggataatggggggaggacagtgtctgcctgctttaccccatggggcgtgggagggaagaatgggataatggggagagcacattggaagaagtgctctctcgcataaggtaggggtggtaagtttttgctgtattgttgttgcatgggcagaattccctaagtgtggtcttagccaggagtaggtttcttgggggcaggcaggcttgttggctggctgggctagccaagctggaggggaagcaggcagcgtgctcagacacaggtcctccacatccttcccctgcactctggcctctccaggggtctggcccttctttgatgcatttccccacatcagatcgtgtttttgtttctctgtgcagctgagagccagtggtcctcagcataagaccccaaaggagactggctgctctgggccagaggggataagagcttccatatgaacccgacagagttggggggatcaaaggctcccaaccagaatctgtgtttgaagtccctccactggtggcttcagcagcccctgcccccaaaggaaatgcacttcaaagaagacgtgtgtggacagcagctgagatcatcaaagactgtcccaaggacatttagctcccaccccagctagagagctgggaggcagtgctgagccaggcctggtcaaggagtttgaaaatttgctcagctctggtagcaacctccctgggagtcccctgtttgtgacgtgcagccaggcaggcatctctggtgtctgtgcccgtatgccccaggacctggcatgtctaaaccaggcctgggagccggaggacttgtttgaaggaagagctgctgtgttccctgcactgatattcctcctcattgttgtcattggtgtccacgtgtcacaaacacagggactctccaaggggctgaggcaggttcatgggtgactgcacagttccccacatgttgtcaccattgcttgcctgataggctctggaaggaggtggaggtgacagcatataccttcccaattgcccagggtatcccaggagctatggctggctagtgacttattcagcctgtcactccctacgaggacatcctgcagactctggagtttccacaggctgggcgatgaagtggaaagaacataggttggactccaagtcaggcacagttgggtttgagtcccatttctgctgcttcttagctgtgagatgttagtttttgtgagcttccatttccttctccgtaagacaggataaggcctgtctcgcaggaatgacatgcagtatgaagtgagatgatgtgggaagcgcaggtgaaggcctttgctgctcagcgtggtctgtggaccagtggcaccagcaccatctgggagcttcttagaaatacagaatcccaggccctgcctgctggatcaggtcttccttttaacggtatagccaagtcattgttatgcacattgcattttgaaaagcactgctctcgacaaactgaactgccctgagttctaaatgggcaccttaaaacagctctggcgaggatactttatgaattgctggctatctaaccagataagagaacaaatacttgattgcgcttaccgccttttctataggctagcattctagggtgctggcactttcccgcgtgtgtgctgtatttaaaaataaaaagttatcctcccacccagctttccaggaaggctctgaggaaaatggacacctctgcacaccacgcctcccatttccatagccagcatcccctcttccccaccccagcctcactactcttgaggaagggggtaaggagagggctaagtggcctttcctaggaggctggctggctttctgcttctgggaggctacagttccaccgcagaaatgtgcaggtagcatgtttatctttgaatccaagcctgtgggggaccatcatccattacaaggagtggggtggaattgtgaactattcagaagagcagcaagccaatgggaacatgtctaggaccggggaagccttgtagtttttcttaagcacactgccacgcttcaggccagcccttctgggccacgttggtaacagcaagcatggtctctggaaagccttgtgggaacctccctacccctcctgctggcaattaggcacttctctgttcgtccataccaccctgtgaataatttatttgtatcctacagtttatatattaagttataatcagtttacttgacaactacttctccactccaaaaaaaaaaaacaaaaaaaacacacaaaaaaaacctacaattttttaggaaggggactaggtcttccattttttattctctcagtgtttgttattttatcagccttgtaataagtgtttattaaatgcttggggaatgaatcaatgaatgaatgaagcaatcatcaatcaacaaggaacagatctgcaagactagatttaaaaaaaaaaaaaggaaaaaaagaatgttgaaaaatctgttctctgccctcaggattgctgctggggaaggagcaccatgagcatgcctctgccccactgctgccacccccacccacctcagcactgtcctccatagcctccactacggcagccagcagtgcccacgccaagacaggcagcaaggacagcagcacacagactgacaagagtgccgagctcttctggcccagcatggcctcccttcccagccgcggccggctgagcacgacccctgctcacagccccgtcctgaaacacccagcggccaaagggaccgcagagaaactgggtatgtgggctaccccaccttgatgcccctgaaaactgtggaactgtctggcctaagagaatcttttgttgagctagagaggaagcaggggcacccatcagctcttactctatggggatgctattctaatgcacttaggatatgtgtgccctttcttattacgggaataaatatgcatatagacacatctagtttattactatttgaaatgagtgcacggcttgagactaccctggcaatgcatactttttaactaacctttccccggatggagtgacaacagaccctctaaggggctgaatgccctctggtatgtttgggagccagaattaggcaccaggtacatcaaaggcacaagttcactgttgccttcagggctctaacttaccagggattctggcctcagtggaggacattgtgatggaaggagaaggtagattgacctgcagagtcggttaacgtgtggcacagcacttgggccaggactaacgagctgtttaaaatatttacgggaagacaacttgggagaggtgatctttgcagtgagtccctaagtgtcctgggtaagaatagacctggcctcttaaggcactcctcttaagcaaaggagtaccatggccatggtcagtgggatcccacaaatgttcttaaatgggtaaggctttaagtagccagagagtacccagcctaccattggcttctccacatcctaaaacctgagactaatcatggtcatggggacctcccttttcaggaattcttttgaggaggtgcaggctctgtgggccctaagttaactgtttcctccaagggggttgtttatttcatttttcaaagtagacaagtaaatacaatgttgtcactttttaaagatgtgattcttttccaagtaagccagagaacctgtcaaaagtgcctagctcagaatatgcacctgatagttttgagtagagggtgtgaggggctcctgtacagagtcccactgtcatcctcaccttctgaatcctctcccttcaccatcctggtttgtatttgtgtctgaatcctggcccagtcattctgcatgttcccactgtgggctggatcatctcacatgccctgtggtgagaatcctgggtgtgcagtggtatcggacgtgggtccattttagagaacctggaaagcctatgcccctcctgaggaatgggcagctgatgtttcccctctatttggcagagaactctcctggccatgggaagtcgcctgaccacagaggccgggtcagcagcttgctgcacaagcccgagttccctgatggagagatgatggaagtcctcatctaactgccatccctgtggaatttcagtacagaacactgacaaacaaggaaagcggcagagaaagaagaaagacctagaaggttgtagatgggaaatcaggaatgatttgaactgataaagatttcagactcataagaacacattttataaatgttaaacacaaaaactacatgactgaagatagaagagaatgcgatggattttattacacatggtggaagagagaagaggcgtgtaggtttgcaaacaaagttaagaaataggaaactgaatttttcattgtacagaaaatgtatctcttggggagggcctgtgtacccccattctctgattataaacagataaacccaaatgtggatcatccttggaata

SEQ ID NO: 8728 - DNA, 1958 bp, Homo sapiens
tggggaaggagcaccatgagcatgcctctgccccactgctgccacccccacccacctcagcactgtcctccatagcctccactacggcagccagcagtgcccacgccaagacaggcagcaaggacagcagcacacagactgacaagagtgccgagctcttctggcccagcatggcctcccttcccagccgcggccggctgagcacgacccctgctcacagccccgtcctgaaacacccagcggccaaagggaccgcagagaaactgggtatgtgggctaccccaccttgatgcccctgaaaactgtggaactgtctggcctaagagaatcttttgttgagctagagaggaagcaggggcacccatcagctcttactctatggggatgctattctaatgcacttaggatatgtgtgccctttcttattacgggaataaatatgcatatagacacatctagtttattactatttgaaatgagtgcacggcttgagactaccctggcaatgcatactttttaactaacctttccccggatggagtgacaacagaccctctaaggggctgaatgccctctggtatgtttgggagccagaattaggcaccaggtacatcaaaggcacaagttcactgttgccttcagggctctaacttaccagggattctggcctcagtggaggacattgtgatggaaggagaaggtagattgacctgcagagtcggttaacgtgtggcacagcacttgggccaggactaacgagctgtttaaaatatttacgggaagacaacttgggagaggtgatctttgcagtgagtccctaagtgtcctgggtaagaatagacctggcctcttaaggcactcctcttaagcaaaggagtaccatggccatggtcagtgggatcccacaaatgttcttaaatgggtaaggctttaagtagccagagagtacccagcctaccattggcttctccacatcctaaaacctgagactaatcatggtcatggggacctcccttttcaggaattcttttgaggaggtgcaggctctgtgggccctaagttaactgtttcctccaagggggttgtttatttcatttttcaaagtagacaagtaaatacaatgttgtcactttttaaagatgtgattcttttccaagtaagccagagaacctgtcaaaagtgcctagctcagaatatgcacctgatagttttgagtagagggtgtgaggggctcctgtacagagtcccactgtcatcctcaccttctgaatcctctcccttcaccatcctggtttgtatttgtgtctgaatcctggcccagtcattctgcatgttcccactgtgggctggatcatctcacatgccctgtggtgagaatcctgggtgtgcagtggtatcggacgtgggtccattttagagaacctggaaagcctatgcccctcctgaggaatgggcagctgatgtttcccctctatttggcagagaactctcctggccatgggaagtcgcctgaccacagaggccgggtcagcagcttgctgcacaagcccgagttccctgatggagagatgatggaagtcctcatctaactgccatccctgtggaatttcagtacagaacactgacaaacaaggaaagcggcagagaaagaagaaagacctagaaggttgtagatgggaaatcaggaatgatttgaactgataaagatttcagactcataagaacacattttataaatgttaaacacaaaaactacatgactgaagatagaagagaatgcgatggattttattacacatggtggaagagagaagaggcgtgtaggtttgcaaacaaagttaagaaataggaaactgaatttttcattgtacagaaaatgtatctcttggggagggcctgtgtacccccattctctgattataaacagataaacccaaatgtggatcatccttggaata

SEQ ID NO: 8729 - DNA, 4730 bp, Homo sapiens
  SITE (1745): n equals a,t,g, or c
agacctccgtggcaccaggttgcctctgttgtgaacttcttttgtaacctaccaggccagttgtatatacagtgttgtcaggtttttccgggtttcagttttgaggcagtttattcaaagtgagacagaagtgccacggaaaagaggcaggagtgtgttaggtggtgggtccattagacctctgctgtgacattgcatattcagctctgcagacactggcttcctttacaaatctaagagatgctggattagaaaagaggagaagctcatcgggccatcagagagatgctcctacagggtcctgatgtttttgtacctccaggtcagctggatcgctgttttcccagttccctttgctcatgcttacttagaggaagaaagaaaggggggtacctcttccaagtaccttctaaatgaaacactcaagagagtgctactcaggaaactttgcttggatcctaaaatggactggtcttgggtgtgtaaccccggtgaagttatagcctccccaaattgaggtgacagaaggaagacaagaggtgtaagctggagagggaagggaagaaatcagtggctttggccagcctctgtgccacccagtacgacagaggagtgggaactggccctctggggctctgcttggccataggcactgcacattgtgccacctgctcatcacctcctctagtctcacactgagcatcggagtacctgttgtgcagacaggaaaactgaggagctctgagaggctgagcatggagctcaccccatgccatagggtgtgggaagagggcacaggaggcctcatccatgggggaaagggttgaggatggacatgggtggggagagggcatagacatcccttcctaatctctgttcccaccacatttcataggagatgagttaggagatgacagctaactctcttaaggacattttgaccccagtttatgttggggatggaccagaaaggaaaatgtctagagataggaaggtaaatgaactctgccagcccctaccatcaggtctgggccaccccaaacttgggctgcctcccttagacataggttagagtgagagacccagctgtttctcccgaagcctcgtcttcatgccccagacacctgattgccccaatcaggtgtcagacttgcttgctcttcgaggtccccctgagctgccaagtgttttcattgtaaacagacacatcgccatgtttcagggcttcaacggcattgtattttggactttgaccgtattttttttctcttaacctactgagactcttccttaagaacaggatctatagctttaaaatgtcttcttctatgggaaatttcctgccaagccagggcactaaattctttcatcattagagctttcctgaagtccggccatatactgagtacctgctctgagttctgggcagcttacaatatcttaaacagattttcagaaaaataatgcaactatattttctagtgtcaactgtatgcaaacagtgtggtaagtaccttttaattagtcctccacccacctggagtacagggggtgcgtttattattctgatttcactgatgaggaaatgggctcagaaaggttaagtcccttcctgaaatctcacagccaggagaagctaggatgatttaaaacaaagtttggagaggcactgggcatagaccctggctgtacagcctctaacatgcggcactgcatcttggcagtctctatgcctgtctgtgatngtgtgtgtgcacgtgtaactacacacacacacacacacacacacacacacacagctatcacacatctcagagcctaagaaataggactaagcccagaactcctagaatcacctataaatgctaggcatagatggaaattattgtgttccaccagaagcacagctccaaactatacctaaaaaatatttctgcccttcccagagacctggacttcaaactttcccagtggagcctgattatagaacttgagggtcctatctcaggatgaaggggagaggccctggcttcacgggaaggtattccagcattgttctgcttcacccttgactgcgttgtctggcagtttctgtgtgctgccaggatattatatggaactggagaagttggagtcaggtctctgaagctagagtttcactaattagatgcctctgtacatgagaactattactgtctgcaggtccatatagctaagctgccaggaaaaacacattatcttccaaaactttcagagcatgtgcagaaccctttcttagcgttttcttctcagcattttctctgcctcccagaggctggcagccagtgacactgcagagttcagcatgttctaaccatgcacgcagggcaggggctgccttggccctcctcaggctttcgttgggagagcaggcagtggtggagcccttctgggtgcagtcctctggggttgctctttggaactcatgtatgagtttgactccacaaggcttggcatggataccaaaacagttgcaacaaattagttctgaacctggaacagagaattcagtgcttctgttactcaggaaggaggtgttcagaatgccccgtgcagagcagccagtcattactcttgtttgttctcacctgggtgcgcaccctcatgatgcagtggctgtagcaccttcatgccaggtgctgagagaatgggaaattcttcctccccattgacctgagtcccagagacttagggacacagacttcaggtgaggctgcggacctcagaagcagtggataatagattggggcattaaaagcttttgaggcagggggctcatgttttgactgcagggagttatgctgagcaaagagatgtgtttttcaaaaccagggttcaaaaccagtgtccacgctggagtaagtggagcatgcttctctgtgttctctgaatgatcttgcactcctcttaagcaaaggagtaccatgaccatagtcagtgggatcccacaaatgttcttaaatgggtaaggctttaagtagccagagagtatccagcctaccattggcttctccacatcctaaaacctgagacagccttggtatatgctttataaatgtttcttttcttgttgtttaagtaattaaagtgtttaaaatgtcttcattagatgtgacgattgtttaatgagtttgcctctgacgtgtggctccatgggagataggcaaagtaattaagaagttaccagaaattggtcggctggggaaatgcaaaagttagcatttcagtagtgaatttctcctggaacaaatgagcaatttttcctctttctcttaagtagtatacccttttctcacttagtaatttaatggtatataaagacatgtgtataagtgagtgcatacatatgaggtatgactatagggttgtttgtgggaatttcttttcctaacatacagaagatcaaagtgttcatctcaccccgccctccttaaaaggtgtcttttgggagactatgtgctcattgactatagtgctgccaagtaaaaatatcttgggaactcttctactagaatggccttcagggcttggcatgttcctttggtttacccttagagatgagaaatcctcctttgaggatggatttaagttctggaaataatctcaagtgcttgatagcacagttggatgaaaaaagatggcaattaaggtaagttacaccatttttgtttctaaaaaaatccctaagaaatttcttggaatgagtctttggcctcagagcctctcaaagtgtccacttcaaggggggatcatcctcattagcacacagatttttaaaaatcaattctcttgccatgcctcctatgtgttcacatctctgcatacactacagatataagtgcataatcattcatataaacatctggtaggtattctgtaaaactgtgtttactttaatgcatgttattgtcatgttatgatgtgactggggtgtttttgtcatgaaactttgttttccagaattagaatactgctctctctatattgaactacatatacagcgttttcttgtatcagcccccaaagtctggatgcccggtgttgtgtttacatgtgattgtgcctaggagtctgttcacatagagacacctgtaagtatttattacaaaacggaatgtaagcaaatatatccacattggttttatttgaatcaaggtgtttttttgttttttgttttttttccttttgaggaggaacagggagcctcctcctccatgagcacttacagaattgtgtaaaattctgtgaaacagtggtaagcatgggcacccgatttcagctgtcctgctgccgctgccctccaacctgctctgtgtgtgtgtgtcgctgtgcttggtggcagtgtgccgtgctcgtgccggctcttcccagcagactggtatctggctgtaacgtttgacgtcttcatattgccagtctgtattgaggggtgatgtacatggccatacagccaaatgggtctgtgtaccagtgtggggattccaagaacactgcctgtcccccacagcaaatattgatgctgttggtcagccaaagattttcctctcctttgctgcttaaacttgtgccttaatattgtacataataaatggataaaatggcaaaatgactcttttctctcgcttgctcctttcttccttaaagaacttataaactgatgctcaataaatgtttcatttcattgtacccca

SEQ ID NO: 8730 - DNA, 1701 bp, Homo sapiens
agacctccgtggcaccaggttgcctctgttgtgaacttcttttgtaacctaccaggccagttgtatatacagtgttgtcaggtttttccgggtttcagttttgaggcagtttattcaaagtgagacagaagtgccacggaaaagaggcaggagtgtgttaggtggtgggtccattagacctctgctgtgacattgcatattcagctctgcagacactggcttcctttacaaatctaagagatgctggattagaaaagaggagaagctcatcgggccatcagagagatgctcctacagggtcctgatgtttttgtacctccaggtcagctggatcgctgttttcccagttccctttgctcatgcttacttagaggaagaaagaaaggggggtacctcttccaagtaccttctaaatgaaacactcaagagagtgctactcaggaaactttgcttggatcctaaaatggactggtcttgggtgtgtaaccccggtgaagttatagcctccccaaattgaggtgacagaaggaagacaagaggtgtaagctggagagggaagggaagaaatcagtggctttggccagcctctgtgccacccagtacgacagaggagtgggaactggccctctggggctctgcttggccataggcactgcacattgtgccacctgctcatcacctcctctagtctcacactgagcatcggagtacctgttgtgcagacaggaaaactgaggagctctgagaggctgagcatggagctcaccccatgccatagggtgtgggaagagggcacaggaggcctcatccatgggggaaagggttgaggatggacatgggtggggagagggcatagacatcccttcctaatctctgttcccaccacatttcataggagatgagttaggagatgacagctaactctcttaaggacattttgaccccagtttatgttggggatggaccagaaaggaaaatgtctagagataggaaggtaaatcaactctgccagcccctaccatcaggtctgggccaccccaaacttgggctgcctcccttagacataggttagagtgagagacccagctgtttctcccgaagcctcgtcttcatgccccagacacctgattgccccaatcaggtgtcagacttgcttgctcttcgaggtccccctgagctgccaagtgttttcattgtaaacagacacatcgccatgtttcagggcttcaacggcattgtattttggactttgaccgtattttttttctcttaacctactgagactcttccttaagaacaggatctatagctttaaaatgtcttcttctatgggaaatttcctgccaagccagggcactaaattctttcatcattagagctttcctgaagtccggccatatactgagtacctgctctgagttctgggcagcttacaatatcttaaacagattttcagaaaaataatgcaactatattttctagtgtcaactgtatgcaaacagtgtggtaaataccttttaattagtcctccacccacctggagtacagggggtgcgtttattattctgatttcactgatgaggaaatgggctcagaaaggttaagtcccttcctgaaatctcacagccaggagaagctaggatgatttaaaacaaagtttggagaggcactgggcatagaccctggctgtacagcctctaa

SEQ ID NO: 8731 - DNA, 4742 bp, Homo sapiens
agacctccgtggcaccaggttgcctctgttgtgaacttcttttgtaacctaccaggccagttgtatatacagtgttgtcaggtttttccgggtttcagttttgaggcagtttattcaaagtgagacagaagtgccacggaaaagaggcaggagtgtgttaggtggtgggtccattagacctctgctgtgacattgcatattcagctctgcagacactggcttcctttacaaatctaagagatgctggattagaaaagaggagaagctcatcgggccatcagagagatgctcctacagggtcctgatgtttttgtacctccaggtcagctggatcgctgttttcccagttccctttgctcatgcttacttagaggaagaaagaaaggggggtacctcttccaagtaccttctaaatgaaacactcaagagagtgctactcaggaaactttgctttggatcctaaaatggactggtcttgggtgtgtaaccccggtgaagttatagcctccccaaattgaggtgacagaaggaagacaagaggtgtaagctggagagggaagggaagaaatcagtggctttggccagcctctgtgccacccagtacgacagaggagtgggaactggccctctggggctctgcttggccataggcactgcacattgtgccacctgctcatcacctcctctagtctcacactgagcatcggagtacctgttgtgcagacaggaaaactgaggagctctgagaggctgagcatggagctcaccccatgccatagggtgtgggaagagggcacaggaggcctcatccatgggggaaagggttgaggatggacatgggtggggagagggcatagacatcccttcctaatctctgttcccaccacatttcataggagatgagttaggagatgacagctaactctcttaaggacattttgaccccagtttatgttggggatggaccagaaaggaaaatgtctagagataggaaggtaaatcaactctgccagcccctaccatcaggtctgggccaccccaaacttgggctgcctcccttagacataggttagagtgagagacccagctgtttctcccgaagcctcgtcttcatgccccagacacctgattgccccaatcaggtgtcagacttgcttgctcttcgaggtccccctgagctgccaagtgttttcattgtaaacagacacatcgccatgtttcagggcttcaacggcattgtattttggactttgaccgtattttttttctcttaacctactgagactcttccttaagaacaggatctatagctttaaaatgtcttcttctatgggaaatttcctgccaagccagggcactaaattctttcatcattagagctttcctgaagtccggccatatactgagtacctgctctgagttctgggcagcttacaatatcttaaacagattttcagaaaaataatgcaactatattttctagtgtcaactgtatgcaaacagtgtggtaaataccttttaattagtcctccacccacctggagtacagggggtgcgtttattattctgatttcactgatgaggaaatgggctcagaaaggttaagtcccttcctgaaatctcacagccaggagaagctaggatgatttaaaacaaagtttggagaggcactgggcatagaccctggctgtacagcctctaacatgcggcactgcatcttggcagtctctatgcctgtctgtgatgtgtgtgtgcacgtgtaactacacacacacacacacacacacacacacacacacacagctatcacacatctcagagcctaagaaataggactaagcccagaactcctagaatcacctataaatgctaggcatagatggaaattattgtgttccaccagaagcacagctccaaactatacctaaaaaatatttctgcacttcccagagacctggacttcaaactttcccagtggagcctgattatagaacttgagggtcctatctcaggatgaaggggagaggccctggcttcacgggaaggtattccagcattgttctgcttcacccttgactgcgttgtctggcagtttctgtgtgctgccaggatattatatggaactggagaagttggagtcaggtctctgaagctagagtttcactaattagatgcctctgtacatgagaactattactgtctgcaggtccatatagctaagctgccaggaaaaacacattatcttccaaaactttcagagcatgtgcagaaccctttcttagcgttttcttctcagcattttctctgcctcccagaggctggcagccagtgacactgcagagttcagcatgttctaaccatgcacgcagggcaggggctgccttggccctcctcaggctttcgttgggagagcaggcagtggtggagcccttctgggtgcagtcctctggggttgctctttggaactcatgtatgagtttgactccacaaggcttggcatggataccaaaacagttgcaacaaattagttctgaacctggaacagagaattcagtgcttctgttactcaggaaggaggtgttcagaatgccccgtgcagagcagccagtcattactcttgtttgttctcacctgggtgcgcaccctcatgatgcagtggctgtagcaccttcatgccaggtgctgagagaatgggaaattcttcctccccattgacctgagtcccagagacttagggacacagacttcaggtgaggctgcggacctcagaagcagtggataatagattggggcattaaaagcttttgaggcagggggctcatgttttgactgcagggagttatgctgagcaaagagatgtgtttttcaaaaccagggttcaaaaccagtgtccacgctggagtaagtggagcatgcttctctgtgttctctgaatgatcttgcactcctcttaagcaaaggagtaccatgaccatagtcagtgggatcccacaaatgttcttaaatgggtaaggctttaagtagccagagagtatccagcctaccattggcttctccacatcctaaaacctgagacagccttggtatatgctttataaatgtttcttttcttgttgtttaagtaattaaagtgtttaaaatgtcttcattagatgtgacgattgtttaatgagtttgcctctgacgtgtggctccatgggagataggcaaagtaattaagaagttaccagaaattggtcggctggggaaatgcaaaagttagcatttcagtagtgaatttctcctggaacaaatgagcaatttttcctctttctcttaagtagtatacccttttctcacttagtaatttaatggtatataaagacatgtgtataagtgagtgcatacatatgaggtatgactatagggttgtttgtgggaatttcttttcctaacatacagaagatcaaagtgttcatctcaccccgccctccttaaaaggtgtcttttgggagactatgtgctcattgactatagtgctgccaagtaaaaatatcttgggaactcttctactagaatggccttcagggcttggcatgttcctttggtttacccttagagatgagaaatcctcctcctttgaggatggatttaagttctggaaataatctcaagtgcttgatagcacagttggatgaaaaaagatggcaattaaggtaagttacaccatttttgtttctaaaaaaatccctaagaaatttcttggaatgagtctttggcctcagagcctctcaaagtgtccacttcaaggggggatcatcctcattagcacacagatttttaaaaatcaattctcttgccatgcctcctatgtgttcacatctctgcatacactacagatataagtgcataatcattcatataaacatctggtaggtattctgtaaaactgtgtttactttagtgcatgttattgtcatgttatgatgtgactggggtgtttctttgtcatgaaactttgcttcttcacagaattagaatactgctctctctatattgaactacatatacagcgttttcttgtatcagcccccaaagtctggatgcccggtgttgtgtttacatgtgattgtgcctaggagtctgttcacatagagacacctgtaagtatttattacaaaacggaatgtaagcaaatatatccacattggttttatttgaatcaaggtgtttttttgttttttgttttttttccttttgaggaggaacagggagcctcctcctccatgagcacttacagaattgtgtaaaattctgtgaaacagtggtaagcatgggcacccgatttcagctgtcctgctgccgctgccctccaacctgctctgtgtgtgtgtgtcgctgtgcttggtggcagtgtgccgtgctcgtgccggctcttcccagcagactggtatctggctgtaacgtttgacgtcttcatattgccagtctgtattgaggggtgatgtacatggccatacagccaaatgggtctgtgtaccagtgtggggattccaagaacactgcctgtcccccacagcaaatattgatgctgttggtcagccaaagattttcctctcctttgctgcttaaacttgtgccttaatattgtacataataaatggataaaatggcaaaatgactcttttctctcgcttgctcctttcttccttaaagaacttataaactgatgctcaataaatgtttcatttcattgtacccca

SEQ ID NO: 8732 - DNA, 569 bp, Homo sapiens
gaaagctgtgagtgtgcgtcctgaagctgcacctgcctcccagctggaaggagagatgagtgggcaggattttcatctgtcaacaagggagatgccacaaagcaagcccaagttacggagcaggcacacgcctcacaagacactcatgccctacgcgtccctcttccagtcgcactcctgcaagaccaagacctccccgtgtgtcctgtcagaccgtggcaaagctccagatccccaagcaggcaactttgttcttgtttttcctttcaatgaagcaactctcggagcttccaggaatggattaaatgtcaaaagaataatccaagagctccagaaactaatgaataagcaacattcctaagtggtaaaaaatcaaatcaagaaaaagtgacatggatttttaaaaaccaaggatcctgtcctagagaaagcaatagttcaagtccctacctgtgccaccagcatgttaactatgacattgggactgaagatgtggccatatgtataaatataacagctctgacaaagcacaatatgttcaagtggtgattaaactacattacatccca

SEQ ID NO: 8733 - DNA, 690 bp, Homo sapiens
aaagattattctaatatttttaaaggattattaggtgaaaacagtacaaaagaagccaggagttaactttctgtgtgtttttttttaaatcaaccagttatttgttaaaattattttgttaacttaagatcagacaatcattcagagtgagataaatcactgaaagccctaatgactctgttgtttacaaatcctgggcttgaaatcagactttgcaccaaagagctccctgtgggggcatctttgggctgtatttaaatagtggccccttggccttgtcaccatttgtttaccatcacagcatgtgaggtcatggcctcccagatcaaagtatgctgtcattcctgccacataaaaagcatctgcagtcctaagacataaaaattccagtaggttacttgaaaacattattctagtgaaagtagtcagatacaaaaggccacatgttgtatgactccgttgatatggaatgtcagaattggcaaatccatcaaaagcagattggtggcttaggggaggggtaatgaggagtgcctactgatgggtagggggcttccctttggggtgacagaaatgttctggaactatatagaggtgatggttgcacaacacggggaattcactaagtatcactcatggtacattttgtgttatgtgtgttttaccacaataaaaaagttaaaagctggc

SEQ ID NO: 8734 - DNA, 3109 bp, Homo sapiens
agccaacaatgatacggcgtccaccagcagttgtttgctacatttgtggtcgtgaatatggaacaaaatctattagcattcatgagccacaatgtctgaaaaaatggcataatgaaaacaacttgttgcctaaagagttaaggagaccagtacctaaaaaaccagaagtcaggaccattactggtaagttcctagaaaaaagatttgagtgcataaggggagacttttctctctaaactaataagagcagaagtattcttttttcacttgttcaaacgaccaaaatcaacaacatttcttgccttggttacagacaaataagaaaaacagttctgaaatgcctgtccaaagaattatcttctgatgctgagacataaagacactatgtcctggcaacactgtgcatgagagggacctatgggaatttgctgtattctccaaaagtttctttcatacatcatcaaaccctttgaatgtaaaataaataataaaatacttaaaaaataaaaatgaataaaacttaaaaaaatatgaaacttaaaaaaaacctttgggaacatccaaagtcatgtttccaaatatgaatgtgtcttggtgttcatagagcagggataccaaactcgaattttcaccaggtccactagtcaggttataacattgagtaaactggtccatgtgtgcaccaaaggggaggtaaggactatgatgcgctgtggagcatcagctcgctctataggagacaagcagctgcccagttccagctggcgttatcattaagaaatttagtccaatgtactcatatctttcaataacacaaaacaaactagaaatctagacatctattttaaatgtccagaatttttcacatttaatcatttgtaaagcatggtgcaaaccaaatgaaactgaaactacactgccatgtttcgcctcatcacaaagcctcatgtttattcatttagggtatgagaatagttaagaaaatatttttgccatgcaagctcagacttgcttatcatatttttaccattgtcattttctcagtagatcccctaaaccatctcacaggacaatgttggttttaagaggagtatctttcaattcatccattctcctatgtaaccgtagatttgcaatgctgaaaagtaccttgggggtcatttaatgtcaattagtccaaagcacttgtgtcagagatgtgacacaaggagagttttataacaacccacaaagtagaccctagattgtatgataaattctagatcctgctagatcccagctactcacagtgcttgtcaaaaagaggacttttcatacaggtgggaaaacagctaaagatgaaaatgaccagctactgaaattagagcattttccataaacaggttgtttacctcattgaaactctctttccagcatttctcatttggtgtcaaaatatgtttccttcccttctgatctttatcactttctctgcttgaccataactaccagcaggctagaagtaagaggaatgattggtctgaaagccctggtggttcactattctgttactgcctacagatggaaaagatgggtcctataactgcacttccctgcagtcttcctctcacttccatgttatttatctctgaggatgcccttcctctctaggtaaaaagaattcatattaccatttttatcccatgaactcattgtagtcacagggttcaaataacccctcttcctgatctgaagtcaaggccctatgcaaaaacatttagaaatgtggtgaatcaccttcaagtgagagtcagtgactactctggaatttttgagttcattttaaaactcgcatgagtaacgagaaagtcagtgtcattcttttctcatttttcaaagcactgaaactacacattcatatcccacatagacagtgacatttgctttatccaaagaagaaatactagattttgctgggatttaaatttccatggagcaagaaagtgagtattaggagcagacatgttaaaaaatttaaggttcactgtggttgtgtgaaccattagatagaaatcatatgagaattgcctaagctttaacgaagtaatctatgttgtgccaaagataaaaactaagtaatatgtttttgagtgccttgttacattttgggggcctattttcagtggttctaagacatagtcaatttaatgtactgaaatcattctattttaactaaggtttattaaagctaaatgccacattgtttctctaaaataaagccatatgcttttttctccctatgctctgccaatgaaggttatacatttctcatctgtctttgttattttcttaaggacgtatctttttgtcagattattctgtttgtattctccactttgattacttaaagaatatctgagtttatgaccatgaagagatgataagtttttaggatataattcatcttaaattcactctcaactgtcagttttggcttctaaaaacattccactgaaggattacagaaaaggaaaatacgaatacatgctcattcccctttgtaagcttatatttagagtcaactgaaagaaggccaaaagttatatttgcaaaataataatgtgtatgcaaagatgttaataattagtgaagaatgcatatcataccatgtaaaacaatgtctttccctttttaaaatccaaagagtgaaaagcctctgtctgattcccagctaattttattcaacacttgaaagagcgagcagccctttcttttttggaggcaaaagtaatatgatttgtttaaaatactcagtcaacaggtatttcctgaaaatattttccatagaaagtagaatatggttctcccgaataaaaactgatccattttacctttttctttccctttgtttttggtatttttttttctttttttcttttgcttttttcctttaactttccagccaaaggcttctatgatcttgatgctttaaatgaagctgcttggacaagtgcccacagccagttggttccctgtaatgtttgtgggcgtaccttcctgccagacagactgattgttcaccaacgatcttgtaaacccaaagccgccaagtaaagcccttttctctcta

SEQ ID NO: 8735 - DNA, 502 bp, Homo sapiens
tgcattttgctgatgttcagaaatcaagtagcagggaatataaaaaattctggcctcaactatgaaatgagttgccactcaggtcataataagtgacttttgagtatgacaaaattaaaaattaaaaacccagcatccttatgtgtatgaagcattaagtcagtgagctcttgaagtggttgaaaagaatgagttcttgtagaaatcatcgcatccacagggaactgtgagccagcttgagacacatcaaggtactgagtatggagattccacgatggcttcaccttggctggcctacaaatgttccatggaattaaatctggagcaagctcagttatgatgacatcaacccaagagttctggtctattatcaaagcaagtcattgaagtctctctattaatgggaaagagctcaccttctctgccaatggccctcccgcaatgagttcacatccgtgcagctctttgtaactctcaaaataaaataatttctttaacaatg

SEQ ID NO: 8736 - DNA, 1331 bp, Homo sapiens
gtgctgcagtaaacatacatgtgcctgtgtctttatagtagaatgatttataatcctttgggtatatacccagtaatgggattgctgggtcaaatggtatttctggttctagatccttgaagaatcgccacactgtcttccagaatggttgaactaatttatacttgcaccaacagtgtaaaagctttcctatttctccacatcctctccagcatctgttgtttcctgactttttaatgatcaccattctaactggcatgagctagtatctcattgtggttttgatttctaatgaccagtgatgatgagttttttcatatgtttttgggctgcataaatgtcttcttttgagaaatgtctatttatatcctttgccctctttttgatggggttgcttgtttttttcttgtgaagttgtttaagttccttgtagattctggatattagccctttgtcagatgagtaggttgagaaaattttctcccattttgtaggttgcctgttcactctgatggtagtttcttttgctgtgcagaagctctttagtttaattagatcccatttgtccattttggcttttgttgccattgcttttggtgttttagtcatgaagtctttgcccatgcctatgtcctgaatggtattgcctaggttttcttctagggtttttatggttttagatcttacatttcattctttcatccatcttgacttaatttttgtataaggtgtaaggaaggggtccagcttcagttttttgcatatggctagccagttttcccaatatcatttattgaatagggaatcctttccccattgcttattttttctcaggtttgtcaaagatcagatggttgtagatgtgtggcattatttctgaggcctctgttctgttccattggtctatataactgttttggtagcagtaccgtgctgttttggttactgtagtcttgtagtatagtttgaagtcaggtggtgtgctgcttccagctttgttcttctttttgcttaggattgtcttagttatacgagctctttttttggttcagtataaaatttaaagtggttttttctaattctgtgaagaaagtcaatggtagcttgatggggatagcattgaatctataaattactttgtgtagtatggccgttttcacgatattgatttttcttatccatgagcatggaatgttttttccatttgtttgtgtcctctcttatttccttgggtagtggtttatagctctccttgaagaagtccttcatatcccttgtaagttgtattcctaggtattttattctctttgtagcaattgtgaatgggagtt

SEQ ID NO: 8737 - DNA, 2035 bp, Homo sapiens
aatgttgaccattagctcttgcagcgtcttacaaagacgacttgaagttgggagttaggaaggtgaacttttctatctgaattctccgggtccctgaagccctccttgccgctctccatctgtcttgcactgccagctgggtccctgctggggctctgggacttccacttctcagtccacataggaacccagcttccactgagtcactgccaaacctgcctcccagcctgggtgggaagggggagagccactggtaggagccagccccacatggaggtgaggagccactgccaacctcccgtgtccaggtgctgatgtgggcctgcggagtgtggggctggtgccttcacccagaccccttcaatcatgtgatgtgtgtgtgtgtgcatgtgtgtgtgtgtgtgtgtgtgtggcactctcagaagtgtttgacagggtgcagatgtgaggcttagtgttgggaaaatgccaagggctattatcattaaaatttgaagctttatttttcccttagaagtgggaaacccagagctctgttgatttcctaccacaacccagtaggggcctctctctgccatgggctggacagctttttgaggaagccattcagctcccacagttgagctcccacagggctttaggtgtccattccctctcaactgcttagaggcagctttgagcacagccttcctggaaggaagctaggcaagacctgccacacagcgaaggttgggtttacaagggtgacattggtacccccttggccaagagtaaagaagaacaagtctaagccttgcttttatcttagttgtctgggtggtagcagaactcatcagctccttatcctcagtctgttcctctataaaagatgagagatgttcactgactttgtgcagtgagaaggcagcaagtactcacggctggtgctgtgggacctcacagcttctaaggagaggggctgggagggcctttgccatcagatctgccaagcacctaatgcttgcctgtggtgaaggcaagatggaccaagggccttggagaaaagggctcccaggcttctgaactttgaggcctcagcactttctgcattatcgtcaaactctttggaaagaaaccaaatcattaaaaagtagaaagaaatctgcctcttgtctgccctactgcccctttacccccactctgtccccaaatgatattattgcaccttgacctgggagcgcagagaggggagggagttggcagagacttctggtgccctctgccctcctagcaacagatgccacttatattttggcccctggcagcctcgcccagcccctgatcagcccaggcctagggcagttaggacctttctgtttattttctgaagcagagagaatgatctcagagtttgcaaatgaagccttttttgcactttcattcacatgcactttggtggggttacatttttgtacttgcctcttgtgtgtgcacatgtgtgtatgtgttctttaagagaatcttctggcttaagctaaggtgactcttgaaggagaaaaagttacaaacaaaatgtggtgtgatctgtcagtgtatcaaaacaacataaataaacttgaacaactgatacgcagccagagtctgtttctattttcatgataaaacatccagagaacacaaaatggttatcagtagtggcactactgaagagactaaagtgttctctttgttgttagttaggggtccttatagtttttaaggaaagaaacaaaggataaggataaatgggtatctgtctgcactgaaagtgtaaacagtgggaactcccagagatcggtgtgtaaaagggcctgatccttaacatttgataaatggtcaagggcagaaaattcaatgaaacctgtaatttttaaaataataatatcagctgggcacagtggctcacacctgtaatcctagccactttggagggccaaggagggaggatcacatgaggccaggagttcaagaccatcctgggtaacgtagctagatcctgtctctataaaaaaaaaaa

SEQ ID NO: 8738 - DNA, 465 bp, Homo sapiens
tgttttcctaagatcccttggaagtctctagctgcctttctctcttttgcccagaattgagagattttgagccaagatgccttcctgaacttacccagttctggaccagttggcattttagtgtcccacgccaagtccaagtttcagcagaatgagcaggtggtttgagcctgttttatagatggcagaggttgaggttccactgctgttttccatacacccttcatgtgttgagtctgggaaggagtaagcctagcctgccagtagcctaggttaggagaccagcataaggatttgttagacaatctcgggtctttggccagaggggcagctccagcaggcatagtggtgcctgaagttaggaatactgtactctctgtagctttggacctcagccaaggtattgcccatggggtgatggctccaggcctgccaggccttctgccatgagaatgtagcactctg

SEQ ID NO: 8739 - DNA, 415 bp, Homo sapiens
aaagaaacattaagagacaggaagaggcttttggacatttaaaatgggattatggagataaaaattcaacacaagggtcaaaagataaagttgaggacatttcccagtaggcagaataaaaagaaaaagagaggccgggcctggtggctcatgcctgtaatcccagcactttgggaggccaaggcaggcagatcacgaggtcaggagtctgagaccagactgaccaacgtggtgaaaccccgtctctaccaaaaatacaaaaattagccagacatggtggtgcgctcctgtaatcccagctactcaggaggctgaggcaggagaattgcttgaacccgggaggcagaggttgcagtgagccgagattgcaccactgtactccagcctgggtggcagagtgagacttcacatcaaa

SEQ ID NO: 8740 - DNA, 504 bp, Homo sapiens
cagctttggagattgtgccattaaaatagaggaaaaaaatcttccaggacactcctggagatctgatgtattcatgaggattgttgacccaatatcaaatagaacagaggttaattgcatgaactgagctaatagaagactaaaataattttttgtgtgatctttttgtctgaaacattggtgattcttttcattttttgggttgtttacagcttttaacaattgagtaaaatatgctcttgtgagcaaaatttaaagcatatttctttctctctacctgatttctccagaatttgaaaactatttttgagtattcttaatttataacaatatagttatttgtatgagctcaataagaatctgctttcttttgtaacaggacacaattggagactattattttactaaagctttgactagaatgaaatattttaagctataaacaaaacaacaaactgttttaaggaattgccattgacttatagagccaataaaagatcctta

SEQ ID NO: 8741 - DNA, 656 bp, Homo sapiens
gaagataagagagcttcttcaagaccaaaaaaggtttgtgttactgctgtcacatttatataaaattaattttggaatcaatagcagttttccagataaaagcattttcaatttatttatttatgtttctattacaggagacggcatgatacccatgtagggaattccccaaagcagggcttgccatacctggaccccgaggagcctgcttgctggaaaggctttcctgtctgatgtgcaggaggcagaatgccaaactgactcttcaaggggcaactgcaggggctcgagaccagccagcagtatctcatccttcgatacaggggatatactgtacagtcctttttctagaagtgagacatacaagattactctacaagaggaagattccaggggctcaaaaacgcaaaggtttgcactttgagagccccttggaatgttgacaactcaggatctaaaacaaagttctgtgttaatgagttacagaattcacgtggaagtcaatgtcactttataatcgataataatactgagtgaggaacactatgcaggaagaaaccttccgtagaaagacaggcagggaaaagcttaggctgaccttaaacttacctaatagagcaagcctgagatagactgccataaatgcctaaataaga

SEQ ID NO: 8742 - DNA, 4020 bp, Homo sapiens
gaagataagagagcttcttcaagaccaaaaaaggtttgtgttactgctgtcacatttatataaaattaattttggaatcaatagcagttttccagataaaagcattttcaatttatttatttatgtttctattacaggagacggcatgatacccatgtagggaattccccaaagcagggcttgccatacctggaccccgaggagcctgcttgctggaaaggctttcctgtctgatgtgcaggaggcagaatgccaaactgactcttcaaggggcaactgcaggggctcgagaccagccagcagtatctcatccttcgatacaggggatatactgtacagtcctttttctagaagtgagacatacaagattactctacaagaggaagattccaggggctcaaaaacgcaaaggtttgcactttgagagccccttggaatgttgacaactcaggatctaaaacaaagttctgtgttaatgagttacagaattcacgtggaagtcaatgtcactttataatcgataataatactgagtgaggaacactatgcaggaagaaaccttccgtagaaagacaggcagggaaaagcttaggctgaccttaaacttacctaatagagcaagcctgagatagactgccaaaatggccaaataagagactctatgaaataacagtcttgtaactgtagtaatcataaggaaattttctccttgaaatcacgataccaaataggaaaaatgatctacaagtgccccatgtgtagggaatttttctctgagagagcagatctttttatgcatcagaaaattcacacagctgagaagccccataaatgtgacaagtgtgataagggtttctttcatatatcagaacttcatattcattggagagaccatacaggagagaaggtctataaatgtgatgattgtggtaaggattttagcactacaacaaaacttaatagacataagaaaatccacacagtggagaagccctataaatgttacgagtgtggcaaagccttcaattggagctcccatcttcaaattcatatgagagttcatacaggtgagaaaccgtatgtctgtagtgagtgtggaaggggctttagtaatagttcaaacctttgcatgcatcagagagtccacaccggagagaagccctttaaatgtgaagagtgtgggaaggccttcaggcacacctccagcctctgcatgcatcaaagagtccacacaggagagaaaccctataaatgttatgagtgtgggaaggcgttcagtcagagttcgagcctctgcatccaccagagagtccacactggagagaaaccctatagatgttgtggatgtgggaaggccttcagtcagagttcgagcctgtgcatccaccagagagtccacacaggagagaaacctttcaaatgtgatgagtgcggaaaggccttcagtcagagtacgagcctctgcatccaccagagagtccacacaaaggagagaaaccatctcaaaatatcagttatataaaacgttttgctaagagtttaaaatcttaaaacccataagtgccactaggaaggaaaccctgtatatacctacattgacccaagaaatatttacgcaatccctagcagaacattgtttctgaggaggcatatgtgagattgatttgttggttcatgccaagtgtgttccacaggttgactttgaatgtggacctctgagcatccacgcaggatggctctcaggtcccagtcacagacgtcgcttcctgggattccagcacgatgcctccatagttgaaagactacacaaaaagccacaatcattgcccggcctcctgagtcaccttctatctatactttgcttaaaagctatcccagatactcccccttgaggagctcatgcccttccttcctctttattcgagcatactggcaatgcattggaaaacagacagctcccactaagatcacgttctggtatttctgaggttaacacttgatttagcccctacatatctttccatatatcctattatttctgaatatatgtcctcaaaatccccataaatatccatcccttcctagatggcattaactttcattttagattttaggtgactcataattcccattcacttagcctatcagaaaagtcattggcagacatatatgtccttgaaccttttttatttgtgtggattctgctcatcactgtctctgttagacttattttgtagtggctgcatcacatatttttcacttgaatttttttggaaatagctgaatgtaaatagcagggaggaagaagcaagcaaagtgagagcttttcttcatccagaattgccctctgggctcctttggtaacagatggagctccttcctagctagggagaccttatgagaagtggatggtaggaggagtcactaatgtttcaatctctatttctgtaatcttgggcaataatgcataggagttcttgataccccttcattgattactgtgtatcagttctttgttaggcatgaacgtctttattaatccatcattcttttcttcattcaacaaatatgtattgaacacctcctatatgccaggcactgtgctaggtgctgggaataccactgatgagacagacaaggtccctactcttgtggagtttacttctggtggaggagacagatgataagtaaacaaataaataatgtagtttgagatagtgattaagtgctatgaagaaaataaactagggtgatgattttagtggtggggtggggtgggggtggggtgacattagctagtggtcagggaggcctttccgcggtgggatgttgagctgaggccggaggagaagtagcagtcgctggcagagcacacaggctgctctgggggatgagctggtgcgtttaaggaacaggccagcactggcattcgcaagcagtggggaaggggagagatgccgaggtggtcagtatcctgactttcagaggcctttttttgtttgttttaatttttgctagattgatattaaaaactcatgtggaggaactcaaggaatgtttagaagaccaaaagtccccaatgacaggaacaaaagcaaccaatttttaactttctcttctcattcctgttttcattgatttcccacatgtagtccttttgctcaggaagtctttggggaaattaaggatctttgaagctctgaaataggtgatcaggttagtggtgtctgtcagctgtctaagaggttggaaaatgaactactcaagatagtcacgaaaatactgaaagtttgatttttctttccatatttgaattaattttttctgtttgactggaaggggtttttgtataactaaaacctcagcgcataaaggagatttaaaaggagcacatgatttagtgggtgggccatgaaactagagatgggatttgggggtgaatttgtcaatatctggattttaatccagacatctctgctaacaagcctttggtaagtcacttcagatacttttcctcctttttacaaagagagggctggcttagttatttgccaaagccccttccaggcctgaattccacaagtacgatttactgtagtgtcttatcactctttcatgtcacaatagcgtggagcattagagaaaagcctagacttttagttgatagccagttgaaatatcattgatagaattttagttttaggaaaaattggtttgatttctagctttattactattaggtatgtgagcttgggcaaatcgcttaatctttgagtctagttttctctcaaaatgagaacattaggctaaatgatttccgagtttccagctagtcctagagttctatatttctacatagttgaattattttatcatgctgttgctggggaatatgactaacccttttgaagctactaattttatgtcgagctttaaagtccataattgttatcttcagaaaatattatttgacctacagtatgtccaaatcaatttaataaaatcgctttataacagggt

SEQ ID NO: 8743 - DNA, 10198 bp, Homo sapiens
atatgacaatggatgatgttcgggaatacgagaaaaacatgcatgaacaaaccaacataaaagtttgcaatcagcattcctcccctgtggatgacatagagagtcatgcccaaacaagtgtacgtagaatttttaaaacatgttgcccaccctttcacaaatgcacatgtaaactgatctgggaaatactgcagatgcccggttcgcaaccttccatagaaacatgtcgtcacccagaccctgttgctgcagaacctgagctggatctaaattgggcagtgtcacctctctcttccagacatttcgatcccttaaagttgcttgacgtggaggttatttcggtcataaaaccaagaacatggagagtggaaacacttttgtgggactagtaaaacggcctgcaccataaaagagcagaggagtgaaaatcgatgtcatatgtaaactagaataacatgtcagtaacttttaaaaacatagctaacactcacttattcattcaagggagggcttctggctcatcagctattttaggtttctttacatttgctttgaaaagctttctgtggctctttatagctgttttacccaatcagttcctttttacttaggataatctcaagatgggctgcagtctgtgcagacacacaggctgagcagtgaaggggtgtgagctggggatgtgctgagctgcctagcagatccctgggacttagggtaagccttagagagcctcagttatttcgttgcacactggaaattgagagctgactgtatattgtatgccagcattttaagtatcgtaatctctcaatcattcatgctaatgaagggtagctagagataacaaagaaaagtgtaatcaccaaatcatttctttgcatcttcagccagagctgtgatctctttgggttccgccttgagtcctcatgtccattagcccagtctccagaataatacatagtaggtgttaaaaaaaaaaaaaaaaatcagctgggcgcggtggctcatgcctgtaagcccagcactttgggaggccgaggcaggtggatcacctgaggtcgggggttcgagacaagcctgaccaacatggagaaacctcgtctctacttaaaatacaaaattagctgggtgtggtggcgcatgcctgtaatcctagctactcaggaggctaaggcaggagaattgcttgaacctgggaggcagaggttgcagtgagccaagatcgcgccattgcactccagcctgggcaacaagagcaaaattctgtctcaaaaaaaaaaaaatcaatgctgtagttctaggaaatttagatgtggctgttgtcataaatggatcctttagaattgtgaagaccttctgattgcactttggaaatttttagttaaatttttggagcatgtctttggaatgtgccctgcaagtctcatgtgctgcaactggttgcatgtgattgcccttgaggttgcaagggccctaactcttctcccattttgcatgcagtgatctgatttgcaggaaactgttggagcaagaggcgtttcctctctatgcacagaccaattccagtaggacttccccctagaagtgctctttaaggaaactctccttgaatttctatcactttcaattaccttttcttttagaaatgttgggccccagttccccctcagccactctgaaagccattcactataaatatgaccaggcaaacaaaggaagaagccacaggtaaagaggagacaccagatggctaaaagatgctaagctcagtgattttctcacagcttataagccccttggcttggctttctttcagttttactgtgattattactttataattaaagtccatggctgggtgcggtggctcacgcctgtaatcccagcactttgggatgccaaggcgggcgtatcacctgaggtcgggagttcaagaccagcctgaccaacatgaagaaaccccgtctctactaaaaatacaaaattagctgggcgtggtggcgcatgcctgtaatcccagctactcgggaggctgaggcaggagaatcgtttgaacccaggagatggaggttgcagtgagcagagattgtgccactgcactccagcctgggcaacaagagtgcaactccatctcaaataaataaataaataaataaagtaaaataaataaataaagtaaaataaaaaataaagtccacttactatgtagaaggtgataacgtagagtggttcttcccatggaaaagcccacataatctctggctgcccctcagcgttgttcccgtgacttcagggtgaaagatgcctgccaccggagaagttacacaaagtggttattttgaatgcttatgacatttccattatcctttggaattccgtgaaattggagcacatttatttttccttagtctttctcctgtatcataatgaaaagcagtgaaaatcaggaggtggctctttgtcacaaataaaaactgcatgggtgctaaatgaattttagatcatcaacccaagcagggacaaattagattgaaattaggcaaaattaacatccatgaacacagcagtgaggaaataagtcttttcaattgagcaggttcaaagccttcaaggacgggaacttctaagagcctctgggagtggaaaatcaaaattctgtgctttagattatttctgccccctgctggctatgtggagtagaacaatgtattcagccacttgattaagaaagtctgctttttcaaagataatatccatttatcatagcaaaaacataacataccctgatacactaaaatttttctcagtctcaactttattgtgaaataaatgcctctttttatataaccttaatctcacttcttagctcatttaatagtcttccatgtttttaaaaattggtaagtttataggtacaatttttcttgatatatgctgaattttatatcttatccacatagtcataatgacttatatcctttgtaaaaactttccctttcagaaaattttaataattgttcccaggaaatcctcttaaggatttcattttgtgaaaaatacttctggtttgctcagatgttataaaacctaaagattaagctgggcacggtggctcatgcctataatcccagcactttgggaggctgaggtggacggatgacctgaggtcaggagttcgagaccagcctggccaacatggtgaaaccccatctctactaataacacaaaaattagccgggcgtggtggcagacgcctgtaatcccagctactcgggaggctgaggcaggagaatcgcttgaaccccggaggcggaagttgcagtgagccgagatctcgccgttgcactccagcctgggagacaagagcaaaactctgtctcaaaaaaaaaaaaaaagaaaaagaaaagtcctaaggattaatactgtgttatgaatattcattacatactcagtatttccaaagtggctatattgtttcctgctggttattccctccaatattatctaatgaagtttcaactgctaagtacatggcagtggacaagaaacaatgaaaaatgggtctctggggggccaaaacagatacagaaaatccgcgggcactaaattttgcattttgctccaggataagccttgggccttgactcagtctttaataagcccaggttcctcttttccctgttcccagcaagtaaaaatggcaaaggataccagggatagccagggtaacaataattaataataacagtaataaggctgggcacggtggctcaggtctgtaatcccagcactttgggagtctgaggcaggtggatcacgaggttaggagttcgagaccagcctggccaacatggtgaaaccctgtctctgctaaaagtacaaaaattagcagggcatggtggcacgtgcctgtagtcccagctattcaggaggctgaggcaggagaattacttgaacccaggaggtggaggttgcagtgagccaagatcacgccattgcactccggcctgtgcaacagagcaagactctatctcaaataaataaataaataaataaataaataataacagtaataatagagtttctgagcatgagagaagagatatcaagccataaagagcaaatagaccctgagaaggaactaaggaactgtatttttgcacagtgatatatcttcaacatattatgtctcaaatgtaggaagtatgtataatacattaaacacattagggaaagatttacattttttaaatactgtttttactttctcacttaaataagaacatttcaggtatttggaaaacctacattatccaacaatgattattaacagtggtatcactgtcttatttgttgaattccaagtcatgcttttttttcttttaaatagaatcctcactattaaatgatcctctcctttcattctctattctttttaagtttcctcaagaaatggttttattttcttggctttggaatgattagcagggtgtggtgaaattgttgatttacgtgtttttgaaactgaatttattaaaacacaatctctgaaccttcttaggatcgacacacagtcaggaaaccagaaacaacagcatctttgtggcccctcagaataaaaaagtatatgtattgattaagaagatagcatgttggcctgagtacagtggctcacgcctgtaatcccaacactttgggaggcttaggcaggcggatcacttgaggtgaggaattcaagaccagcctaggcaacatagcgagaccctgtctctacagaaaatacaaaaaaattaaaccaggcattatggcatgcacctgtggtttcagcctcacggggccctaatgcaggaggatcacttgagcccaggaggtcgagactgccgtgagtcatgatcgcaccactgcactccagcctgggtgatgcagtgagatcccgtctcagaaagaaaaaaaaaaaagaagatagtatgttgaaaaatcctgatgatttacctgtttaccctataaaggtatactttcatgatctaaagttgacaataatgacaataatatgtgtcatttcagggccattgattgttttaattaccttctctttatgaaaaatatgaccagttaattatagctccaaataccccacaccagacccacaacaacacagatgcacacgggtgcacacacatacacacacacaggcacatatttcccccgtctagttctgtattctactgttaagtccttattgagaatacttaaaatactcactgtgaagagtgctttggaaaatcttaaatggataatcataaagggatattgttttcagggtgtagcttccaatagaaaaaattgggggtttggtatttcaatgatactttgggtgtataatcgggagaggcccctttatgatagggttcccatagttcctgtaaaaacaagggtagtgatgaatctatttgcctctcttataaataactgctcgtttttctttctgtttttctccttgaagacatgacaatggatgaagtccgagaatttgaacgagccactcaggaagccaccaacaagaaaatcggcattttcccacctgcaatttctatctccagcatccccctgctgccttcttccgtccgcagtgcgccttctagtgctccatccacccctctctccacagacgcacccgaatttctgtccgttcccaaagatcggccccggaaaaagtctgccccagaaactctcacacttccagaccctgagaaaaaagccaccctgaatttacccggcatgcactcttcagataagccatgtcggcccaaatctgagtaactttatataaatatctcatggggttttatattttcatttgttgttgttgtttttttttaagaatcttctgatagagaaaaagactgctttgtcactcaaacatgttccttcgacctttcagtgtgcatgtgactcagtaacttcacatagaatatgattccctaagtatgctacacagcatcatattagatgtaagatgtaagacttgcaaaggacagaaggaatcttctgtaaccacatagctgtatgccagagaggaagccttgttattgggcatttgatgaggtttggcatggacttcaaggataaatgaatgaaaactttgcaccacttttgttacaaggtacggtagaaaatagtgaagtcagtttcctctcatcaaatctaaaattctccaaaatactctcaggcataacatacttagctgttaaattttgaactgctaattactaatacttgaataccaatagttactgagattcctattttgtggttagtctgactcaggatttggagcctaattaactctaaacttttgaaaattttaatcatcaagctatagaggctccaagtgcaattaataataactcatttataccttccacagaatttaataaagattctacttgtttctgtcttttaataactttccccttttgtgcccttgtggcctcagaaatccttaagaattgcatggatgaatgtgaccataactgattttggaatggttcagtttaggaaccaagaggcccaggtgaggcaacatcttttttctctacaggtaccaacaaaccttgacttgtcagcttccatcatcaattaagattctcagaatttgcaattaattgaatagaattcatttactatctgcccactcaaagaagtacaagggtagagtaagctaactgggctttaacatggtcagaatgtctggtgcatgaactataaaaaagagaactgtctcccatccccttccttgttttactcttagtaacatccagaattccctggaacagattgcctaccaccagaccttagaaaagactgtcattctcttgctccttacttgaaatacaaatattgggaatgtcacagacatcaagcaactactgtcaagtgggaggagagaatgagcagaattgctgactcctatttgtagagtgaaaaggaggagtgataatagatgcccttctgtctagctttcctttcttcaactagtggtaatgcaagattagaatcaaggttgacaggaggcaaggtcactcactgaagtgacagaaagacaattctcctttgctccaaagagagaaatctgtcacctttgcacctcactgcctttaaacacagacgggagggcaggccaaatctcagcattgacttttgtcctccaagagaggaagagaagaagtaattgggcaacttggaggcccacgccccagctagccttcctgatcgtaacctccaacctcaggaaagggaccttcccaaaacacagatcccaaaggaaacaaaatagaccaaggagcataatctgcttctctcacacagcctctctgccagtggaccctgcctgcttccctctcagtgctcagcactctgtgtagtgtctttcaggttgatacactctcccaaggtgcaggcgctggccccatgagcccagcaccaaagttttctaagtcataggtcagactgtcaagatcatttctttatctataggttgatatttagcttaaaaaaaaagaataaacctagaactcaaaggaaacctgttgcaaatagcttagatcaacagtgtatctcttccctaagaatgatagtatcttagtaagacaccttctatgcatggtatggaagcatgatttttgcttgtgggaaaacctaatattttatcagacccctcggacttctcaatccctccctctccacacagtagtacttaatgaaaatgttttgctttagagagcaaaatgctactttcagaagacactgaaatagtatatgtatttgcttaccatttgcaagctaaaatcaaggtgggatggggtcattattttcacatagaatgtatttattttgtgcaggctgttaaacacatctggcacctagtttttccattaagagcattgctattttccctttttataaagtagcttctgctgtcaaggttaacaattctatatgctttaggaagctaagttctaatttccttttgtgagtttcatttcttttataaccagtatgttaccacagacatcagttgcaaagctacgatgatagtgtgattcttagccgaaaaaaaagcgtgtgctcttaaagtatgttcagtttttctgtctacatatgctttgtgtgagttaaaaagggggtgggtggtgtaaatattcctttagctgctttgcatatttaacccagtcatcaaaaggcataaatgacttcaatattttatatatcttggttttcaagtatcatttcacattctctatacatgactttgttattgtggaatacaagcctgcaatggatgtatatatacagaacattaataattcttagaaggatggaagccaaatggctgcatgatggaaattagaagaaaaaaaaagcagaaacttgaatttgctaagcatgtttggggggaaatagaatccttaactcagtgcctctgtctgcgatatggaaaccttcaactttgttcaccaaaattgtattatacctgtgtatatatatatatatatatatatataaatataaatatagtatagtgaatcagacaccatcagttttaagtctctggtagccaaacttaaataaataatccatagaatatcacatacgttcactccatcttcatctctgaagttagtggagaccatcaaaatgactgtacatttcataactctgggaagatttcaaatgtgaagtgcccctgtgcattttcttggccatagcacggcattcttgctttagctgtgctttcctgggatgagaagatcttggtgtatttaacacataagctttgttagaaatcacctctgaagatcatttcattttctcactttgggttgttgcaagacaaagcaaaggaaaaggaacacaatgaaggaggccgtgacatttttagttgccaccgttgtaactcaaacaatatgggtttgttggtgaactgatttatcaaggcttctgttacggttttgcatctgtgtgtgaggaaaattttaatttatttggaagtatttattagccatgttgttggtcctgaaaataaatctctaagtagcacagttgtgggtatattatgcagacacttaccacaatacctgcaaaagtaactgtggttttctttcaagacactgtaataaacagtgaactaagagaatagattctgatacatctcgataaatcattctctgcaaaagtttcagggctaatgtatttatgtgtatttttaaattctactttctttggcatctcttcatggctcagcgacaacaaagtaataggtcattggctggcttacgtcgataggaattttactcttaagaagggccagtgtatagctgactctacatataatgtgtaatcagataatccaatagagaggaattgtccaaatagttttagtacctttctgatcatctgactcagtaggctaggagacaatctgtcatctgagccatagttcttgagatttaaaaagtctgtccagtgactgcaatctgattatgaataaactattttaactattcattcttgctgaaactgaagtgtacacaatagcacactgttggcatgctgaggcaaaacattgggttcttttgtgttctaccttcaaaacaatctgtttgcatttgaaatataagtgtttaagctttttaggagttagtgtaataagagaatgtgaatatgttgggaaattttcagatgccattaataattgtaattttgttgttaaattaacaaggactttaggataagcctcttgatgttttttgctttaaattgaaagcatgtctgtcaaattgcaagtctcccttcagtttctatatatcacccaggagagggtctctgagttggtgttgtacctgtaccactcacatgtagctcaagtgtaatttgtagtgtttacattcaagctgggatcttgattggttaaattaatccacataccactgccactgctgaaggaccaggtgttggaatacacagcattacagactataagcaaagcaaacaaaagttgatccttacatatgccatccttctgtgtcattttgtggctgttctgtgtttttcttcctagttatttattattgttaataacttactttttcttacattctgttgtaaataaaatacaaagcaatcttctttgcaa

SEQ ID NO: 8744 - DNA, 10198 bp, Homo sapiens; identical to SEQ ID NO: 8743

SEQ ID NO: 8745 - DNA, 659 bp, Homo sapiens
tcaactttggtactattgacattttggaccagataattttttgttgggggctgggggtcctgtgcattgtaggatgctccatagtgtccctggaatctgcacactagatgccagtagcaccccttccctagttctaacaaccaaaaatgtcacaaaattgtcccccgttgagaaccactagattaagagatcattatcctgaaatactgaaaaactgcagacttgggccaaaaatcatgtcatgtgccattttatttttagatcagtgtgggtggaagtagtgccagccatcttcaagctgttagccaagacttgaggttcagtatagacctgcactctctgacgccatgcattctgtgcaaatttacatctgtgtgcaagttgcaccaaatctcaattgtaccagtgaatatcattgctctgccttctacatcctgcctcctataacagcaatgaaagtgtcctttctgttgttgaatgcattgatttaaacaacctctaaatctattttgaaagctatgtggaaggtaagtattaaaccaagcaaaactgaccctctgtccccaatgggatcttctaatgatgctttaggagatctcaggctatggtactgcccacatgctaatactttctacccaaacctagctcactttacaaga

SEQ ID NO: 8746 - DNA, 264 bp, Homo sapiens
cctgtaatctcagcactttgggaagccgaggcgggcagatcacgaggtcaggagatcgagaccatcctggctaacacggtgaaaccccgtctctactaaaagtacaaaaaattagccgggcgcggtggcggtcgcctgtagtcctagctactcgggaggctgaggcaggagaatggcgtgaacccgggaggcggagcttgcagtgagccgaggtcacatcactgcactccagtgacagagcgagactccgtctcaaaaaaaaaa

SEQ ID NO: 8747 - DNA, 272 bp, Homo sapiens
tcacacctgtaatctcagcactttgggaagccgaggcgggcagatcacgaggtcaggagatcgagaccatcctggctaacacggtgaaaccccgtctctactaaaagtacaaaaaattagccgggcgcggtggcggtcgcctgtagtcctagctactcgggaggctgaggcaggagaatggcgtgaacccgggaggcggagcttgcagtgagccgaggtcacatcactgcactccagtgacagagcgagactccgtctcaaaaaaaaaaaaa

SEQ ID NO: 8748 - DNA, 659 bp, Homo sapiens; identical to SEQ ID NO: 8745

SEQ ID NO: 8749 - DNA, 2999 bp, Homo sapiens
tgatgtataatgggcatctattctgggttctcagggccaatctcccaaaggctgcgggagaactcagccgtttgcccaatttatcccgcctgtcctcaaggaagttttgatactgacatcacatccacggctgttctctcttcctcttttcatggatgagcaaacaagcacaatgcacagacggggtgtctttgagaagaactgagctgggtgaacctctcttagttctcaggaaagatgaaacaaacaagtggctgtcagctctagaaagtagattttataagggaaggataagtaagtgatgacctcagagggaaaaccaagccaagtcaactcagccacaaaggagggcacagacccaggagctgggaaattaggtctgcatcagccttctttcccagctcaggtagactgcgatgggtaggataagagggctgatctgttggcccagtggataccataaagtacggctctggcctccaaacaaagaagaaccttgtcttcccacctccttgaattctatgatgaaccttcgccttaatagcatcaacattaaaaagtctgcttcatttaccattaaattattcatctactgtatcaaaattacattttctttctaaagcctgaaagttgtgataaaaaaaaaaaaggcaagaccatgcaattacatgcagcaggcaacaaagtgaggaacagatctagatggagcaacaggttaatatgaatttgcattgaagtccttcatttccaggctattaaaaatctttccacaattccagaaatatgggcaaatcttacctaattttactgaaggtttagctaaggtgtagggacattgctacatcaggatgccactgggataacaaagaacccaatgctactcagcttattggaaattagaaacctgggcccgttttctggcctgtaaactgcactgtggcccttaatgtggttgtatttagtgtaaaagtcacctcacttggacctggcagtgctggatttagcttttctacctctactgccataacctgtagagtcccctcactgacacactttcctctccagggccctggctctttccctatccccaattccccacttgcccaggggagcttgtttttccttgtgaatccacagcacctcatgatatttctacttttcagaggcatgaaaaggctagtctgacacttcccgttcttggtaggccaactccacattcaaatcctctttggctgccttggcttctccaagatggaattcaccatgtctattattaggatcacatgcacagtcattaaattacaagagtacaaaactatttttatccttggtaaacaatgtatgttttctgggatgtctttcttccttttcttcaagtagtggcctctattggagaagctgcagagggggctgggacttgggtaagaaggaggccagggttggggagtggattctgagttgggagaaacagaaacacgttgtggccaaccatagctgctttaaaatgaaagggctggagagacgaaagagagaggtcctttttattgtgatgggattccctcccttgggaggggaattccttgttatcatcagagaccagaccagacatcaaaagccaggctttctcctggggtctggaattattaaatgagtaaaagccaaatataagtacctccaccaggaaatacaggaaataaagacacagggagccaataaagttatcatttaagggtgttttcttctttttttaaatcttaagattacctctaatttatagtacaaaagtcctaacaaattaatttcttgttcacaaaaaagacattagatgatttcggccaataagtaacatttccctcgccttctttaacataactgaaagcaagaaaaagtaggcaatctctaagcacaagcaaataatccatcattcagaaccttgaaaaaatatcacaccaccaactggtctgacgtcttgaccacctcaccatttaggaaggaatactggggccccttcttggaaaatgcctgctgacagaactattgggaaaaacagctatgggggtcaccatgcactgagaaaataaaagttagggatttacagtgtcatcctcaaaaagttctgtgacaaaaacacatctttattgccccaaatcaagatctatgacaggcctgctcctcattacatgcatttcatgttaagagtatttggagacatctacgtcaagggagtgaaggaatgtgggcaagaacttactggaaggcagtgtgcttggccctacttcagagctgctcagagggacagtccgcctccatgtcctcacttcttaatcttaagccacctagacttgccatgagggcatagaagaggagatgatgcataaccctgtctcagacaaaggtgttatttagcaggtcttgccaaggtggcaggggcgtgaggccaaggcctcccgggagggaatatactctccagtatcatctttacctttgtgactgcatagatgaaggcagctaacactgaccccattcactctcgctggctagatataggcaggtcaggtcccaaaccccaatgtaatataggctccctctttcacactctgtcaatggcacaaagccctattgttaatacagttctctactcacactcaagataagagtaaacaacactgtccttcgactacacaactttcttcctctacacacatctgctctgacagctttcctccaggcgtctcatcacagcaatactgaaagggactgtggcaagccagttttgggacccgtcctccaggtaacccgaccctcctcaatccactgctgggccttcctaggctgtcctttactcaccttctagcaggtctcagaaaagatgtggacccggtgccagacaaggtggaagccatggttataaccacaaacaatttaggaaattggagcccatacccacagatgggccctgggttcaccctccctctgccatcttttctgcctgggcaagg

SEQ ID NO: 8750 - DNA, 1366 bp, Homo sapiens
cccttgggaggggaattccttgttatcatcagagaccagaccagacatcaaaagccaggctttctcctggggtctggaattattaaatgagtaaaagccaaatataagtacctccaccaggaaatacaggaaataaagacacagggagccaataaagttatcatttaagggtgttttcttctttttttaaatcttaagattacctctaatttatagtacaaaagtcctaacaaattaatttcttgttcacaaaaaagacattagatgatttcggccaataagtaacatttccctcgccttctttaacataactgaaagcaagaaaaagtaggcaatctctaagcacaagcaaataatccatcattcagaaccttgaaaaaatatcacaccaccaactggtctgacgtcttgaccacctcaccatttaggaaggaatactggggccccttcttggaaaatgcctgctgacagaactattgggaaaaacagctatgggggtcaccatgcactgagaaaataaaagttagggatttacagtgtcatcctcaaaaagttctgtgacaaaaacacatctttattgccccaaatcaagatctatgacaggcctgctcctcattacatgcatttcatgttaagagtatttggagacatctacgtcaagggagtgaaggaatgtgggcaagaacttactggaaggcagtgtgcttggccctacttcagagctgctcagagggacagtccgcctccatgtcctcacttcttaatcttaagccacctagacttgccatgagggcatagaagaggagatgatgcataaccctgtctcagacaaaggtgttatttagcaggtcttgccaaggtggcaggggcgtgaggccaaggcctcccgggagggaatatactctccagtatcatctttacctttgtgactgcatagatgaaggcagctaacactgaccccattcactctcgctggctagatataggcaggtcaggtcccaaaccccaatgtaatataggctccctctttcacactctgtcaatggcacaaagccctattgttaatacagttctctactcacactcaagataagagtaaacaacactgtccttcgactacacaactttcttcctctacacacatctgctctgacagctttcctccaggcgtctcatcacagcaatactgaaagggactgtggcaagccagttttgggacccgtcctccaggtaacccgaccctcctcaatccactgctgggccttcctaggctgtcctttactcaccttctagcaggtctcagaaaagatgtggacccggtgccagacaaggtggaagccatggttataaccacaaacaatttagg
